United States Patent Application Publication US 2007/0161031 A1 - sequence listing, part 7

SEQ ID NO: 7821 - DNA, 2300 bp, Homo sapien
ttcttcctcttcttcttcttcttcttctttcttcttcttctccttctccttttccttcttctttttttgctgagacagggtctcactctgacagtacagtggtgccatcacagctcactgcagcctcgacctccagggctcaagcaatcctcccagctcaccctcccaaatggctgaaactacaagctcgcaccaccatacgtggctaatttttctatttttgtgtgcagatgaagttttcctatgttgcccaagtggtctcaaactcctgggatcaagtgatccatccacctcaacctcccaaaacgctgggattacaggtgtaagccaccacacccagcccactaacttttttatatcggctaatgaaatagttttaagtttagaccctacgaggcataaagaaataattttagttatgttatcagatgtacagtaatactcaagtgtgcaactgtggataacttgagttcatgaggtttttgtttttttgtcaaaagaataaatttatagtgaaactacccaaaaaagcaaagtacagaacagtatgctaccatttgtgcacagaaatgggatatatatggtgtaactgcatcgaatttactggatgtatgtccagggaccagaactcttggtggcttcatgttcatacttttgcaagcacatgtgtagtatccttaacttaaaggtactgttgtatacattctagtgttatcaaaatttacatacatattatcaagtcagagaggtcattctgtgtcttagtattttcacttcatatttggtatatttatgtatgtatacacacatacctatatgtatttaaataagatttatagtcacatggtccaaaaatcaaaacaatgtggaaaggtttacagagaaaagtctcaagcctaatcctgttctctactgccaggtgaccatgttattaatttcttttcataccttgccacagaattttcacctgcaaacacagatattcttttcttttttaatgacagagtcacgttctgttatccaggctggagtgcagtggcgtgatcttggctcactgcaaactcctcccgggttcaagtgattctcctgtctcagcctcctgagtagctgggattacaggcatgtgccaccacacccagctaatttttgtatttttagtacagatggggttttatcatattgaccaggctgatgtcgaactcctgacctcaagtgatccgcctgcctcggcctcccacagtgctgggattacaggcgtgagccaccacgcccagtcaacacagacattcttactccttttttacagagaatttattattattattttttacatagcatttttctgcacctttctttttccacttaacaatgcacttgaagatttttccatatttgtacatcaggagctttctctttctttgttaccacattaaattccactgggtagatgtaccataatttaactgggtccttattgaaagacaattgagctgtctcctagacaaagccttgtgcaccttcccgaacagagggtctaaccaagcaggcaggatggggttataaagtaggtggggaggtgggagagactccaccttcccaggtgggctgagaatggaggtaaggccctgcaacaggacagagggaaaagtggggatgagaggtgggaggcgagatagcgcccactgttctcgctcagccccctcctccgtttgccgctgacctgttggcctcccccaacctctgagcctgcctctgcctaggtaatttcccaagacccagaaggggtgaagggtgaggtgtgattgcccccacctccttgcctcccgcagcatctgctccgggaccatgaacaatagctgacagctccatggcccttgctgtccccatctcagcttccctgggcatctaaacctcagctgccatggggtaggaggacaggctgaggaagcagaagcctgaggctgtctagagtctcactcctgcatcagcaggccaccacctgtggttcctccttgtgcaaatttgaaaagaattgcataaaacactggagaaatccaagaggggaagtccacaagggcggtggctccctacaaggtcacagagcaagctggtgtcagagcctggacctacagcgctgttggtggaggtcctgcctccaggtaggggaagggctccctctcacctctacacgcagcgcatttcttggctcagctgccctgtaggggatgcagggtggggacagcagagatctgggcctgggagggagagagtacacaatcacatggctgttgcccctgtct

SEQ ID NO: 7822 - DNA, 2300 bp, Homo sapien
cccgtctctacataaaaatacaaaaaatttagcccagtgtggtggtccacgcctgtagtcctagctatgcaggaagctgagatgggaggatctctttagctcaggaggtagaggctgcagtgggctatgactgtgccactgcagtccagcctgggttgatagagtgagaccctgtctcaaaaaaaaaaaaaaaaaaaaataggaattgctggatggtaatgttgtaggagtttctcctcagttcagccaaagacagggtccttgtcacctggccatgaaatattaggcttgcagacactttgaagggtgagaaaaatggaatttattgggcaaaaaaaaaaagcggggaaacggggaccctcggcagagtgagagtcctgctagtacacgcttcccacctctcaggttgaatcccaggttccaccctggaagaggaggggccaggctcctcagcacgaacttccagaggctccaccccagtgcacattcctcccagtgtgcgggtttgtcagaggttctctggggacccctttacacttggctgtctcattcccccctctcaagaagtacatcaaactactgttagaacaaggataggggtgaggacgaagaccgatctaaactgcttcctgctaacagggagcggtgttttgggaaacggcagtcagagctccctcagaagcctatctaagggttcccggcagaaggcgccatcttccgaggctccggttgcacgaccatttggagtttgatggcctgaaggcaagaggagaaaaaccaggttattagaaaacatgtgttaaaacgaaacaagggagggtaaggacagcttaaaatccctaggccttttaccagtttgcacagggagagggaaaccaaaagcccgactggtaaaaaaaactttacccttttgccagcatgtcatgcttgtgggttcccttcctctgagcccaatcctaagccaaccagctgaaggtttgggaaattaactctttccagtttggaggatgcatctgaggggagtgtcctatagtacaaagacacaattacctattagtgaagagaagacagtggagaagaaaggaaaaaaaggtgctttttaaaggagtcccaggggttcagcatgcattcaaaaggggtacagagtgaagatgaatggctacccatctagaaagaggggagcaggcatccctgtctcctatctctttctagcagataccaggggtacatgagggagagaaggaagagcgtcctctttccctcttctgtccttgcatacccaagtcctggtgaccttggcaggtgctgccatgggtgccacagcagcttgcacccatgaagcagggagtacctagagaataggaattatcagccagactcagtggctcacgcctgtacaacccagcaccttgggaggccgaggtgggcagatcatgatttcaggagtttgagaccagcctggccaacatggtgaaaccccgtctctactaaaaatacaaaacttagctgggtgtggtggtgcatgcctgtagtcccagctactcgggaggctgaggcaggagaatcacttggtcccaggaggcaaaggttgcagtgagccaagatcacaccactgcactccagcctgggcaacagagtaagactccatctcggggaaaaaaaaagagagaataggaattatccgctcttacctatgtttctataccccctacagtcagtagtcttggagtttcctagacctcatttatgctgtggggaaaagcaagagagatcagattgttactctgtctgtgtagaaagaagtagacataggagactccattttgttatgtactaagaaaaattcttctgccttgagattctgttaatctataaccttacccccaaccctgtgctctctgaaacatgtgctgtgtcaactcagagttgaatggattaagggcggtgcaagatgtgctttgttaaacagatgcttgagggcagcatgctccttaagagtcatcaccactccctaatctcaagtacccagggacacaaaaactgcggaaggccgcagggacctctgcctaggaaaaccagatattgtccaaggtttctccccatgtgatagtctgaaatatggcctcgtgggaagggaaagacctgaccgtcccccagcccgacacccgtaaagggtctgtgctgaggaggattagtaaaagaggaaggaatgcctcttgcagttgagacaagaggaaggcatctgtctcctgcctgtccctgggcaatggaatgtctcggtataaaacccgattgtatgc

SEQ ID NO: 7823 - DNA, 2300 bp, Homo sapien
caggttcaagcaattctgcctcagcccccaatagtagctaggattacaggtgtgcgccaccatgcccagctaatttttttatttttagtagagacgggttttcaccatgttggccaggctggtttcgaactcctaacctcaggtgatccgcccatctcggcctcccaaagtgctgggattacaggcatgagccactgcacccagccttctttcactatttttaaataaaaatataaataggccgggtgccgtggctcgcacctataatcccagcactttgggaggccaaggtgggcagatcacttgaggccaggaatttgagacaagcctggccaacacagtgaaaccccatctctactaagaaataatatcaaaaaatagctgggtgtggtggtgcacacctataatcccagctactctagaggctgaggcaggagaatcacttgaacccatgaggtggaggttgcggtgagccgagattgtgacacggcactccagcctgggtgatagagtgagactctgcccaaaaaaaaaaaaaaaaaaaaaaaacaggccaggtgccgcggctcacacttgtaatcccagcactttgggaggctgaggtaggcggatcacttgaggtcaggagtttgagaccagcctagccaacatggtaaaaccccatctctactaaaaatacaaaaattagccaggcatggtgtcaggcgcctataattccagctactcgggaggctgaggcaggagaatctcttgaatctgggaggcggaggttgcagtgagccaagatcgtgccactgcactccagcttgggctacagagcaagtctccgactcaaaaataaataaataaatgaaaaaataaaaaaattaatgttaaatctcaaccccaaagtgaacacaagatgtatgtaacatgtatgtttgcttagtatacatgcatgtggctccctttcatgaacattcatagcttttcctataacccattaatatgtatgctagccaacccattttacataaaactcctgtcccacccttcctccctcaaattgcctgcttttggtctcagccaaaggctccacttaccagcctgcaggttacaacctgacataagaaaaaatattgtttccaaatatatagatctggtgattttaagttgacacttctcaggttgtcacaagattcaggtatggctcactgttgcaggacataagctgggatctcctgggaattggtctgcttgcaggccctagagagccttccttcttggttgattttcctctagagatccaactgtcttctcaggctcccctgcctgcctcctccttgggtcctttcttgtggcattgcccagattactgggcccccattttccctacacttactgccactcatagtctgatggttcccacatctgcatccaacctggactcttcccctgagctttcccctctacaaccaccttccccgggccaagggcacacaggcacctcgacaaaacagtgttctatgtttcttcctgcccaaacctgcccctccctctcccttttcccatctgtggtaccaccatgggctcagagaataaaaaaaatgaaggcttctgtcattgactggggtggagatggagggaagagttagcccagaatcacaggtgctgtagaaaggatacctgagttgccgggagagggggtccatgagttggggatggaaggagagcttggcccttcaaacaattgaagatctgatcaaaagattcagaacatctgtgattttgtggctggtgatgggtgacacctgggctaatggggttgggggagttggtggctctacaatttatggccttgggagatccttgctctctatagctgactgggaggttggaagcctgggctctagcccttgccttgatcctccggatctcattttcctcatctgcctaacaggacagaggggttggaaactgatgagattagctcaaaggatcctggcagctcaggctgcaagatttttttcagacctcagtgtttgggaaaaaattgggtaggtggagcttagggactggccttaggcctgcactgttaattcaccccctcccactaccccatggaggcctggctggtgctcacatacaataattaactgctgagtggccttcgcccaatcccaggctccactcctgggctccattcccactccctgcctgtctcctaggccactaaaccacagctgtcccctggaataaggcaagggggagtgtagagcagagcagaagcctgagccagacggagagccacctcctctccc

SEQ ID NO: 7824 - DNA, 2300 bp, Homo sapien
ctaagaaataatatcaaaaaatagctgggtgtggtggtgcacacctataatcccagctactctagaggctgaggcaggagaatcacttgaacccatgaggtggaggttgcggtgagccgagattgtgacacggcactccagcctgggtgatagagtgagactctgcccaaaaaaaaaaaaaaaaaaaaaaaacaggccaggtgccgcggctcacacttgtaatcccagcactttgggaggctgaggtaggcggatcacttgaggtcaggagtttgagaccagcctagccaacatggtaaaaccccatctctactaaaaatacaaaaattagccaggcatggtgtcaggcgcctataattccagctactcgggaggctgaggcaggagaatctcttgaatctgggaggcggaggttgcagtgagccaagatcgtgccactgcactccagcttgggctacagagcaagtctccgactcaaaaataaataaataaatgaaaaaataaaaaaattaatgttaaatctcaaccccaaagtgaacacaagatgtatgtaacatgtatgtttgcttagtatacatgcatgtggctccctttcatgaacattcatagcttttcctataacccattaatatgtatgctagccaacccattttacataaaactcctgtcccacccttcctccctcaaattgcctgcttttggtctcagccaaaggctccacttaccagcctgcaggttacaacctgacataagaaaaaatattgtttccaaatatatagatctggtgattttaagttgacacttctcaggttgtcacaagattcaggtatggctcactgttgcaggacataagctgggatctcctgggaattggtctgcttgcaggccctagagagccttccttcttggttgattttcctctagagatccaactgtcttctcaggctcccctgcctgcctcctccttgggtcctttcttgtggcattgcccagattactgggcccccattttccctacacttactgccactcatagtctgatggttcccacatctgcatccaacctggactcttcccctgagctttcccctctacaaccaccttccccgggccaagggcacacaggcacctcgacaaaacagtgttctatgtttcttcctgcccaaacctgcccctccctctcccttttcccatctgtggtaccaccatgggctcagagaataaaaaaaatgaaggcttctgtcattgactggggtggagatggagggaagagttagcccagaatcacaggtgctgtagaaaggatacctgagttgccgggagagggggtccatgagttggggatggaaggagagcttggcccttcaaacaattgaagatctgatcaaaagattcagaacatctgtgattttgtggctggtgatgggtgacacctgggctaatggggttgggggagttggtggctctacaatttatggccttgggagatccttgctctctatagctgactgggaggttggaagcctgggctctagcccttgccttgatcctccggatctcattttcctcatctgcctaacaggacagaggggttggaaactgatgagattagctcaaaggatcctggcagctcaggctgcaagatttttttcagacctcagtgtttgggaaaaaattgggtaggtggagcttagggactggccttaggcctgcactgttaattcaccccctcccactaccccatggaggcctggctggtgctcacatacaataattaactgctgagtggccttcgcccaatcccaggctccactcctgggctccattcccactccctgcctgtctcctaggccactaaaccacagctgtcccctggaataaggcaagggggagtgtagagcagagcagaagcctgagccagacggagagccacctcctctcccaggtatgtgacactccccatcccccttcagaggccacacaccctatggcattcccaccatgtgttaaggattttctgaactggaagggccctctgtttgcctgaaggccagagaatcttgaagtggagactgaggcccagaccagagtgtggcctgctcaaggttaaacgacaagttagtgttcatccccctgaactagtacctgggctctagcccttcagtccagagctgagttctcagctcttctagtctggggccccaaggttgggtgtgggggtcatgattgttggtggggaggggtcacagctggactaagacctgaaggtgagactaggcaggtgggaaaggagcttgcag

SEQ ID NO: 7825 - DNA, 2300 bp, Homo sapien
tgggggtcatgattgttggtggggaggggtcacagctggactaagacctgaaggtgagactaggcaggtgggaaaggagcttgcagagtgatgctgctcaaaaggacaggaagagagcctggcttcagaagcagccacagcaagagagactactgactgaacaggtgggctccactgggggctggggaaaggattttctcagcccccatccccagcactgtgtgttggccgcacccatgagagcctcagcactctgaaggtgcagggggcaaaggccaaaagagctctggcctgaacttgggtggtccctactgtgtgacttggggcatggccctcatctgtgctgaaatgattccacaaagattaaactggctatcatttgttgatttcccccttcttacatttaatccttgcaggagaaagctaagcctcaagatagtttgcttctctttcccccaaggccaaggagaaggtggagtgagggctggggtcgggacaggttgaacgggaaccctgtgctctaaacagttagggtttgttcccgcaggaactgaacccaaaggatcacctggtattccctgagagtacagatttctccggcgtggccctcaaggttagtgagtgagcaggtccacaggggcatgattggatcctggaatgaatgaatcaaccatgagagagtgaatgaacactggaatcaatagagtagcagagtaatggattgtggagcaggaaagagagctgctgggtgggaattcaattccaggcttatatgagccctgctgtgcagtcggcctggagacagcccagctcaggccctgcctagacccctgtcaaggaggccctgtcaagaggagaggaggggcagcacgggggcaaggcaagcttgtgagcgggaaaggcatgtccactttagcgactggtatgtggaagatgagttagaggagacagatggagagaagtcataggaaataaattctgagcattttaggagggcccagacacctggtgtccagtggagtgaaggaaacagtcgcctcccaaaattcagtgtctgaggtcaaaggattgaagttctgtgatgaccaaggagaagccagctctgtggtagggggcacaggagctccccaaggccccagggctgtccagctggctgtcccctgccagcacccatgtcctgtgaccccaccccaccaagatcccatggtttccgggaagggcctactaaactagcttgagtgatgaggctagaaaggggctgggaccaaggtttaaaaagcaaaacaaactaacaaaaaccacactgcagcccccccaactaaaacatttttataaactttttttttttttttgagatggagtctcgctctgtcacccaggctagagtgcaatggcacaatcttggctcactgtaacctccacctcctggattcaagtgattctcctgcctcagcctcccacgtagctgggactacaggcacacgacaccgcacccagctcattttgtatttttagtagagacagggtttcactatgttggccaggctggtctcaaacttctgacctcaggtgatccacccacctcagccttccaaagtgctgggattacaggcatgagccaccgcgcccagcccatttttgtaaacttttacaatgaagtaatttggtgtcaaaatctgacctgaaaattaatgtgagtttatgtatagttttaatttatcccactagtgtaactgtttcaccccagaatatacacttgattattgggtatatgaaaattatattttctttgaatcacctttgatgaaatcctaaaaaattttaaccctgaaacatttgaataaggcattgtggacctatggcaaactcctggctatttctgcattttgcccaaatccatccttgaattatatcacctgaacctcgtgaccacctggagaaggcaatgaggctcaagccagggaggggtggtgtctaatcctacctttcattggatctgggaaaactgagggagatgggggcagggctctatctgccccaggcttccgtccaggccccaccctcctggagccctgcacacaacttaaggccccacctccgcattccttggtgccactgaccacagctctttcttcagggacagacatggctcagcggatgacaacacagctgctgctccttctagtgtgggtggctgtagtaggggaggctcagacaaggattgcatgggccaggactgagcttctcaatgtctgcatgaacgccaagcaccacaaggaaaagccaggccccgaggacaa

SEQ ID NO: 7826 - DNA, 2300 bp, Homo sapien
tacaatattaaaaacaactcaaaatagatccatgacctaaataaacataaaagcaaaaatgatgaaagtctttgaagaaaacctaggcaaagagtttcatgacattgaattaggcaatgagttattgaatatgagaccaatagcacaggaaacaaaagtaaaaataggtaactggactacatcaaaattaaaaacttctgtccatcaaaggacaatcaacaggcaacatacagaatgggagaaaatatttgcaaatcatatacctgataaagggtgaattcagaatacataaaagaatactacaactcaacaaaaagaaaactcaattttaaaaataggcaaatgacttgaatagacatttctccaaagaagatatacaaatggctaataagcatggaaaaagatgctcattatcactaattattagagaaatgtacatcaaagtcacaatgagatatcgcctcacactcaacatgatggctactataaacccaaaactcccaaaacaggaaataagtgttgatgaggatgtggagaaattggaacctttgtgcactgctgatggaaatgtaaaatggtgtggccactacagaaaacagtgtggcagttcttcaaaaattaaatatagacttaccatataatcctgcaatttcacttctggatatataccaaaaagaattgaaagaaaggtcttaaagacatatttatatgcccattttcatagcagtattcttcatgatagccaaaagtggaagcaacccaaaggtccattgatagatgaataaataaagaaaatgtggtacatacatacaatgaaatattacccagccttaaaaaggaatgaaattcggatacaccttacaacatggacaaatcttggggacattacgaaaagccagtcacgaaaagacaaatattgcatgattccacttggacaaggaacttacagtacagtagcccaaatcacagagacggaaaatagaatggtggttggcgggggctagggaaagtgaaagtggggaatcgtttaatggatatggagtctcagttttgcaggatgaaaagtttccaagattgattgcaaacagtatgactatatttgacactgctgaactgtaccgttagaaatggttaagatggcacattgtatgtcacgtgtgtttttaccacaatttttaaaaggccatcaaaaattgcttaattatgttttcagaaatgccagatggtaatatattgctgtttaacatatttgagacaattttaatttttctgtgacccttgacttctatacctcaacttttttttttttttttttttttttttgagatgaagtctcgctctgtcgcccaggctggagtgtagtggtgcgatctcagctcactgcaacctctgcctctcgggttcaaacaattcttgtgcctcagcctcccaagtagctgggattacagtgcacgcacggcaccacaccccactaatttttgtatttttagtagagacagggttttaccatgttgtccagggtagtctcgaacttctgacctcagtgatctgtctgcctcagcctcccaaagtgctgggattactgacgtgagccaccatgcccagcctatacctcaacttctacctatgtccacctggctgcccataaattaacccaatagctgtcacttaagcctactcagtatgtgccaggcttttccctatacaattgtgaacaattttctagtgagcaaactgaagctcagtaaggtccagtgacttttcccaaggttgtgcaagagatggagctctcattgggtcccattggcctgaccctaaagcctgggttcttttccaccagacctaatctccatcgagctggccttatcctaagaaccacttggggtatctataaaatccagatgccccctggtgatgagcaattctctagattttgatgaaagttgaatgtgtggatgctggaatgagtaaattaacaagtaaggagatgaatgcaagcaggaatgactaaatggacagactcagggagccttgaagagggtggggtctggaagggaaggaagagaggaaggagaatagctaagtagggagatttcactcagtgcttaccagagcgcgttgtctaccctgtaccgaagacagaggctgtggggacagcctaggggcctggatctattgcctacttagagagaggccaactcagacacagccgtgtatgctcccagcagcaacggaggttcaggcaagatgcccgaaggagggaagggtgacaagggcagtggggagacttggagagtttg

SEQ ID NO: 7827 - DNA, 2300 bp, Homo sapien
tgcaaagccctcgggagctgggcctaagttatctctgggtctcccaacacccctttccctttggataagtctttgtttgcacactcctactacaactgtccccagagaggcccaggtaagtctctgagaacaccctgcaggtaggtggcccagctaggactagaacccaggtgtgcagactcccagtccaggtctctcccccactaccaaggattcccctcacatcaggctcatcttttcttatactaaaaggtggctgatgagaacggtggcacagattgtaggatgagttattgggttctggaggcactgttgggtgggtgggtggatctcttagttattatatttatctagtgtggaaggccccacagagccccttccacgtcccaggctctgctccagctgggttaagtcaatgcatatttgaaatagaggaaggagctcgagggactgacccgggctccgtcaacaggttcaacgtagcaaagtgaaagttctctcccaggttaaagggattctcccacggcggcccaggagatggtggcggcgggcgcccggctggaggcctgcgcctttaaggagccagggggcggaggggcggggcaggaagacgactccccggagacgccgccaccggctaggtctttttttgggagggggcgggccagacccttttatgggctccgccccctttgcggctgccgcgtcccccttccgccctcggctggaggggaggaagctaggggggcgttgcagcggaccccgtctgggagctccccgctgggcgtccggcccgcggaggcgcgagtttgctgactcggagggagccgctggggcgggggcgagtgctaataatacccgttcgttccgcagccgcgctttacagtttacacagctgtcaccttcgtttctccttaattaataataaaaatagccgccgttcgggagcgcgggctgggcgccaggcccggtgccgagcgcggtacgagctcggcccccagagccggccctcgccacaggatccccattttccagagcgggaagccgacgctcaaccccgcgccgcgacttgcccgaggtcacccagtgggccagcggctccgggaccgaggcgcggggcggggtgaggcgaggcgcggtgctgcccccggctccccggggcggcgcggggcggggcgggcggcgcggagggcgggggcgcgcgcggatggccatcttaagtggccgcctggagcccagggccgctgtccggggaagggggcgccggagcagcccgggaggtgggggtctgcgtgcggcggccgggatcccgggagggaactttctactagacgggccagggatcctcctggcttcggactgctgaaccccctcaaggcccggcctgcgggtgtggggggtggtgctggggaacttggccgagagggggaagggctctgcggggctgggaggggctgcgtgagaggctcgagaacgtcgcacctcgtctgggccccccgccagagtaagaatcttcagaagcctggttagccagggaatctccccgcaggctttgccgggggacggttcccgtggagttgggggttcagatctaagagggggctgcatttcgcaggagttgggggccccgcccgcttgggtggagggaagaggatgggtagggggtggtcctggatccttcgcaggtttggggaactcgatgcagccaagctgtaagggggacgagaggaagagccatggagtggaatcagacctttatggggcttaggggtcatatcattgggagaactgagaagcgctgaattctccagggggtgcctggatcccgaagtgtcggggccaggatggggggactcggatttcgatggggatttggggactggatctcctcgggtgaatgatgggggcaggatcattgtggggtctgggaggtcccgggcccttcgggaaggtgggggcaccgtccccgcaggaggagctgggggcaggggcggcccgggctgcgggccgagcggagggggagggggcggcagccggccctgcgctccgctcctgcccctcccccgccgcctctgaacaaacttttctttctcttcaagttgaggccggcgctgcaggcagcggcggctgcgcggtgaacgaggcggcctgcgcggcggagtgctgagtcccgatccccggctctgtccggcccacggatcctcaagcccgggccccgggcccggccccagcctcagccctgagcgtctcggggcggatggcgcggggcggcgggggcgggcggtgctgagccctgcgcg

SEQ ID NO: 7828 - DNA, 2300 bp, Homo sapien
aggatcgcctgagccaaggaatgcaagactgcaccatgatctcgttgctgtactccagcctgagtgacagagtgaaagactgtctgaaaaaaaaaaacacaaaatcatagggacagaaagaggaatggcggtttgcaggtaggatggggaaatggaaggtgttgtttaacgggtagagttttgattttacaggattcaaagagttatggagatggatgtattaatacataaatatgaatgtatttactaccacagaactatagctcaaagtggctaagatggtaaattttatgttatgtgtattttgccacaataaaaacatttgacaagaggtaatttgagaaacctcaaagaaatcccctggcatggagtggttccggagattggggatagagagtcctcctgggaagcccagaacggatgatgggggaaggattacctgaggagaggcgcactcccctctgtcctgacaaacttggggagaattccaggagtccttctatcaacccccaaggacttcagctggaaacaaagacacgcccttcccgcggcttctccatgggtctaggactccccatctacaagacctgccaagatcggtggaagaggctgggggttgagtggacgagctgcccaacccagctcaggagcgacggaaaagttatctgttcccttctcttggtaaggattctgaatgtgtcccgctgtcccacagcacgagggagctggtgactgaatctgtgcagggatgtctgggccaggtgcagactgagtctaggtggtttccctggagaaaaaaagcggggggccctggagaacaggggtaagagactgaagaacaataaagaggtcacggggtacgttccctttctgacatccatcgcatcctgagcccaaggtcacaggagagggtcgcatactgcagatggagctgagggaacggggggagaggcaggcgggccctgaaggtgcaaggtcgtgtgggcctcgggacaagtcagggtagagggacctggctcccacgaccctccctctccgcagccccgtggaggccgcaccccagagcctccagcatcatccctgggcccctctgcgctccagccctcgtgtctaagctccccggaggcgttttctctccgctctcagcctctgctcccgcgcttgtggctgtccctggccctgtctctctcagactgtccctgggcatatgtgtctgtctcacgattcctgcctctgttttgtctcatccctcccttgctctccaccgcagtcctggttgccgtccatgtctcatcccgaccccttctgtctccatgcctccctcactctctttctcgtccccctgtctccctgtctcctcttgtctctctcttaacctcatctcctgtctctgccctgtccccgctccatcctgtctctctcttaccctcatctcctgtctctgccctgtccccgctccatcctgtctttcgctgtgtatgttccgtccttgtctccctctgtgtacctgtatctcttgtccctgtctccatcactgtttctgcccctttctctcccggtctctgtttcctctgtctatccacgtcccttccctgtccccatcccaggctccgtctcttcccggtctccatcccccttcctgggccgcctccgcagtctccgccgggatgggacctcgctgggggcggggctgaggggccagatcggaataactcggttatcagagcgaattgaattaacttcttcacacgagcgccgccaggcctgcctcccctcccttccgcggggccgcaggtggggaggcccgggaaaagggtcgggaccctctggcctcggacgctgtgtagagaccgaaggtctggtccggattggggcaggatagggactccggggatagggtcccgcgcatcccagctccacacctctgagccctaagacggcggcggggacccttcggggtgggggtcggggcggctttgggcggtgtctgggcctcctaggccccgccccttcggagctcgccccgccccgcccccctccgcggggtcctgcgcgttaaaaggcgcgcgggccgggctggctgcacttgcgttgcacccgggctgagtgcggccgcgacggggcgggcggactctcgggcgctcagagctggcctcgggtcctcggagcctggcgctcgaacctcccttccgacctccacccggaccccgaccccgacccggcctggcccggcccccgcccccgccccccgggccgatggactactcctacctcaattcgtacgactcgtgcgtggcggc

SEQ ID NO: 7829 - DNA, 2300 bp, Homo sapien
cctagactcttaatttagccaacttttagaagaacacggctcctttcacgtcactgctgtcacccctgccctaacacgtacacacatgtccacacagtattcacaagtctagcctttgccgtttcaatatcttcacttcctcagatacccacactctcagctccctgtttctgttggacaccagggactccccgcttagccaagcttgcacttttccctcttcatccccagcattcaggtacctatgaggtctgtgggttccccttatagccagcctttccagagatcctgggccagttagtttagacaaaatctggattcttgcccaggagagaggttatactgagctttttctcaggcctctttcaggattctcagggagcattttctgggcaggcagaagtggctagtctgatgtccatgaatttgcacagcttccatctgtttctactgaggccagaagtagagagaaagtcgtattttaggcaggaacattagagatcgagatgagaaagaccactggcttgaggctgaactcctaaaacagtattccagaccttcacagtctggtcccaccccaccactcctcatgatcattcctgtctctccacctctgacatgctggccacctttgcctcttcaaatcctgcccatcctccatgatccatcaccagtcctgcctcttccagagaaccttcccagacctctgcagtcgtttctttgaaatccaaccacacagtatagtagttaggatcttggcaactcaagatgggcagacacatcccaaacactgtcaaatctttccccattgactagtgttccaggccttgttctctgacatctatcccttagctaattttcccctgacaccctggggaccagatcagacatgctgttccatttgcagactgaccttgacattacacagtactctctttcctgctcctgactgccgtgtttccattagtgcaaccaaaattcatacttttttgagcagccatatgttacttttttaaaaaaagacgacaggtttagagagagaagcaactctgccatctactagttgtgtgacttgggcaagtctctatctgttgcctcagtttcgtgttcagtataatggagttgagaatactactttcctctccgggtatttgtgtgggtcttgaatagatacgttgttggtgaattttcccattgtgcttagcatacagcatgttcagtgcatgattcttcttgcagttctgcctcactccacccccactcgtatacttgagaatgtttctgagcctgattctcctactccataattaagcacttagttttctcagattgaatgcatagcccttaattacatacgtcctcttgaagaggaggtcaggtcttgctctagcagagttgagcctccaaggaacctggtacctatctgtcccactccccgtgctccccactccctccaccactggaggctatggtcagcatctctggtaaccatgtggcttaccccttccatgccctgagctccacattgcctttgattgacttccagaaaatgcatttggctgtgtttccactttctgacccagacagtggaccagaccttagcttccccagacaggaaagagtccagggctcacaccccacatccccaagggcctgccatgggcttctgcctcttgtatttgcataggaggcggcccgtagtcccactagcgatgagtagatgagtaaccagtgagagcagaagttcctctcgaattctccttcaccagtcccccacccccttcacctccattcaccatccacccgcctttcagtttccctagcaacgctgagtgctcatcctggaaaactttatccgaaatctgctctgggcagctttccaaatccatgctaacctgattacgtgtctctaggggccttgccagctaatcagattaggcagcactaatggtagtgaggactttgagtgggcgcagagcagtaaaacatattgtatacttagtgataattatcctgccttttgtgtcattgatttatctgcctccctccctgtcccctgatcttgtgtgtttggccgtagcgatccggaggaaggagaatggctggtacgatgaagaacaccctctggtcttcctcttcttgggatcatctggaataggtaattgggagcagatcagccagtggggacagagagctagggtagtgcccggcccaagtctgacagccccagctgctgcgggccagggtcagcaggtccagctctaggtcaacttgagctctaaaagcaacggcctccagat

SEQ ID NO: 7830 - DNA, 2300 bp, Homo sapien
tttctacatattatcttatttaatacaagcaatcatcttgaaggcaggaattgatatcttcaacaatgagtaattaactaccagagaggtaaagggagtttgtccaaggtcacccatataaatgcaagagtcaaaattaaaatccacgtctgcctgaatgccaaagctcaagtactctccaacactaataaggtgagagtaatccattcactgaaaaaaatatttgagtgcctcaggccgggcgcggtggctcacacctgtaatcccagcactttaggaggccgaggcaggtggatcacgaggtcaggagatcgagaccatcctgactaatacagtgaaaccccgtctctactaaaaatacaaaaaaattagccgagcatggtggcgggagcctgtagtcccagctactcgggaggctgaggcagaagaatggcgtgaacacaggaggctgagcttgcagtgagctgagatcgtgccactgcactgcagcctgggcgacagagcaagactctgcttcaataaataaataaatacataaaaataaaaaaactgagtgcctcttttgttccagacattgttctgagtgctagtgatataaaagtgaaaaaacaaagtccttgtctcatggggctcatgctgtagtggagaaagacaataaaaatgtagtatgtcagatggtgataaatgctgtgaaggaaaattaggatggggtgcgtaggattactattttaaccagaatggtcagggaagactctgatcatgtgaagtctgagcagacgtacaagacttggaagaaacagaactggcacaaagaagaacttcctcctttgcctacctatgggttcagtttggaaaagagggggcgggatgggagtgcaggtgttaatggaaactatatgctcaaaatcagaagacctgagcattactttactccaggtgatttactggcaaatcttttcacctttgagcctcaattcccttcactgtagacgggaataacagttcttgcccagcttctcacacacagctgccatgaggatcagatgagatgacccacttgaaagccctttaaaaataacacaatcagggccaggcgcagtggctcacgccagtaatcccagtacttagggaggctgaggcaggtgggtcgcttgaggtcaggagttggagaccagcctggccaacatggtgaaaccccgtctctactactaaaaatacaaaaattagccaagcgtggtggtgcgtgcctgtaatcccagctactcggtaggctgaggtgggagaatcgcttggaccagggagacggaggttgcagtgagccgagatggcgccactgcactccagtttgggcggcagagtgagattctgtctcaaaaaaaaaaaaaaaaaaaagaccggaagtcaactcttcaaataaaatgtattcctatctcaggtgcagtagttaccctaaacatctttttgaaaggccgcccaggctgaaaaaagagataggctaaactaaataagcataagtttcataatatgcctctgctgaagattcttgggtaatttacaccagtcaaaaattgtgggccgggcgcggtggctcacgcttgtaaccccagcattttgggaggccgaggcgggcggatcgcctgaggtcaggagttagagaccagcctggccaacgtggtgaaaccccgtttccactaaaaatacaaaaattagctgggcatggtggcgggcgcctgtaatcccagctactcgggagactgaggtaggagaattgcttgaacacaggagacgaaggttgcagtgagccgagatcgcgccacggcactccggcctgtgagacagagcgagactccgtctcaaaaaaaaaaaaaaaaaaaaagtgtgtcgtgtgcttcaactaaactaggaaagaagtcttgggattctaatctttaactctaatcgccacgccccttcacccgaactctatttcccaatatgccccgggcttctataatcccgcagtcattgtgacgcaatcccacagccttctgggaaacgtagtttatttattctccagctggggaaaggcttagggctgtggactacctctcccgtgaggtagtgcgcaactccaccctgttcgcggcgtcttcgaacgcgccgcggcagccatgttggacgtggtcagcacaggggccggcaccacggggttatcgaagcagctgtcaagatgctggggtccctggtgttgaggagaaaagcactggcgccacggctactcctccggctgctcaggtccccaacgctccggggccatggag

SEQ ID NO: 7831 - DNA, 2300 bp, Homo sapien
tccagagcccaggactgagccagtgacacatgctcagaatttaccaagagacttgtgcactgagctcagactcagacctagtccttccaacagcccttacatgggtcatccccttttacggaagagaaaactgaggccaaaaataggaagggaggccctgtgggggccagaacctttacacatcttagcccaggtaattttttctacagtgttaataagtaggatgaattgcccctgtttggaagattcagtaaaatacattgacttggcccagatcacttactctacacctctcctaagtccccagatgtgactcccaggaaagacacaaaaaagggctacccagagggataaggtagtaaccagggaagccctcccagaggaggtgggccttcaaatggcccctaaatgacaggcaggagggaaggatctgggagggtattgggggtggggtggcatgggcaaaggcctggaggtgagagtcagtcagtcattgatgtgagaagagcaagaagtagaaatgtaaggaatggtggggaggggagtcagagctggatgaccaagcaagggttcagctgtagagggtctggcccgccaggctcagggctcgggctttattgtgctggtggtagggagccactgagggtgagtgggggagagcatgccagagcatgcctcagaaagaaaggtgggagaaacgctggcatggagggctgccccctgagttggtggggtggccgggctctgccaaggctatgtgccagctgcctggactgtgtccaggaatgggcacaatgactcaacattgagaaaatcactccccagggagaaagggccctgatgaatcacccagctgaggtggggaggctgggaggctgggaggctgggaggctgggagctcactgagtcaccgtccaagagttggtgaggaggggagctgcagagagaggggccggcagtgcagttgacggggggattcaggtcagaccacattgagggctgtcgggggactctaccttcccgccattcccgggtttggtcctcctggccgtcctgtgagggagatgagaaaactgaggcccaggaagtggggggaggggatccgagcaaggtcatgcggcaagtcgctggcaaaggcctagcgagacccaagcgcaccctccagtccagacacgtcctgccgccccaaccgctttcatgccaagcagaggcctaagaaccgggtcggtccgggcagggagctgaccccggtgacccgctgaatccccggacgcggcccctccgggcagccggcaactgaggccggattgcgccgccgcgatgggacggcagggggcgcaggagcgtcgcggctgccgcaggctcctgaacccagaagccgctctgcggagaaacgcgctcccggagcgcgggtcccaccgcggaactgcggaccgtgtggccctggggcctgcaccctctccggctccggggacggcgacagagacctgcccacccaggcctgggggccccagtcagtggcggccgccgtgtgtgcgctcggtgtctgtgcgcacgtgtctccctcgcagatgggcgactgctccagggcctgtccgtctcacagcgacctccaacattctcccgacttccccctgcctcctaggctgagggagaggagcaagcccgaggctcctgcggtgtccgcggcccctgccccccttccccttccctccccaccccaccccactgcgccggtctctgcctggggctctggccgggccccggaccccagagtggtggcggggaaacagggtgcgatcagacagggtggaggctctgagagcggcccctgcgagatgcgagagaagtggcgacggggcgaggggcagcgagcgcaggctgacagcaggccagctggaagggccgagggaacccagggcgagacagaagcggggtgacagcggccgggtgtccggtggggtcggaggatccgacgggccgagaggtgcggtccgcggtggcggggacataggcggggccggggcgggccgggggcgggcggggggcgggccggggcggggccggggcggacactcgggcggaccaggcgaagctgtcgcggacgcgctgaccgagcgcagcggccgggccggcgggcgggcgggcggctgcgagcatggtcctggtgctgcaccacatcctcatcgctgttgtccaattcctcaggcggggccagcaggtcttcctcaagccggacgagccgccgccgccgccgcagccatgcgccgacagcctgcaggtaggggggcccccgcgct

SEQ ID NO: 7832 - DNA, 2300 bp, Homo sapien
gcataatttacatacagtaaaatcaccaatttaaagtgtataatgagttttgataaatatatatggtcataaccaccatgacaattaagaaaagaatatttttatcctggcaaacttcccttgtgccctttgtagtcagtccctttgagggggacttcttataggagtgtgagaagtactgggttttccttgggctgcaaacctgggcacatggagtgggggtgcctccaacatgctggaagttgccagggaactgctgaccctctctgggccttggttcctggcagaggcagtgcagccaggcaggggaagggatgcttaggccttggtctcctgagggcaagccttggatgtgagggttggatcggctggaagtggtggcttcagaaacccatagagtgggtgacagggtagggacttggtgtttccacaaacccgcccctcctttgaccaggtgtgccctgtggtcctggtggaaatggctatatattgtccagactgtagcaggggctggccaagatggtccactcctctccccatcctcctccaaccagaggccataaaccccactctatagattaacaattccctgaaaagaagggggtcacttttgttccccagttctagaactaaatattaaagcaattatgtaactagcaataaattacttaaagtagtgactcactcagcttaattagagcgcaagcagggagggattaaggtatttttagagcacacacctcactctctcctgtgggggaggcctctgtgcaaggtgggggtggaaaaaaggctgggaactcatgggagcaccccaggtgtctgcaaggagatgaaagctgatcctccgccccactgaggtcctaaggaagaaaggccgagtcagagctgcagcaggagggattcggatcagactcaagaacacttcccagtggtgcttatttgagaactgggacggcaacactagattgtaaactctgtgagggcagggattaggtctgtgactgcctcctcacccagcgggagaccaagaatgagacttgggagtcagacacaactgggtgtgactcctgcctttgcgggttgccagcacgtgggcttgggcaggttcctttatcaccagaagctttgccgtctcctccactataaagtgggcacaataacatccacctgcatgcatattataaggattgagtgggttaaaatgtgcaaagcaagactttgtgctcagctgggcacagcggctcacacctgtaatcccagtactttgggaggctgagacagagtgcttcagcccagtagttttgagaccagcctgggaaacatagggagaccctgtctcttaaaagaaaaaaaaaattagaagactcggtgctgactctgctagaccaaaagcccacaaaggcagggattaggtttggtttgtgttgttcattgttgtatctcaagcttcattcataggactgcacaaagtaggtgttcagtaaatgctttgttgtgtgactgcgtgttaattttgttcccattctcctgctccaaaaaaaagttcattttcctgaggttgtgagtgaagaaaataggcagtgtgggctgggtgtggtgtctcatgcctgtaatccccagcactttgggaagctgaggcgggaggatcacttgaggccaggagttcaagaccagcctgggtaacttagcgagatcccatctctacttcaaaaaaatttaaaacagaaaaaatctagggtgtgtgggggggcaggtggggaggttgcaggggtgcctcacaggtgggagtctggcatttctcctccaggctgaggaggtggtgacttccagggaaagtcctgggagggatcagaaccacagctccagcctgcttggatgagggtggtcttctggctgccaggagggtagctaggtgggaagatctgcccttgtttcctccataacctggggtgggaggaggaggagctcccagcccaatctgatgggggagaccagaaccctcacccaccattgctggcagttcagagaaggcagcgataagtcggggtggggcatcctgaaaggcttcccagaggattggatgggaggattagctgagaagacatccggcatccgtaaaatggagtaatgattctgaccctgcaggttttctgggaggattaaatgagttacattttaaagatgcctggtacatgcctgccaggagaaggcacaacatatgaactccctccctcttccctccacccctcctcagctcctgtgacatcaggagggacatgccctgccctgctcacaga

SEQ ID NO: 7833 - DNA, 2300 bp, Homo sapien
ctgtgtaggaggtggggggcccacagcaagcctgggcttcagaggaagagacatttgagccggaccttgaaggatgggtaggaatcacccaggcagggaagagcagagggaacagtttgtgaaggtgggtaggaaaggcacagggctaggcacctgactcagtgcagcctctgggtgggagaagacagtaagggcgtttgggtcattttctagcagttgttttagtactctctacaacttgccctgcagatctatccagcctgctgtttgtatacccccggacataggatgttcatctcttccctcctgggcagcccttcccttgtggtggttatatctgtcctgggtcttctccgcagggcccagcaactccaggctacccagcctggccttatgtcctttctccgtcctgtgtcactgtcccctgaagtagggccaggctggggcacaatgatccaggagtggcaagaacacatctaggcagagagtgggagaaatgcgcagcctttattaacaaaaatctgagatgggtgcaggccctgactcctctccaaaaataatgataaagaagcaggcatggtcaaataagggagtgaggacagacagcaggaagaacttcctaccaatgcagaagggctgtgagtctcttggttttatgagagtgggctgtacgtgtgaaagggagggtctcagaggacaagagggggaattggaggcagaggcactgtcagcctctgactctcccataggtgagtgagtgaagtcatccagggagagggaacagaggagggagatcaggactcatcattcattcattcagcagccgttcactggccctaccaaacatgacacccctgggggcagatggacagagccagtgaccacgtggatggaagctccgagtctttcctacctgtgttaatgtcgcaggaaggtatttaggaggaggggccattggggctggccttataaggaagagccacttcaggctgagttgagggacagcactaggaagatggaagagcatttgcaaaggcctcaaggtaagggcaagcaggattttgttcacttagcactataggagttcagagtggcctaggcatgaagtgccaggctggggggaagccctgggccgtggtggagcaggagaggagtggggaattgagcctagactgtaggaagcactttcttccgtgaaggtgtctccaacaggcttgatgtgtaggcattattgtaagtttgcaacttcttggtctctcctggtgctcgtgaccagagcttgctgagggacccagccttgcttgagaaaggggtgttcagtgaacaaaagagaccctggaaatgagagagaagcagtggctgaagaatgtgggccccttccagaaagtggcgtgcaaacaaatacaaagcaatatgcaaatcagctggctagggcttggcagctttggttggaagaaatgagccatcaccccttattatgccggcctcctaccccctctgccccagcctccaggacagccggaacagccttgtctgctccttggagcgccccagcttttctgagacacaggattgtggcctccagggtggtggccgtgggctccctgtcagcaccctcgtcctcctgggaagtcgatatatttagtaacagaaatgttttcacacatttatctcctattgttcagctgcttgctccctgggaaaggccaggtccccagtgatgtgacccacttcttgaagtccctgaagtcacccttctcactgcccccccaccccgaaaaacaggaggcaactggggcttggtgcagcagaacagatttgagtcaaatatctgggaggacttcccaacagtgtggttgctgagatgtgtggaccctggatttctgggctttcattctttggatggttgccttgggcgcagaggaggctttgaagatagagcagagaaggtggcagacaggcttatgctcaaatttcagcatactgaaagatgtactgttactctgtagctgtgtggtcctgggcaagttacttaacttctctgaaccttgtgtgaatagtggggtggagataattatcctttcttggcaggatgattctgaagaatctggaagtgcagagcttagcccctggcatgcggcaggtgctcacaaaggttagctactgtcattatgaaccacccacgatcagccacactttcagaaagatttagcggggcctggagagggagagaccagagctaggagctcagggctgtcatcgtgtgggagggaccaggaggcctgaaacagagctgtggt

SEQ ID NO: 7834 - DNA, 2300 bp, Homo sapien
attagcccttctgagtcctgaatcttgcagtttgttcctgcagactctccacttctgggtggctgtggagtctggtgtggcagtgggatggggaggagaccttcccttccacctgcttgcttgagtgtattcccaggagatttctgaagatgaggccaccaccattgtttctgaagtgggagggcagaaaggaggctgagggccaggtgagacctcgtcacacctgcacccatgcatgcccaggaggaaccctcctttgaactcttctgactcagcttcttgctgccaggttcctccgaccagtgagcaggttcccaggacatgaaggggagctgtgagggagcaggacgccatggtccagggctgcagcttcctgagcccagagaatgccttcctagctgtcaggaatggagcagcgaggccccagtgataggtgaggtggagaagcaagacatgagttctgggctggctcagctgctttacaaccagcctgggcctcgttccctttgagaaaatggtttgcccagagttcagagatctaaaattctatgatgccttctggggccacagtgggaagcaaagactcctcatattttctttcctgacacttcccaggccacaagacaactgctttctgcagcacccagcctgggcaggccatctacacaagctcagtcatttctgaccttgccccctccaccgtgcacccccatgttcttcaacatgggtcaggtttctattcagcctcagggacttctctgcttgaagcctgttgtgtggcggggaggtattctccccacagctcagagagatggggttgctgtggagggtttgctgtagctcctctaccctggaatataccctcttctgccttaaaagacccagcttggaccctctcttccagaaatgcttgctaaccgcccccccaccacccaaactaggtcaggggtccctctgggcttcacagaccctgtgcttctttctgtcacagcctgcaagtctcccctccccactccccagcccgagtgcttctctgagacaagggatagtgtgagccatgagctcagccactggtaggccaatgaataagtaagttaatggtgaagccaggatccaaatccccatttcctgcctcaaggtgtggagctgtttctcctgcatacaatagtagctctgctgtgacaactctctatctgtcctagggcctaaaatgcctctatttcactaggttatagctttatcctagggagtcctctttggaagcagggtgggggtgcaacaggccttcccccatgcctgtagtctgtgagcagcgaaggccatgtggggcaggctgtggcctaggtctccacagatcctggtagaagtccatgctcacgcatcagctccaagtcccagctaaaccaagccaccaagaggtgggccctgtgacaaggctctgagtccaaaggccatcagtaaagccccctaagtcttccgtggacccagctccaggctgggatgcacgctaggagatgatacacaccgggtgagggagcccagaggagagggcagctagctgtgcatggaggcctgatctctcagacttgagggcacaagcgtgtcccctcatcctgaaggcttctgcgatggggcagcagagggtctgggtctgctgcccctcaagtccccagccccatcctagcccatgaggattgtaaatccctcgtcctctcccctctctcctctgtcagccactcccctttccccctaccccactctctttctatttctgcctctgattttttttccttttctgcctttgttcctctgtgtgtgtgtttctctatgcctctctggtctctttgtacttccatcttgatctcgctaaggctctgatccctctctcctctccctcttcatgtgttactgtcccccttcctgtctctgtttatctctcagtctctctgtctgtgagtcttttttcctctctcccagtcagactctctctctacccctccctctctccctctctccctctctgtctgggcctctctctgttcctcctccctcctccctcccccttctgcattatcagacctgctccaacctcctcccagagccagccgagcagcagaggcagtggcagcgggagaggcgggagcagcggggcagcagagctggattggggtgttgagtccaggctgagtagggggcagcccactgctcttggtccctgtgcctgctgggggtgccctgccctgaactccaggcagcggggacagggcgaggtgccaccttagtctggctggggaggcgga

SEQ ID NO: 7835 - DNA, 2300 bp, Homo sapien
tctgttgtggcactggttacactgctgctgccgcctgaactacacccgcaggggagctgtctcccccacccacatgggtgctactgaagagctaggactaagcctggttcatctgggtcccaggtctccgagggctgactctcaggaggcgcacaagacaactgatcaacggagaagtgaatgataaaaagtcacaggctctcacagcacaggggaccccacaggcacctggctctagtccccgaggcagagctctcccggtggcctccctgcctcttccctccagcctctgcttgctcgcctccaggaacgaggagcacaccccctctggaggccgcactgtccatcctaagatggctctgactgtcattcactgttaaacacttattgagcacctatggagtgcaaggcccacagcccttcttctgcagagctaggataggtctgaccaactccgcagagggctgcagattacagtaggctcttggtgggacaggcccgctccatgtctgctgccctgcatctagcttctgctctctagacgggggagctgggatacatgggattggccaggaggccccaccttccccagtcagacacccttacacccaccctgctaccccaggctcaccttagcaatacacttgacccactcatgagcctgctccgcactctccagcccaaacaggtacagccgttctccctccgtgtacacctcaaaggtgtgctcaaagctgcaaatacacaggccaggactcaggcccacctcatccagcacgggcccacccccaacccgcaccatcaaccgccatcctctgccccctccgcactgccttggcgcttgtccttattctggtcccctaagaggtggtggaaaagtcttgggctggggcctcaagagactggagtcggcccttgtgcagcctccgtttgctgtgtgactctgcggaggtcctccccttctctgggtctatttccctgtctccccagtgggggattgtaccttatagcaaccacagtctgatttgcccaggagtactcacccatgggtgtcaggagggggcactgccaggcacacaatctcgctggcccgaatctctccattgggggtcactgcccgctcattctcaaagtagctcaggaccccgtcaccaaggacacaccagcgccggctgaactctggggagaatttgggcaggggagccatcagggagccccccaccacctgaaaaccacctctgcatcctcccggggctcctgctcccatctgacccatgagctcttcattctctcaagttttccctaaatccatccacctctctgcatccccaccacgctagccagcccacaagtcatccgctcccccaggcctctgcagcagccccttccaaaatcccagagtgatctagctaaaatcagaccccatccttcctctaaccaaaaccattccatggtcctcaggacagactctgtgcccctcagcctgccattcaaggccctgccaggtctacccctgcccgtctctccagctgcctctctgtcactcctggacacacacatccctacccagcactcccagcttttgcaaaccttgtcccctctacccaccacctgaatgtcacaggaagccttctatgccccaacctccttttccagaagcatctatcactctgtactctgcctcctgctacaatggctctgaaggactggcaaggtcccataaaagaaacagaaatgggaatctggaccaggaaaggtaatggaaaggataggctgtcatggccatgcaggcttgtaccgttcacagcactgagctttacagtggctcagagcttcctggcatccagggcaaaaaggatgactcaggcagttgttacataaatgacattgtcaggcagagggaggcagacctggggcaatgaggttgtgaacagcatggagttccaaagaaatctctttgggagttggagggctttgtccccgtaggaaagcatgcaggaggtgctgagggatgttgtcagcaatgacctcacaatgttcccacagcagactctgtctctcatcctgtctgtgagggcctgacatgtgctctttgagagcaatgtgtcctcaggcctgtccccgcaggtgggctccctccaggagcaccagctctgcctgagtcatccttcattctgcaggtatttgccaagtgcccactgtgtgctagccactgttctaggatctgggggctacaggcagtggtggccaaaaggagtttatgtcccagtggggtacagagaatctatagataagtacat

SEQ ID NO: 7836 - DNA, 2300 bp, Homo sapien
cagggctggccagactggtggactctggcagagtcaccctagagggcttcctggatatagtctgtggtacacagtaggtacttcctaaatgatcctggtgggagtgggggtagtgcatgacactgcagagcaggtcagtgccagagtttctttggactaaatgagcctttattgagcccctactggatatgggctctgctgagcatctggtagtaagagcctgtggctggtagggagtttgaggactgaacgaaagccctatccatctgatctcagccttccattcactccccaactcagaagaaaatccacaagagcccgcacagttggccaccacccccattacctctctgaaccacccccctaatcactctgccggtctcctcactgtttctcagacacgtcgtcacctaccaggatctttgcctgtgctgttccctctgcctgaaatgcattcccccaggtatctgcatggccagtccctcacttccgtcaggtctctgtttcagtatcactcctgcagagatgtcatctctgactaccttatgcaaaatagcaccccccatctctccctttacccttttgagatggagtttcgctcttgttgcccaggctggagtgcaatggcgcgatcttggctcaccgcaacctctgcctcccgggttcaagcaattctcctgcctcagcctcccgagtagctgggattacaggcatgcgccatcatgcctggctaatttagttagtagagatggggtttcaccatgttggtcaggttggtctcaaactcccgacctcaggtgatctgcccgccttggcctcccaaagtactgggattacaggcgtgagtcaccacgcctggctaccctgcattttcttcacaccacttacctggtactcatttgtccattaatgtacttatctatagattctctgtaccccactgggacataaactccttttggccaccactgcctgtagcccccagatcctagaacagtggctagcacacagtgggcacttggcaaatacctgcagaatgaaggatgactcaggcagagctggtgctcctggagggagcccacctgcggggacaggcctgaggacacattgctctcaaagagcacatgtcaggccctcacagacaggatgagagacagagtctgctgtgggaacattgtgaggtcattgctgacaacatccctcagcacctcctgcatgctttcctacggggacaaagccctccaactcccaaagagatttctttggaactccatgctgttcacaacctcattgccccaggtctgcctccctctgcctgacaatgtcatttatgtaacaactgcctgagtcatcctttttgccctggatgccaggaagctctgagccactgtaaagctcagtgctgtgaacggtacaagcctgcatggccatgacagcctatcctttccattacctttcctggtccagattcccatttctgtttcttttatgggaccttgccagtccttcagagccattgtagcaggaggcagagtacagagtgatagatgcttctggaaaaggaggttggggcatagaaggcttcctgtgacattcaggtggtgggtagaggggacaaggtttgcaaaagctgggagtgctgggtagggatgtgtgtgtccaggagtgacagagaggcagctggagagacgggcaggggtagacctggcagggccttgaatggcaggctgaggggcacagagtctgtcctgaggaccatggaatggttttggttagaggaaggatggggtctgattttagctagatcactctgggattttggaaggggctgctgcagaggcctgggggagcggatgacttgtgggctggctagcgtggtggggatgcagagaggtggatggatttagggaaaacttgagagaatgaagagctcatgggtcagatgggagcaggagccccgggaggatgcagaggtggttttcaggtggtggggggctccctgatggctcccctgcccaaattctccccagagttcagccggcgctggtgtgtccttggtgacggggtcctgagctactttgagaatgagcgggcagtgacccccaatggagagattcgggccagcgagattgtgtgcctggcagtgccccctcctgacacccatgggtgagtactcctgggcaaatcagactgtggttgctataaggtacaatcccccactggggagacagggaaatagacccagagaaggggaggacctccgcagagtcacacagcaaacggaggctgcacaagggccg

SEQ ID NO: 7837 - DNA, 2300 bp, Homo sapien
atcctgaacttggtttgggtaccattggctccctcttggggtgggtgaggaggggtcagtgggctgagcagcacagctcgtggcccaggcctggactctggggccacatcccaggactgagggtggagctcaatggctggggctctgggctcagggccatgggtgggcggggcacactgggctggagagagcccaggtgtccagggagacacaggagaccacccaactggcttgggcttggggacagatcaccgcccccccacggcgctgaccgtggggaacagggctgtagtcaggctgccaccttgagcttcccgctgtctgggacaatcctctttccagggattattattgagtttgcccaatgcccccctcatgccagtgtgcctggcctatgcctccaacctggagagtggggtggggcaggaatcagggaggcttcctggaaggggaggtgctggaactgggccttgggagtggagtgaatttccacaagtggggagaggtggagaaacagcctggacaagaccctgcaggtaggagggggagcttgaggctgccagttagggagctggggctgatgattcgaaagtgagcctgaatgcccaggccaggtgggagtgaggtggggacaccctcttgggtggccagcatgacctgccatcctttccccgcctacaaagaggtgcctcggctggactcgatgaagcccctggaaaagcactactcagttgtcctgccgaccgtgagccacagtggcttcctctacaagactgcctctgccggcaagctgctacaggaccgccgggcccgggaaggtgggtgccaccccagactctgctttagcccatggcatctggtcacggctgcagggctagggaagccagggctggccagactggtggactctggcagagtcaccctagagggcttcctggatatagtctgtggtacacagtaggtacttcctaaatgatcctggtgggagtgggggtagtgcatgacactgcagagcaggtcagtgccagagtttctttggactaaatgagcctttattgagcccctactggatatgggctctgctgagcatctggtagtaagagcctgtggctggtagggagtttgaggactgaacgaaagccctatccatctgatctcagccttccattcactccccaactcagaagaaaatccacaagagcccgcacagttggccaccacccccattacctctctgaaccacccccctaatcactctgccggtctcctcactgtttctcagacacgtcgtcacctaccaggatctttgcctgtgctgttccctctgcctgaaatgcattcccccaggtatctgcatggccagtccctcacttccgtcaggtctctgtttcagtatcactcctgcagagatgtcatctctgactaccttatgcaaaatagcaccccccatctctccctttacccttttgagatggagtttcgctcttgttgcccaggctggagtgcaatggcgcgatcttggctcaccgcaacctctgcctcccgggttcaagcaattctcctgcctcagcctcccgagtagctgggattacaggcatgcgccatcatgcctggctaatttagttagtagagatggggtttcaccatgttggtcaggttggtctcaaactcccgacctcaggtgatctgcccgccttggcctcccaaagtactgggattacaggcgtgagtcaccacgcctggctaccctgcattttcttcacaccacttacctggtactcatttgtccattaatgtacttatctatagattctctgtaccccactgggacataaactccttttggccaccactgcctgtagcccccagatcctagaacagtggctagcacacagtgggcacttggcaaatacctgcagaatgaaggatgactcaggcagagctggtgctcctggagggagcccacctgcggggacaggcctgaggacacattgctctcaaagagcacatgtcaggccctcacagacaggatgagagacagagtctgctgtgggaacattgtgaggtcattgctgacaacatccctcagcacctcctgcatgctttcctacggggacaaagccctccaactcccaaagagatttctttggaactccatgctgttcacaacctcattgccccaggtctgcctccctctgcctgacaatgtcatttatgtaacaactgcctgagtcatcctttttgccctggatgccaggaagctctgagccactgtaaagctcagtgctgtgaacggtaca

SEQ ID NO: 7838 - DNA, 2300 bp, Homo sapien
tgatctaatttcactgtcatccattgaatagatgtgtaaactgaggtcctgggcagggctgtaatctgcctgagattaccctgtaaatgcatattgaccaccatccctgcctctttccatcccacttctggctgacccagggccttctcccctaccttgcacagcccctcagaggccctcagcctccatttcatgtgaactcacatgtaccagtgggtatatatatgtgtgctgtgtgtgcacacacgtgtacatttatgcccctgtactggaaactcccaggtacccatatgtggtagatataggggagaacctgcaatgggagggtagacccaggctgcagactccagacacttggagtgtcacatccgtttctcacctccccacggtgtgtttggcacataagtgctaaggactttgcatatgttaattaactgactttcagaacaagccaggagttaggattagaataaccagtttacagccttgaagcccagggagagaaaataacttgctggaagacacagagtgaatcagtagtggcaaggacttttctgctttgttctgtgctgtgactccagcaccccatacaggacctgacaaggaggcaaggtggggggcctaggaaatggctgtggaatgaggagccgaatgaaggaactgattaccaaatgctggatccctgcactcacccagaatccacccccatccctcttgcccagagaggaatgtcagggataggagaggtttccaaaatccctgcccaccccattggctgacaggttaggcacccatccccagctgtcacagcctcaggaatgcagagctccagatgtggaactgggtggggcagcagcaaggcccctgggaccaggtgcaaggcctgaggcatccacctgtcagtctgctgactccctgtcctgtcactgagcctgagacctaggctcagagcccagtgctggtggcaggagcatccccagccaccagcaggccaggctgtcctcaccttccccattgggaaagtgggcagatggcctggctctcccagcccctttcctaacaacctcagaaaccaagtttctgcccggcacggcccctggctgtcagctggcccgtctgacctcctgcacacccccacagctcttcttacagctggggaatggcgctgggaaccgcttctgggcagccaacgtgccccccagtgaggccctgcagcccagcagcagccccagcacccggcggtgccacctggaggccaagtaccgtgagggcaagtaccgccgctaccacccgctctttggcaaccaggaggagctggacaaggtcagggcactgcagctctggggccccttgggaccacccccgtctttctgctgccctgttcctcatgctgtcttaacccatctcatctaccagctcagggagatgtcttggcatatggggaaactgatgtttggagggcagaagggccctgcctaagccatgtgaaaagttctggccatgcagggaggagccaggcctgacccttgggccaagggcacatccccagcatctgtctgtctctctcccaattcctcagtctcctgcaccccgtccggttgcttctgaatcctgccaaaaagagtgaacttgatggggatgctatttcctgtcaggctcatgaaaaacagctgggctgctctgacccatccccatccacaccccactcaagatgaggccccgcatgggccccaggccctgacaggctgggagccaagtcttaggccctgatctggctctgcctgagtgggaggcagccagctccgaggcaggggtatgccatttgtgacctctggttggccttcagcccctcccccaaaccgcccctcccaggcagactcagtccagctagaagcccggtgggagtcaggcctccacctcccagggacccaggcgtcctgctcccagcccaacccagtctagcctgcaagccaggagggcggcaactcccattggttgggagggctgggcaggcggtgaggaattcaaatgtgggaggaattagctacaaagcacaccccccccccggctcctccacaaggcagaaggagcttgagatcctctggaggctctggctgactgggcagctgtgtccaggcagccagcaggggtgaggccccgggcagctgggatcccctggcctctgctaggcagcccctgctcacccctcctccccttggcctctctcttccctctccttctctctttcttccttcctattctctctttcagtctgaggatggactgctccaggcctgggt

SEQ ID NO: 7839 - DNA, 2300 bp, Homo sapien
tgtgcactggcacatgacacatcctgtcttggttaatccttctagcaccctgccaggtcagtgatatagcccccgtttcacagaagaggaaactgaggctcagaggggctaggtgctcaccccaggacacacaagaactaagaaactaaggcaggattcaaattcatgtccttgatgccacagcccttcagaagacagcctgccagaagcaatgtgatctgtactgagacagatgggaacactgtggggccgtgagagcccaggaggccctgaacttggccttggagaatcaggggagggttccctggggagtggtagcagaggtgagtgagtggggtgaggtagcagaggtgtgggagatgggtctggtgggatcaggtgagtttgaggagtctgagggcaccaggaggtagtgaatatccaaatctgggcaagagcaaggtgatcttgagacagagacccacaattcagggccttaggaattggtttctgaggctctggtctgtgcctcgggccttgcagctcatttcaatcctgtcccttctctttgccgtcaatgccttcttatccttaaaagctcaggtcaagcatcaccttctccacgaatccttccctgactccccattctggtctttatccctccttcagtgtggagacccagtagatatatgtgactaaaagctagagcactggggataggtgaacacctcattcaggccaaagagggtgcctgcttcctttaggcttcggggaaccaggaggggttttggtctgggagatgagttgaggaggactgtgtgcaggagggctcctgtctgtgtgagtttgtgtagtgcctgagttttgctgcagttcaggtgagctgggggctcagtatgtttcagtcttggctctgttgcttagtgatgcccaacttttgttgtgttcccagcctgcccactaaggaggaggagtcattgctgccatcattatcatcccctccccagccacagtctgaggagcccctgtccaccctcccccaggggcctccccagcctccctctccacctccctgccccccggagatacctccaaagccggtacgcctgttcccagagttcggtgagtgctgcagccaggagatggggctctgggtggatggcctgggatccctggaatcaggcctctggaaggtatgcaaggatcacactcctttctgtgcaagcctgccaccagcccactgtgtggccccgggcaggtcacagcctccctgagcgctattctcttcatcctcacaatggagacagcacccacctctctggcctcctgaccgttaagtgtggggccatggccggctttgccagttacccatggtctgattttccatggtgttgggtggtttgcttttcttttttttttttttttttgagatggagtctcgctctgtcgcccaggctggagtgcagtggtgcaatctccgcccactgcaagctctgcctcctgggttcacgcccttctcctgcctcagcctcccgagtagctgggactacaggcgcccgccaccatacctggctaattttttgtatttttagtagagacggggtttcaccgtgttagccaggatggtctcgatctcctgagttcgtgatctgcccacctcagcctcccaaagtgctgggattacaggcatgagccaccgcgcctggccagaggtggtttgcttttcctggggttggccacatttgttgattcttgttgcctttgacagtccttaccccaacccccaagctcaccactggctcggacctccttgtggtgtcccagcttctcctctgccaccctttagtactgtcctatgaggcctgggggtataaatcgcacttcctgtcccctgtgcctttttttgaaagccagggggaggtggggatgggggtcttggcatgggggaggctttgtgaagcccagtgtggtgccccaggagaggaggccaggccccttgccctgaggccccccaacccctctctcaccagatgactctgactacgatgaggtcccagaggaggggccgggggccccagccagagtgatgaccaagaaggtggggccaggcatgggactgtctgcctgtcagggtgttgtgggggtgcccagctgcctgtcagaccctgaggactaccagacagagagtgggcagccatttcccgggaggcttccccttcccccacctcactctcttgccatacgggggtcaggagtcacgtgtagccacagcgctctgggccaggggtcggggctctggtgtggctcccccaggccctggc

SEQ ID NO: 7840 - DNA, 2300 bp, Homo sapien
agtcccatcacagtgtctcatgacatggccttcctacccctgcttgcaacccctcatgatggggaactcactctctcaaccttagggcctttcacacaaggtcatgtggtggctgaggccggtcatctccaggctccccagtggagcttgggggtggatgcgtgtgcatgtgtgtactctcagtgtctcgagtcagtgtgaggcatgtctgggccagtctgtgtgtgcacccatacagatgggtgtgggtggtagtacaagctgtcagggtagtagaatgtctgtgcatttacacattcagacaggttctgagagtgtgtgctactaagatgtagaagcatgtagggatttgtgcagtttcagtggtgacatggagtggtgtgtatgtgagtttatcaggacctttgtgctcaattactgctgtggtggagaccccaacagtgtgtgagtacatccgcgagtgtgcacgtgctgtttgagcagaacatgacatttgtgttatttgtgcactgtcaggcttgagccagtgtgtgcacgtgtgtgtacatgtgctgccaagagggagagcccattaggatggcagctccactggggccaggatcctagtcgattttgtttgctgcagaatccccaacatctagaacagtgctggatgcctaataggcccttgggaagtatatcgtgtgggtgagtaaatgattgccaacgtgagcttgtgtactggcacgtgctgagcttggggtgcatgtgggtaaacacgcatgtgactcagcacccagtgagtgccctcagcacagctgggccatagggccctgagctcaccgccccagctccctgtcccccatcctactacccaacctacgtcatcccagatattttaggaagggagaggtcttcagaggagacaggtgggaagaacgaggctgtgataggattgtaggccacagaccaaggtttaggcaaatcagaaaacaagcaaggatggagttccctcctcctggccttggcatggcccaggactctcagaaccaggctcatgattctgcctggcctagggggactctacatcacccccagagtctgcaccccctgctattattattattattatcatcattattattaatagagactaagtctctctctgttgcccaggctggagtgcagtggtgccatgatagctcactgtagcctcgaactcctgggctcaagcaatcctcccacctcagcctcccaagtagctgggactacaagtgtgtgctaccacacctggctaatttttaaatcttttgtaaagacgaggtattcctttgttgcccatgctggtcttgaactcctgggctcaagcaatgctcctgcctcgacctcccaaagcactgggattacaggtgtgagccactgcactcggcaccctaccattaatttaaactcgtggtggggtgcttgctgaggagcccagagatgctgagaaacttgcccagagtcacccagccctgcagaagggaagccggtgcccagaccctgcctcctggcttcaggtcaggtctactcagctcttaaatgccgcagacatgagccctgtgaactggcttccctgagggtggcagaggggtcgtttctgatgtgaggttccagggtcatgccgcagatcccctcccagcttgctctggcctttggtgtccccctctgatacctggatgcctggaggcacctcaggaagaaggagtgtgtgcccagaaggcagctgcccagctggagccacactgccaaggcttccctcctgtgcccttgactgccctgcagtccagccaatccctggtcttcctggaggctgatcacttgttgccagggcagaacttgcgcccttcagagagcctctttcctagcctctctgtctccttatgcgggtggagtggtggagaggccaccgccagggcttgtcagtcaggacttcctgggcatccaccctgtgagggcctgcaagatcagtggacactgttggttgtctcttcccagcttgggtgggggtgcagcctgggggcggggaggaagtgtctgccccgggggattctgggtgacttttcgctttctcagtgttttcaggaagtgtgtgtgttggccacggctgcaggaggtgggggagacacaaagcaggaagcctccgggagaccagagctgggtgcagacatacacacacacatacacacagacacacagagtcacacacactcacacacactctctctctctctccctctgtctttctctctctctctctctctctgtcctttcctcctgga

SEQ ID NO: 7841 - DNA, 2300 bp, Homo sapien
aaaagattcttggttcttctgtgtttggctctgagtgatggtttcattcttgccatctgcacctctctgagtttttatctctctggcagctctctagggtggggaagtccttctatcagtctgccctcactgctacctcctggccttgtcttttttaccctggactggatggtgggtatgagaggtttgctgccctggtacctgctatctgctgaggtgtgttttattggggccctaaaaaggcaggagccaccaggccagtgctgccacctcttttcctcgtggcagatccaagaggatacagttcacaaagcaaagcaggctttggctctaatggggtcccctttgggttttatctgatacccacactgcctgagtgtcccacccaggcagtgtgggtatcaagtaaaactgctgaggcctggggaggggcagtgacctgcctagagttagaggcagaggaggtagatagcagagaatcagagcctgggcatcctgagcccagagccagccccctgccacctactcattcccagacacttttcaggagtgtggtttagaagggatggggtgattatctgactgtgcctcccacactgcagatggaaggcctggagatctaaggtcattcacacaggcctcatgaggacctgcagcacattgtccaggattcactttgcaggatgccctttagggtcacttgccatcatagctccccgctcacccccactcatttttaaaatgtggcctaatttacaaacatctcagtgctttaagcacttcaggaagaaacacctctatttgtgaagcaccgtgacaaatcctcgactcctcgtttttttcttagcacatttaagaaaatctgttccaccctagagctctaggctggtgaggctaggaggcaccttagggttatccattctgattcccttttctggaaatggaaaactaaggaccagagaggaggaggcagcggggcacagacaggaacggaggtgggaggaggctgagatctgcgtgctggtcaggatgaccgtggcaggttcttgttgggccctgttagttgctcatccagaggagctcaccacagtcactgcgacagactgccacactcaccctggcctggcctcagagaagttgagctactggcctcagttcacacagagcagatggaggaagagctggcactaggacccagggggcaggggggagcctccctggctggaagggatggcaggagcgctggtgcaggtagctatggagctctggccaactctgcctggggaggtaagagagcccagagccctgggccagatgctcttgagagcctagtctagtccatagcaggtgtgcgtgtgtgcgtgcatgtgtgtgtgtgtgtacacgcgcgttgtgtgcatgctgagaaggggtgctggtggacaagggccagagtgtggggctggagggagtcccggttcaagctcccaggtaggagtgagactggggtggagattttgcccacatctggccagcttgtgaaccttgagccttgtgggttggatcggcttcctgctgggtttgcacagcccagtgggaatggggttgggtgtgtgtaggcttggtgtgcctctagcttggtgggggatgcaagctgtgggcatctctgagctgctgtggggctgtcatccctgcgagttagtctcttgattgtcatgggggtgtgtgcccatctttggatctctggggtattgcatgggggcgtctctgggttgttctggggacagcgtgcctgtgtgtaaatactgtaggttgttgcagaggtgtgtacctgtgagtatgggaggtggtggagagaaggggttcaccgttaacttccagaattcctcttcttgcacctcgtggcccttcctcgcagagcccactctgtcttggcatctcctcacccctttccctgtccccgctggggacttgcccctcgcgcgcagggtcccctcccagggccggcgggggcgggcgctaggaccctgcggggtggggcggggcggggctcggagatccgtcagcttcacctccgcagcctggaaaatcccgagccgcggccgccgagcccccgagcccccgagcccccagcctagccgggaggggcgcgcggggctggggcccggggcggggccgggcggcgggacccactgctcctcccaccagagcccccgcgcggccccgggtctcccgggcagctgcggcggcggcgctggcaccccggccccggcgggccccggcggagcggcgggcaaaggtgagcagcccggcctggaggg

SEQ ID NO: 7842 - DNA, 2300 bp, Homo sapien
agtcgcccaggctggaatgcagtggtgcgatctcggctcactgcaacctccacctcccaggttcatgccattctcctgcctcagcctcccgagtagctgggactacaggcgcccgccaccacacccagctaatttttttgtatttttagtagagacggggtttcaccatgttagccaggatggtctcaatcttctgacctcgtgatccgcccgtcttggcctcccaaagtgctgggattacaggcgtgagccaccactcccggcctaggctggtttatgactcacagggtctgtatttcacaataatcatacatattcagcaggttttggggaaaagctatacatatttatgaggggatgtgagtgcatgcacaatgggtaaacacctgtaacatatgttccatgttcactttgggatggggtttttgcgttaaagtgaggtggaatttggttctttgcatcataaggtggactataggacacaaacacagtttgcgtgcagtctctatgagcttgctgaaactggcctgaggtctgcagttacttatcaggaaagaatgtttgtaaggcctgtcctctgtcgatcagcgttgtagtggtctgagttgtaaatctcagtaaagaagagtctgacaatttgcatgatagctcctattgctaggggtttagtaagagtgtggtttttctggcagcagtagaaatttaagaagttgccatgccagctgacagctgagccctgaggtaggcaacgtttgtttccttaaccttaaccttaaggtccatcgtagttgataaaaaggcatctggccaggcctgatggctcacgcctataatcccagcactttgggagggtgaggcgggaggccagcagttctggggccactgcactccagcctgacagacagagaccctgtctcaaaaaataaataaataaaaaagataaaggggcatttgtcttgatcgctcagatcacacaactaataagtagcattctttctaaaagccgcaacaatgctactcctctcttataagagctactgtgtaactcctgcccaactcaaacccacaggcccaggctcagaacacttggctccattgcttcactgtttccctgctagcacgaaccccccaaactccatctcccaacatgccgcgggccccctttctgtcagcctgactcttgagctcctgagaaatgtagtttttccagcggcccagccccagaaaggtcctagccaagaactacagttcccatgtggcaatgcgcgcgccattccggtggaattcaccgcggtctccagtttgccatgatggatgccagaacctgcacgtggggcttggtgacgcgatgactgagatgctggagtccccggtcagaaggacgatgccgagcgcgccgtattttctcctgcctctcctcagatcgccgccgttgttgggctgtggagacgtctcaaccaaagtggagccgacagaggccccgggagccgtggtgacagagcggccacaaccactagggggcgggaggcagagcggcccctagtccgcccctagtccgggacctctgggcggtcccgggcgggaagcgcacgcgcaaacgcggggcttcgcggccgctgtaaacaccaaagagcgcctgcgcaagccgagagtctcgggatcgacacgtgggggcgcctgagcgaagataaccgtaataaatagtaacctaacggtccagtcatcgttctgtggtcctttcttttatgattcacaaggaatgaccctcttcatcgcctctcctaattcagtcctcacaacagtccttttacaaatgggacaacaggttagaggaagtcaggcagatttccagcatcatagagagtaaaggaccagggaaggatcaggattcaaggactgcacccaggctctgcttccagcttgctgtgtgactttgggtaattttgttcccttagggaactgagctttctcatttgtaaatgcaaacaggctgttgggaggatcaaatgagatccaggggtgaaaacagcttagtttactttcaggaatttacccacgcggtatataaaggcaaaatattattatagtcaggtgattgtagattgaggaacccatttcctcattctgcaaattgcaaacctgagggcccaaagagggacaggggcttgccccaggtctcagcaggctgtgagcaagagctaaagcctaatcctcctgcctttgggcctggagcccttccttgtaccccaggggtcagtgtctttgttggatacaggcttagattgactgactgtaccctg

SEQ ID NO: 7843 - DNA, 2300 bp, Homo sapien
aattaaagtgagaattaaaaaaaaattagccaggtgtagtggtgtgtgcctataaacacagctactcaggaggttgaggtgggagaatagattgagcccaggaggtccaggctgcagtgaacaatggtcttgcctccagcctgggtgacagaatgagaccctgtctcaaaaaaacaaaaacaaggccgggcacagtggctcacacctgtaatcccagcactttgggaggccgaggtgggcggatcacacggtcaggagatcgagaccatcctggctaacacggtgaaaccccatctctactaaaaaaatacaaaaaaaaaaattagcccggcgtggtggcgggtgcctgtagacccagctactcaggaggctgaggcaggagaatggcatgaacccgggaggcggagctggcagtgagccccagatcatgccactgcactccagcctagatgacagagcaagtctccgtctcaaaaaaaaaaacaaaaaacaaaaaaaaaaccacaaacgaacagcccctgccctccccccaaaaaagacaaactgcatctcacacacaggtgacccctgtgaatacagtctctgaggagtgatggaagaggaagccctgtgagaggtgcagactgctaccctctagaacaccaggatgcctaaatagtagagggcagtttcattagcgacatcagtttgcaaactgaaaagagacactctcctgtaggtaccaaaggtgctctctctttgtatagggaaaaggcaggctggttgttttttgtttttgttttttgagacggagtctcgctcagtcgcccaggctggaatgcagtggtgcgatctcggctcactgcaacctccacctcccaggttcatgccattctcctgcctcagcctcccgagtagctgggactacaggcgcccgccaccacacccagctaatttttttgtatttttagtagagacggggtttcaccatgttagccaggatggtctcaatcttctgacctcgtgatccgcccgtcttggcctcccaaagtgctgggattacaggcgtgagccaccactcccggcctaggctggtttatgactcacagggtctgtatttcacaataatcatacatattcagcaggttttggggaaaagctatacatatttatgaggggatgtgagtgcatgcacaatgggtaaacacctgtaacatatgttccatgttcactttgggatggggtttttgcgttaaagtgaggtggaatttggttctttgcatcataaggtggactataggacacaaacacagtttgcgtgcagtctctatgagcttgctgaaactggcctgaggtctgcagttacttatcaggaaagaatgtttgtaaggcctgtcctctgtcgatcagcgttgtagtggtctgagttgtaaatctcagtaaagaagagtctgacaatttgcatgatagctcctattgctaggggtttagtaagagtgtggtttttctggcagcagtagaaatttaagaagttgccatgccagctgacagctgagccctgaggtaggcaacgtttgtttccttaaccttaaccttaaggtccatcgtagttgataaaaaggcatctggccaggcctgatggctcacgcctataatcccagcactttgggagggtgaggcgggaggccagcagttctggggccactgcactccagcctgacagacagagaccctgtctcaaaaaataaataaataaaaaagataaaggggcatttgtcttgatcgctcagatcacacaactaataagtagcattctttctaaaagccgcaacaatgctactcctctcttataagagctactgtgtaactcctgcccaactcaaacccacaggcccaggctcagaacacttggctccattgcttcactgtttccctgctagcacgaaccccccaaactccatctcccaacatgccgcgggccccctttctgtcagcctgactcttgagctcctgagaaatgtagtttttccagcggcccagccccagaaaggtcctagccaagaactacagttcccatgtggcaatgcgcgcgccattccggtggaattcaccgcggtctccagtttgccatgatggatgccagaacctgcacgtggggcttggtgacgcgatgactgagatgctggagtccccggtcagaaggacgatgccgagcgcgccgtattttctcctgcctctcctcagatcgccgccgttgttgggctgtggagacgtctcaaccaaagtggagccgacagaggccccgggagccgtggtgacag

SEQ ID NO: 7844 - DNA, 2300 bp, Homo sapien
taggtccccagattatggtataacatttttttatatttattggtcaaatcatatatctcttacataaataatttgagatacattaaacagcaagttaaatgtaaaaagcagaaatttgtctccatatattatctaaaattttatttcaagtgatctttataatacaatctttcatattctaaaaatagaacatgaatatttttagtcaaaatcaatcacttctttatcatatactactcaaaaatgactatttatttaacatttcctaggtgtattttgtgagtcaaaaaaggattaggaaacccctgccccaatatggctccttacctgagagaaacggcatctctgcacctcacagccaggccaagccctgttaatatactctcccatgcacacagccagagttccttatttatatagtgtctccaagcacccaagagtccgccagttctaaagggaattcatcactgtcatcagctggccctgggtctccatgggtactgtgcctgtctcctgggcatggcttttgctgaacgttaccacccatcttcaacacaaatactccttcaagagacaggtcaggcctggtttggggctagaggtacagagacatctaggacccaggtcctgccctaaggggcaccgcacagattacaggatggtgtgataactggtgacggttataactcgaactcaactggggctggtgtctgagaagcttgaactcagtgtaggggcaggaaagttctcctggaggaggtgatgcatgattaggagccaggccccctagaggcgacgatgttccaaacatcaggctcggcctgtgcaaaggccatgggcgtctaagacaatgacatgtgggggactgagcccagctcactggaagcagagcaggctacactgacctgggggcgtctaggccttcactgctttctacgtcctctgacccatccccatcagaatctcaacagactcgtcacctccagggcctgcactgctctcccatcgttgcccaacttctctcgttccctagggatgttcaagtctgccaacactcagagggcagggcctgctggcatgccccagggtgaggctgtgcccagcgagtccctcctttcgtgtctcacagtagcctgagcctgcagagctggctctctagcatctagctagagacggtttgaccacagttccctgcgacccatgattcactttcgagggtacccacaagagatgtgtctgctcctccagacgccgcccaatggggtgaagcgtctggccctgagtcaggatgctggggtgctggccgtctcagctacccactcctttgcaaccccaggcaagcaagctcgttctctcctcccggccaggggctttctagatgaaatcagctgcacccctttactctcagggacctaaaatttcggcgaccatgtggagccgtaaacccttctgcctcctgtcctcccagccccgcacccacctggcgttttcgtgtcacggaacctctgcacgtgctcttctcgaggcctagagtccctctctccctctggccaactcctatttcatccctcacagacccaactcgaacgccatcatccccggaaagcggggattcctcccttcagtctctgcttccttatcttgctgtcctgctgcgccgcgccctcagtgtacgcgcagagcccggggctgagggcctctgggtccctggctgggtgcgcggccaggagcgcgacggcctgggaagcaccagcggctctcgaactcggcccgggcgcggcggggttaagacacccgggccttgagggccccgcctccggagcgctccacccgcgtgggggaagcctccccggaggctccgacctcgctcctgcttatgaccctcgcagccacaggagcccccacttaggtgaacatttcggacggggccccggcggttcagacccggaggcggctcctcccggaggcagatcctcccggcgtcggccttcggtcctccccgccaaagccctcttgggacaagccggggattccccgccgccgcccgccccctggcgtcacggagtccccgcgaggccccgccccggcctggcgccgtcctgggcgggaggaacgcgccgctaggcgggagagcgcggccatggcggggccgggcgtccccggtgcccccgcagcgcgctggaaacgccacatcgtgcggcagctgcggcttcgggaccgtacgcaaaaggcgcttttcctggagctggtgccggcctgtgagtgcgccccggtgctgagaggatggcggctgaggggac

SEQ ID NO: 7845 - DNA, 2300 bp, Homo sapien
tttgctgggtgctgcagtaccctgggggctgaggtggggttttcatgagaactaggccaggcccagggcctcagtcaaggtgacagggcactgagtgtgggaaggaagttgatgaggagggagctaggcccggacttaccaccccaccctcccctggaactggtgagaaaagaggaagtgactgttgatgggggagggtgttccagggtcaaaccaccaacctccagaatgtcggctggataattgctcaaggactttctattctggcctgggggtaccttacaccagggctggggaagttgggattatttatttatttatttatttgagatggagtctttgctctgttgcccaggctggagtgcagtggtgtgatctccgctcactgcaagctctgcctcccaagttcacgcctgtctcccgtctcagcctcccgagtagctgggactacaggcgcctgccaccacgcctggctaattttttgtattttttagtagagatgggggtttcaccgtgttagccaggatggtctcgatctcctgacctcgtgatccgcccgcctcggcctcccagagcgctgggaattcaggtgtgagccaccgcgcccggctggggattatttttaagtgcagaaagctagagcccttggaggggaagtgacttgccaaaggccattgacaggtagagctcggtttatttcatcactttctggggctaagccttgctctgaggcagggatgaatcaatcccaggccccttccttccctcaggaccctcagcgggcagtaccccgcagtggtcatccttctgtccctgggagagcaggtcctcttccacgtgggcctggggaccggtgctatgaggacactgctagggctgaaggtcctgtagaactgcacagatgcccctcaggcacagggcagaggccagcctgccagaagcttccccatccctagcatctctgggctccttcagcccttttagccggagataaattgcatgccagggggctgctgggtatctgtctctgccccaggctcactctcttgcactctccagataaccatctcttagagaaggctgagctgctggacaagttctcaaagaagctgcagccggagccaaacagtgtcactcccaccacccaccagggcccctggtaagtgtatgtgggtccgtggtcacaaagggctgcctgtgctggggccctgcccctgctgcctgtgctgggttcattctctccctagtgcctcatcagcccttggctgctgcccaggggtggtgggggtggtggaggtggtgggggtggtgggggaggcaggcccttggccttcccacaggacagctgtttagaatctctttcccctccacctttctttgtccatctctctgcatttgtcccatctccttcccgtcccacccctatacttatgtcttttccctttctcagtctttttccatttccctgttccttgcctgatgcctaaagaaagggtcttgctacctgttgcaaagagggagtaaagatgagaaccaggaataggttggggctcagagttgggaggtgctttgcttttttttttttgagacggagtctggctctgtcacccaggctggagtgcagtggcgtgatctcagctcactgcaacctctgcctcctgggttcaagcaattctcctgcctcagcctcctggaacgtgcaccaccacccccggctaatatttgtatttttagtagagacggggtttcaccatgttggccaggatggtctcgatctcttgatcttgtgatccttccacctcggcctcccaaagtgctgggatcacaggtgtgagccaccacgcctgactgggaggtgcttcttgagaagggtccttggccaaggcctaggggaatcttagagcagaggagtcatggacagctcatttctagagacttgccttttcctttactggcttgctggcttccatcttcccaggacgaagttaatggctcttgttttaggcttttcatgtagcatcacttgggtgcctttgggcacttgggtgaaccgggggacattgagcaccactctgattggttggcagggaggagtcagagcttgactcagaccaagtcccatcactggtcgcactgagggtgaagtggcaggaggaggaggaggggctccggctggtctgtggtgaggtaagttgggaaggggtctgaaaatggggtagagagatgtggtccaagggagccagccagtgacgggtactcctgtgtttgctgaattctccaagcccagtgctgcaagcatt

SEQ ID NO: 7846 - DNA, 2300 bp, Homo sapien
caggctggagtacagtcgcgtcatctcggctcgctgcaacctcagcctcccgggttcacgccattctcctgcctcagcctcccgagtagctgggactacaggcgcccgccaccatgcccggctaattttttgtatttttagtagagatggggtttcaccatgttagctaggatggttttgatctcctgacctcgtgatccacccaccttggcctcccaaagtgctgggattacaggcgtgagccacggcacccggccttttcttttcttttgtaaaaatttctctagtagttccacacatcacaagcatttatcattattattaactttttattttaaaataattatagattcacaggaagttggaaggatagtccagagttcctgcatccccttcccccagcatctcctgctggctacatcttacataactatagtacccacaaccaggaaactgggattggtatgaagtgtgtatatgtcctttgtcattttatcacgtgtagatttgtgtaaccatcaagatatggcactgtttcaccactgcaaagatctctttcttattacccctttttagtcacattcacccctctccccccaaccatccctaacccctggcaagtactaatctgttttccacttctactacttgaattttgaaaggcatacaataaaatattgaatggtacaacacaacataaatgaaagcaagtgacaagtgagaaagtggaggtggtgatcagattgctcagtggtgaaaagaattatgttataaatggggccaactatgaataaaggtgccccaacccgcatgtgcagattccttcttcgcagactcactcacatagcgcgtcatgtcagtgcaggtggcagcgccaaccgtgctcctcagtctgtcctcaccaggcccacgtgagaacacaggaacagattagcaacaagagcccccagccttggcctgggccagaggcgcctctggccctcatgttctcttgtcacactggtgggagctgccttgcctggggtctgtctctcccaccgaccctgcttggctctgggttgaaggcatgacgagtgaggcgggagtgcagatgaaatgaccctcacccactctcctgggctgccagcgctgttcccatattgagtctgggccctggctccccgagtccatgcctgatcttagccttgtgtgcctctgcgcagggcctctcgctgctgagacctgtgcttgggcaggcctgggttgggtgaggccaggaagccagcagggaggggtggggaacagaactcacattcccctgaccagcctggagggtgatgcagttaggtaggtggcttgtgcccaaatctcttagctacgtgactttgggcaagacacttaaacctctctgtcggtgtccttgtctgtgaagtgagagtggcagtaccagcctcctggtgtggtgaggatggaaggagcgtgtagcctgctgggaacatcatggcgcccgagggccggatgggcatttggcagcctctgcgcgaggagtcctcgcagtggttatgcatggtgctgggagcggagcgctggcttcccactcttcaggcgaggcagtggagcgggttgctcttgccagagaggttcctagtagggtcgcagagaaacgaagcggcacggcgaggattgggacccagggctgactccagagcccgagggccttccactgctccacaaacagcagcgcgtccctgtgcaaggtcccaaacctgtgtggggctcagcttgcttttcaggaagggggcgggcaggtgagcagccgactcccttagcgccttcggccccggagggactggaggcctggaggggcctcagcgccgccgtgcccacctgtccgcccccagatggcctaccaggtggtggagaagggcgcggccctgggcacgctggagtcggagctgcagcagaggcaaagcaggtgaggcgcgggcgggggcgggagggaccgcgcccacctcagggaggcccggggccaactatacgggaggcggggggaatggcgcgggccgagatctttccctacgtccccccgaccccatcggttggtgccagaggaccgaacggctgggctctgagggcgaaggcttgggggagacctggcttagccacccggctagccgcgtttggcatgggcaggtctgtctctgctccgaggcatattcccactgggcagtgacgggggaagcttgggacccgctatccgctctttccgtcctccaggctggcagccctggaggcccgcgtggcgcagctgcgagaggcgc

SEQ ID NO: 7847 - DNA, 2300 bp, Homo sapien
tcaccccggctggactgcaatggcgtgatcttggctcactgcaacctcggcctcccaggttcaagaattctcgtgcctcagtctcccgaatagctgggattacaggcacccaccaccacacctggctaattgttttgtatttttagtagagatggggtttcaccatgttggccaggctggtcttgaactcctggcctcaagtgatccactcacttcggcttcccaaagtgctggtattacaggtgtgagccactgcaccaggcctaggacagagatttttttttattttatttttgagacggagtctcgctctgttgccaggcttgagtgtagtggcgtgatctcggctcactgcaagctctgcctcctcagcctcccgagtagctgggactacaggtgcccaccaccacgcccggctaattttttgtatttttagtagagatggggtttcactgtgttagccacgatggtctcgatctcctgaccttgtgatccacccacctcagcctcccaaagtgctgggattacaggtgtgagccaccgtgcctggccaggacagagattttttttaaatcaagaaggaagtttctgtcaaatatgtaagaaatatttatcagtatcctttcacttttcactgttaagtactgactgacaagggcctctaaattttaactgatcctgttagtgaacattaaaaaggtttcaggccaggtgtgtggtggctcacgcctgtaatccaagcactttgggaggccaaggtaggtggatcacttgaggtcaggagtttgagaccagcctggccaacatggtgaaacctaaccccatctctattaaaaatagaaaaaaaatatagccaggcatggtggtgcatgcctgaagtcccagctactgcgaaggctgaggcaagagaatttcttgaacccaggaggtggagactaagtgagccaagaaagattgcaccactgcactacagctggggcgacacagcgtgactctgtctcaaaaaaaaaaaaaaaaaaaaaaaggttgctaagtgctaccaaggatgtggagaacaggatttcatctatggctggtagaaatgtgaattcatacatccttttgaaaaaacaacctgttcactgaaattaaaaactaaacataccattgatctagcaattccgcttttatgaatacatcatggggaaataaaagcaccaaggtgtaagactatgtattttaagatgtttactgcaacactgcctgtagtgacaaacgcctcgacacaatctatatgtccatcaacaggggaatgtttgaatgcactctgatgtatccatattatagattaataacactcattaaaaataaaggttgccggccgggtgaggtggctcattcctgtaatcccagcactttgggaggccgaggtgggcggatcacaaggacaggagatcgagatcatcctggctaacacggtgaaaccccatctctattaacaaaaaaacaaaaaattagccgggcatggtggcatgcgcctgtagtcccagctacttgggaggctgaggcaggagaattgcttgaacctgggaggcagaggttgcagtgagccgagattgtgccactgcactccggcctggtgacagagcgagactctgtctcaaaacaaaacaaaaaatagaaaacaaaacaagaaaaaaaataaagttcgtgaagtatgtgaaaaaacactcaatatcactaaagaaatgcaaatcaaaaccacaatgagataccatctcacatcagtcagagtggctttttttttttttttttgagatagggtcttgctctgttatccaggctggaatgcagtgacacaatcacggttcattgcagtgtcaacctcctgggctcaagcaatcttcctgcctcagcctcccaaatagatgggactataggtgtgcaccaccacacctggctaatttttgtttttggtgttttttttttggtagataaggggtttcaccacgttgcttaggctggtcttgaactcctgggttcaagtgatcctcccgccttggcctcccaaattgctaagattataggagtgagccatcatgcctggctgagaatggctattatttaaaaagtcaaaaaataacagatgctggtgacgttatggaaaaaagggacgcttatacactgctggtgggagtataaattagttcagccactgtggaaagcagtgtggcaattcctcaaagagctaaaaacaggactaccattcaacccagcaatcccattactggacacatacccaaaggtacataaatcattct

SEQ ID NO: 7848 - DNA, 2300 bp, Homo sapien
gaacagcaagtgggacagtggggtgggagcataggggggtgtggaaagaaacagtagaaggaaataactcagccaaactgtgaaagatattttttattcctagttaagaattagttaattctttactcagtagacagtcaggagttatgaaagtttttaaactggggagcaacatgatgaggtcattcacagactgtaaaagatggattacagaggagaaaaagtccaggaaatgggttagaaggctactgaaaatgctggatttcagggtgttctgaggcatagcattatgaacaggaaaaggaaacagactttatcactcttgatctcttcctcttcacaagttatatttgatctatcatcaataccatgcccttgtcaaaatgcaagtatgtgctcacttcagcatcacatatactaaaattgaaatgatgcagagaagattagcatggcccctatgcaaggatgacacacaaattcgtgaagcattccatacttttattaaaaaaaaaaaaaagcaagtattccattgttaggagaccctgattcctttcttttgttcatgttctctgtctctctgcctctgtctctctctctctcttcttccctccccccaaccctctctttcccttcttcactatctcccctccctttccccttctcttgccctgcttcaagtgaaaaattagcatctgtgccagggaagaattgctagtgaatatcaagattgttgtaattaatcgattaggaagaacttaattaatttgagggaaaaaagccttgatttcctttttttgatagggatataaacaagaagtttataataaatggtaacttggctgggtgaggtggctcatgcctgtaatcccagcactttgggaggctgaagcaggtggatcacctgaggtcaggagttcgacaccagcctggccaacttggcaaaaccccgcctctactaaaaatacaaaaattagccgggtgtggtggtacacacctgtaatcccagctacttgggaggctgaggcaggagaattgcttgaacccaggaggtgaaggttgcagtgagccaagatcataccactgcactccagcctgggtgacagagtgagactccatctcaaaaaaataaaaaatttaaaaaaaaaaggtaacttaaaaagtaaaagctaagctgcattgccaccaagaatacagttgtgcaaaaatatgtctgcatgtggacaaagccttgagaatatttgccatgtaagactgataggatcatgtatgattttttttccttttaagtaatttcctttcatgacggttatatagtttcttggtttgtttgtttgtttgtttgtttgtttgtttttaacagagtcttgctctgtcacccaggcgggagtgtagtggtgcgatctcccctcactgcaacttccccttcctgggttcaagtgatcctcccaccttaggctcccaagtagctgggactacaggcccatgataccatgcctagctaatttttttttcaacttttaagttcccggatacgtgtgcaggatgtgcgggtttgttattagggtggtgcaaaagtaatcctggtatgtgtgccatggtggtttgctgcacagatcaacccatcacctagctattaagcccagctccattagctattctttttaatgctctccttccccacccatcgccctctgacaggccccagtgtgtgttgttctcccccactcatgtgtccgtatgttctcattgttcagctcccacttacaagtgagaacatggagtgtttggttttctgttcctgccttagtttgctgaggataatggcttgcagctgcattcatgtccctgcaaaggatatgatctctgtcctttttatggctgcatagtattccatggtgtatatgtaccacattttctttatccagtcgatcattgatgggcatttgggttgattccttatctttgctattgtgaataataaaagccttgatttccgaccattttcttggttctctagataattaaattgaaagctgaagcccggttggacctgctaaagcagattggtgtttctgtggacacatggctaaagagtgccatgaaccaagtaatggaagaactggaaaatgagcgatgggcccgccctcctgcagtgaccagtaatggcactttacactcggtacgatttcttttcttggatatgacaagttgattttcactgaagcatgctttgactctgtagtcaaacttaataatagccaaaattttttaaaaagataatagtttgctagtgatttagg

SEQ ID NO: 7849 - DNA, 2300 bp, Homo sapien
ccccctcgccgtctccgcctccttcctcacacacccccgggccgcccgggccgcccgggccccaagccttcccggtgctcctccctcgtctcctcacactcgctctctggctggggtccgcctgccgcccgctggcctgctccctccggggcaagtcttgcttcttaagcgctcctttcacacacgcgcgcgctcgctgggccgtcccctcctctccggccctcctcctcctcctggtccttgctaacgctgccgtcggggaggattgatgtcccttcagcatcatgcagccgccgccgaggaaggtaagggcgcagctggggggctttggggttcggagagatgcgtacgcggaacgcggctggggcgaccgctgcgccccttccccctcccgcaaggggccgtgaccgccctcgtcttgggcttgtcaccgacttgccgccggctccaggtggggggcgcgcgtgtgagttgcctttccgacagaggggccgccggggctcgtccgtcctctaacgcaggagacccccagacatttcacaagagtttcgggtgtgcatttgtgtgtgtgcgcgcgcatggcaatgctgcccgctgcaaagtgcattctcggggctgcaccgagggggaggcggggacgcccctgcagctttgcagagccttgtgcgtgtgtgattgtttagtctgcaccagctttgagccctccagccgcttgtcgccagccccgcccgtttgcaaatttgcgggggatttgtttctagcctagccttagggtttggcctgcttttcccacggggcggccgaaaagaagttggaatagtcaccgcctccccaccccaagggaaaacaaattaaggattgacgggtcctgcctcgtccccggctgaggggcgaggaggctgtcgtgctgtcttcagaaaagcgaggaccgggcccgggaggtgcgtggggtgtgcactgcgatccggggttggatgaccagggtgggagtgacggatgcacccggcttgtcatcagtctccccgctgcgcccttccccagctttcccaggggccgaggctgtgtccttgtctttttaatcctacagatggatactgaatgtctactctgggcactgggtggatgaggccgttctgtcctcccctcgtgggcaaacatttgcctaacgcctaactcacccgtgtctgctgccgctgctttctctctttcctaatccgggtttctccatttaagtgagtccttttctttcgaacatgtacccccacccctccgggtggtcccactgctgaggccgagattccagactgaccgttaacttcgaaccctggggccccggcctggcgggcgaggctctctggccagcaggcatttgctgttctccgctgtttgaagtggagcctccacggggatcggcttcccggggtagtttaaaagcactgcatatgctggaaggtcacttttgctttctcctttgtgagaaagagattgtgatttgatgcgctgtcagcaagtcgagggcatcattctgagacagtgtgctttttcgcagccattatggagtaatttatgtagtcgattcaggcatattatcatgattgtgtaaatattggtcattgggtatcaggcactcttaggctcccagcccccatccacactctgctcacctctcctggtggttaatgtctttgaatcttttttagaaatagaagacaggctcttttaaaactgtaggaagacctagacgtggattgagcttgtgcatgaaatggaatgactggcagtttattttgcacgtctttagtttgtaatatttatagtcgtgtattttcatttaacctctgttcaggctatttggctttaatttttcattaaataagtatcttcaataaataaaactagatggcgaatattggatttatggccttcaggggagaggcgagcaagagacatattctgacagatgtattttcctgaagcaatttttttgggttaaatttgtaaaaagaccttcataaatatatggtatattttaggtgaaagttacacaagaactgaaaaacattcaagttgagcagatgacaaaacttcaagccaaacatcaagcagaatgtgatttgcttgaagatatgaggtaaggctatagtaaatagttcaaggacttctgtttgtctgtttcaaagaacctttgagttaccaagccccaggaactgatgatggaatttccttttggatttcctgctttaaggctgttagaactttgactcagctggaaattagaactggaactaacacaatacaaa

SEQ ID NO: 7850 - DNA, 2300 bp, Homo sapien
tacctccattttacaagtgaggaaacaaggctgaaataagtgaattgactagctcaacgcttcacaataaattggtggtggagctgagactggagcccagcctacgctacctatggcctgggctctagctgccaccccgcagctgtcagggccctgggcctccatccacctgtccccttgccccaggccttccctgatttgattaaggattctggtgaagggctaacttttgaagccagaaaaagcaagactagtctcctagttcatacacagctctagattaatcttattcaaaacacagctctgtcacttttctgtacaagaatctagtctaactcaatgtaaacaacctgggttgaagttccaccttttcaatttctggtcatgtggtcatctgggaagttactcgtctatccaggcctcattcaccttcctcttaggcctgactgcacttctgagaacagctgtctgggatctcaacttctgaaaaaacggtggagtaatccagctcagcctccacacagccccgtgactcaaaaaaaaaaaaaaaacctccctgggcatggggaagaggtattcctcttctgaggaccccaagggaggtcgataaactcccccgtagatggtctgaacagagcaggaaggttcatgtgtggtggtggggtgcactgcttagataagcaccctcactggcagataaggaagccgagctcacctagcctgttaaggagcaggcaaagtggactggcacccagagatcctgactcccagacaagggcttcctctatggcctctcctgcctcttctacttttcctcgtgcttattatcctgcacctgtttcttttttaaaataacccatagaacacttcctgacgcagattctagtcctgctgtgtaacctttagaaaggcttccctctatgggcacttgcctccccgtctgtgaaacgggggcctcggccttaacgttctcttggctccctctcagcggagtcagtgatgtttgacttgaatgccctgcagtagagtgccgccgtttcctttgcagagcaactgcctttccgccctacaatcgcaatggcctggcacctgcggccagccgcaaagcgacttgtccttgctcgcctctctcgcgcacatctagctggtagggagagtagggtgttgaggggctgagaggaagaaaacgccggaattctcgtatcccacaggcatgctgcgcccccctccccactgcaaacgtttccctgcgagcgtcgtcccccgcgccccccgacacacacacacacacacacacacacacacacacacacacacacacacacacacacacacgcaaaggcaggcaggaggcgggggcggcctgtgcgcgtgcgtcggcgcggagccctctcccgcccacgtgcgcgcccccgagcggagacgcgcgcgccggggcgagctggcgggaaagcgcgcgggaagcccccggctggctcccagcgtgggggagggagggcaggaggcgtctggaacgtgccactctcggagagaaaggggggattttcgcgtggcgctggcgtttctacacctcccacccaccgaccaatccgttagcttcccccttcccctgccgcggtacgaagccccgtgccgtggcctagctccctcctggcagcccggaccggcccctcgaaccccgctctggacagagcggttccctcagcatccggagcggggcgctgcgccgcgcggcgaggccggaaattcccgcggcctgagtggtggagccctagcggggagagcggcgccaccttcctcctcccgggcgggcgggggcgttaggcccagcgagggccgggccgcctgagtgggtggggtgggggccgctgcgtccgccgggagcggcggcgcaggcggccgaccgggagcgcggacaacgcggctgcggctaacccgccgcccggccggctgagaccctcgcgcccctgctcctggggcccccgccccctcgccgtctccgcctccttcctcacacacccccgggccgcccgggccgcccgggccccaagccttcccggtgctcctccctcgtctcctcacactcgctctctggctggggtccgcctgccgcccgctggcctgctccctccggggcaagtcttgcttcttaagcgctcctttcacacacgcgcgcgctcgctgggccgtcccctcctctccggccctcctcctcctcctggtccttgctaacgctgccgtcggggaggattgatgtcccttcagcatcatgcagccgccgccgaggaaggtaagggcgc

SEQ ID NO: 7851 - DNA, 2300 bp, Homo sapien
tggggaggatgtcaggagacgaaacttctaggccctcattgcatgggatactaacgccttgagcccagacagcttgggatgatgaataaaaccatgaaaaaagaatttaaggatagggtgcaggggctcatgcctggaatcccagcactttgggaggccgaggcaggaggactgcttggactcagcagtttgagaccagcctggtcaacacagggagatcccatctctacaaaaaatttacaaattagcccggcatggtggcatgtgcctgtattcccagctacttgggaggctgagatgggaggatcccttggccctgggacatagagactgtagtgtgctgtgatcatgccactgcactacggcctgggtgacagagtgaggccctttctcaaaaaatttaagacaggccagcaagtgagagattagtattactcccttttgcaaaagaggaaactcaggctcagagaggagtcataggacaggtgaggtaagactggaatctaaacccaaggctatggggttcaaggactaggccccttcctctgctcctcaagcctcactaagtcacctgtgtggtagctgaaacgctgtatgtctcaggaatgcagtttcctcagctgtaaagtaagggaattgggccagagcaggggcagagccctgggcaggccaccaaccagatttgcccgctgaaggctaaggtcgagcctgggtcctcaacttggcgtcaaagaaacttgtttctcctgggctaaatggcagtgacagtataaggtttgaagttttggaagaggggagagaaagagagggttggctggagttccagtgcccaaagggtcttccccacactggaacctgaaggcctaggccctataactcgggctatgaggatacttaggtccctggaaggtgcgtggcccagcttagacaataggcgcaggaggctagacaaggggcctttgtgtctcccaagcaaaggccccagcaggactgcagaggcggctcagccactatgggctgtgtgtccactctgctactgctcctggtggggctgcagccagcacccttcctggcagccaggcccagtcagctgatatggagcccaagagggcccaaggccccgaaggcccggggcaagttccttggctacaggaagaggcctcctctgcacttgtccagccagcggagcgattggctccatttcacaggaaagaagaccctgccagggaatggaactgggtcaaggtctcccagagtcagtgctgaagccagacaggaacctacactcctgattcctagaccagaaatgagagagaggcggggtgctcattcattcatccattcacaccttcaaggattgagcacctcccaggacctctaggacagcagcaggaagaaggcagacctggttcctgccctcgggagctcacagtctccgaacgggtcagacatgcagccggtagcccgaccagggaaggccattagagtggggttgacgacagagaagagaggtaaagcagctcaagataaggggccagagtggggagttcagggagctgctgataagattaaggcagggaaagtggggagcacgggagaggcgggatcctgagtaccctgctttcctaaccacggtaatggagagaggcacccccttcccccactttcaagcaagggaggtacgtccttagcctggggttccgagcaggtatctcccagtaggtcccttcctggccagccgggctggggcaggggcgggacaggggtagggtggcgcggtggctgggcgcaaaggtcccgcagtgggccacgcaggcaccgggctgacctggcaaaactttggcgtctctgaaaacctctggtaaccagctcccttctagcgtgagggagccgggaggcctccttctggcccggcagtgagagcgtcgccgcccgaccctcccgttgcagcaccggtacagacacgctgaccccgcggccttgtcgctgggcggcgtcccggagcgggtggcgcggtgtctacccgggcgggttgagggcggtgccagggtcagtcaaaagtccgccccgccccctgcctggcccggcttcggggttggggaacagcgcagggaggtgggtagccgggctcccaggcacgtgggtctctgcggctgcggcgggacccgggcactggcacccgggagcggcggcgacggcaccctgagaggagaagcgcagcgcagtggcgagaggtggggtggggcgtctggagggaacaaggcgctgggagaggcccggggaagcggcgggccagactg

SEQ ID NO: 7852 - DNA, 2300 bp, Homo sapien
cgaggcaggaggactgcttggactcagcagtttgagaccagcctggtcaacacagggagatcccatctctacaaaaaatttacaaattagcccggcatggtggcatgtgcctgtattcccagctacttgggaggctgagatgggaggatcccttggccctgggacatagagactgtagtgtgctgtgatcatgccactgcactacggcctgggtgacagagtgaggccctttctcaaaaaatttaagacaggccagcaagtgagagattagtattactcccttttgcaaaagaggaaactcaggctcagagaggagtcataggacaggtgaggtaagactggaatctaaacccaaggctatggggttcaaggactaggccccttcctctgctcctcaagcctcactaagtcacctgtgtggtagctgaaacgctgtatgtctcaggaatgcagtttcctcagctgtaaagtaagggaattgggccagagcaggggcagagccctgggcaggccaccaaccagatttgcccgctgaaggctaaggtcgagcctgggtcctcaacttggcgtcaaagaaacttgtttctcctgggctaaatggcagtgacagtataaggtttgaagttttggaagaggggagagaaagagagggttggctggagttccagtgcccaaagggtcttccccacactggaacctgaaggcctaggccctataactcgggctatgaggatacttaggtccctggaaggtgcgtggcccagcttagacaataggcgcaggaggctagacaaggggcctttgtgtctcccaagcaaaggccccagcaggactgcagaggcggctcagccactatgggctgtgtgtccactctgctactgctcctggtggggctgcagccagcacccttcctggcagccaggcccagtcagctgatatggagcccaagagggcccaaggccccgaaggcccggggcaagttccttggctacaggaagaggcctcctctgcacttgtccagccagcggagcgattggctccatttcacaggaaagaagaccctgccagggaatggaactgggtcaaggtctcccagagtcagtgctgaagccagacaggaacctacactcctgattcctagaccagaaatgagagagaggcggggtgctcattcattcatccattcacaccttcaaggattgagcacctcccaggacctctaggacagcagcaggaagaaggcagacctggttcctgccctcgggagctcacagtctccgaacgggtcagacatgcagccggtagcccgaccagggaaggccattagagtggggttgacgacagagaagagaggtaaagcagctcaagataaggggccagagtggggagttcagggagctgctgataagattaaggcagggaaagtggggagcacgggagaggcgggatcctgagtaccctgctttcctaaccacggtaatggagagaggcacccccttcccccactttcaagcaagggaggtacgtccttagcctggggttccgagcaggtatctcccagtaggtcccttcctggccagccgggctggggcaggggcgggacaggggtagggtggcgcggtggctgggcgcaaaggtcccgcagtgggccacgcaggcaccgggctgacctggcaaaactttggcgtctctgaaaacctctggtaaccagctcccttctagcgtgagggagccgggaggcctccttctggcccggcagtgagagcgtcgccgcccgaccctcccgttgcagcaccggtacagacacgctgaccccgcggccttgtcgctgggcggcgtcccggagcgggtggcgcggtgtctacccgggcgggttgagggcggtgccagggtcagtcaaaagtccgccccgccccctgcctggcccggcttcggggttggggaacagcgcagggaggtgggtagccgggctcccaggcacgtgggtctctgcggctgcggcgggacccgggcactggcacccgggagcggcggcgacggcaccctgagaggagaagcgcagcgcagtggcgagaggtggggtggggcgtctggagggaacaaggcgctgggagaggcccggggaagcggcgggccagactggcgcaggtgcggactgggcgcggggcaggggagggcgctgtggagcggctgtcgccccggggcacagttgcgagccggcgtgtagcgcataactggacggcttgaacgcgcctgtgggtccgtggttgaactttgtctccacgggagcgtcggtctcg

SEQ ID NO: 7853 - DNA, 2300 bp, Homo sapien
ctggacagggccccgccctagcctttggaaagggacagggcaaagctgacaggcctcactcttgatctcaaggacagggactccctcctctccctctgggagagccctcgccctgtggcccactctgcctgccccctctgacctctccacccttcccactctgccttgtgaaaggcaggacatccccaaagcttgctgtatttggagcctgactccacagcgccctcatgtgacagagacccatcacagaccatgacccaaatgattactctgtactgtgccaggtgggtgacctgcccagaatagtgtgagctattcacctctcaccttctaggttctatacttctgttaatgtagccgatgtccttctgagttttttttttctttttgagacgaagtcttgttctgtcacccaggctggaagtgcagtgctgcggtcttggctcactgcaactctctgcctcccgggttcaagcaattctcctgcctcagtttcccaagtagctgggattacaggtatgcgccaccacacctggctaatttttgtatttttaatagagacagggtttcgccatgttggccaggctggtctcaaactcctgacctcaagtgatccacctgcctcagcctcccaaagtgctgggattacaggtatgagccaccgcacccggcccctcttgagctttcttaatgattgcctgttacaaaccacccttgagcctttcccacaggcccgagccactccacaaggacacaggaggggctcgttcaccatctaatcctgtggcaggcacaggtgggggtggatactggagaccctgggtgaaccaggggcacctctggaacccagttggactgcctggccccttggtatgcacgtcccaccttgctgctcagtgcccaggccacttgccttgtgggtgaagttcctgccctgatgcctcatgctattttcagcccaagtaagaccataattttccactcctggccccagaccattgtccagcagtgacgtgaggggatctgcctgccctcaaaatatctcctattaccctccaatattccctgcccccttcacacctccctaacctgacatcacttcctgggctgttgactcatgaaggccactgtgaaagggcacgtgagttgcccatccactgagcagaccccagggattatccagcccagctgcagactcaaggccagagatgggcagggctgagcccaaggtcattcagcaggtcagcgtggcgcctggatgtaagcaagtgccttggtgacgatcctgctgtcactcacactgcccagctcttcctgcccagggtgactgggatggagccatagacctgaggccagggacaggacagggatgggaggaaagggagggtagagagttgagtgtcagggagtaaatgtctgctgatgtgcctgcagcagctgttctcaatgaactgcatgacatcagggcagggtccctggcacacaggggtctctgccctgggtggcaggtgtcccagggtccaggagggatggaggaaccccagggtacattcccactttcaccccctgaggttagaagaggccctaagcaacatgttatccacacatggttgctccaggtcaagtcaccaaagctacctctctgtcacccttgtcatggcagatttgggctgctctgtttagaatcaggcacatgagggagggaagtcgtgtattgacccatgtcccacgcaccctctcatctatgttatatggtggatgcttcacagaagccctgggaagtagatgctatgatcctatttagcagatgaggaaacaggagaagggcgtgagaagtgaggacttgttccaggttatccaggctgtcagggtgagtcagagtgagtccaggttcacctgatggccagaatcatgccctttatagtgccccacgacactcacagccctgcagggcagaagggtctataagtggcccctcgcatgattcaagatgacagaggcagtgtagcaaggatgtgagaacacagatgctccacccagaccacctcagtgtcaatattgtccccactttcctggctggggtctcttgggcaagttacctaatcttgcagcacctcagttttcccatttctaaagtgtgctgctaccttccatgcagggcgttgaggggcttccctacgttattacgcacaaagtcctcctcacagtgcctggtgtgtggtcagcatttatatgcctggcaccaggccgggggctatggaggcaaatcagctgggccctgccctcacagagttgacatc

SEQ ID NO: 7854 - DNA, 2300 bp, Homo sapien
aaaaagtttgataatcagatatgcatgaaatggtatcatttcatttggttttaatttagatttccctggttgatagtcaggttgaacatattttcttatgtgtattggccataattgctttcttttctgtgaaatgcctgttcatgtctttcaatcatttttctgttaggttgtttagctttttcctattgacgtataggagttatttttatatactggataataatcctttgttacatgcattgcaataatctccagtcggtagtctgtcttcttgcttttttccttttttagtgtttttgtacaaacataactttttattactctgagcttattaatattttcctttacaattttctttgtttttgctgttgttgtttaaaaaattgttccttaatcctggcagatagtggaaatccaacatttgctgaataaaaggagaataaggagaatgagtgccttccccagggagaacgtgcagagtgagcaagaaaagggtggggcagaaccctggggaggacagagacagagctacctagggaagagtgtgaagtggaggaagaacaaggaagggagctgtacagcccacatggggaattttgaaagtgtccggtggagtgactaagatgtgtgcattgcttcagagacatggaggtcactggatacttggcagggccgtcttgtagttgctacaggagctgagaccggataggtgggcagggcactgcagagaagagtccaagaattgtcacctctctcaagaacattgacagtgaagggaagacctgtcctgtcttggggcctcagtgtactttctgcctaggattctcttccccttaccttcacctggctaagtctaactccttctcctggttcagcttaaatgtctcttcctctgggaagccttcccagatctctcagtttaaattagatggcctctttccccatgacagtctttcatccagttcttgacttttccttcttagcagttaacacaatatgcaactatgtatgaaatttgtgtgactatttgtttgatgtccgtgtttcccactagattaccaactccacaaggcctgcactgtctggaatgttgttccagtgcaccctcagtgcctagcacacaacctggcacagtaattgttgaataaaaagccacaatgggggctgagaggaggagctggtttgtatctggggacagcagatccaggaggtttcagagatgagggagtcagaggtccctgtccaccagccagattttaggcgataaaagggaaaaagggaaggagagtgacagttaggaggaacactgacattgatgagacaccaactgtgtaccaggcactgtcctgacaccatcctgagcatcactcccatccccactcccatctttagtgtgatgtcccactagctgagtgacccagagcaagctaatctccctgagcctcagtttcctcatctgtaaaatggactggtaacaccaagctcctgggattgttatgaagaggaggaagcagggtatggtgtggaaagtgttacaaacccacgcttcaggggtacttggattctggagtcagaccacctggcttcaaatctcaggtctgccacttaccagctgtgtgaccttgaacaagtcacttcatttctgtgcctcagtttccctgcctgtaaaatatgagtaataatacctccagaattgctatgaggattaaatgaggtatgcattagaacaccttagcacagtgcttggcacatagtaggtgctcaaggaaataataattaaaattattcctccctcctccccactatcccagaactgcagaatgtcagagctggaaagatgggagaaatcaccatttgatacccagcccccccccacacacatatcaatacaaagagggaaactgaggccagggaaaggtaaagtcgtgaaggattctggactggagtccaccggtcccaggtcccagaccaggagcggtccccagaggcctgcagcctcttccagacatcacctccccgtcatcccacgagggcgggccgctgggcgggactccagcggtgcggaggccgcttggccacagcccctccctgccgctttgctctggctcctctgggttccagggacgctggggccggagctgctgccgccgtctacacggtcccctcatttgacgggttcgcctcctagcagcgcctgggcgagtgacatctgggccggaccagctggtgctgcgcggcgcaggtaagggcgtgcgcgggcagggacaggggtaaggggtgccggggcgcggggatac

SEQ ID NO: 7855 - DNA, 2300 bp, Homo sapien
gtattctgaccaggacttatgtgggatggctgaagagggtgagccagacaaaccatctgtgttcttggggaaacctgttagcttctctgggaggggcaaaggaagggcttgggcatccaaggactcagctcttcctctcccatctctttcctggttatgaaagctcttcacatgcaacttgctgctgagctaagctagaacactatgtaagctggctggaagtgggtccatgcatgtgatggtgcctgcgtgcctgccgtgggtggtgtgttcccaagtgtggcaggtgccagggcacgtgtgcatatgtatgtgtgaacctgtgtgagttatgtggagctgtttccggggctgggtgtgctgtgcatgcaccagtgcagaattgcacccacaggcatgtgctccttacaactctgttaggtctctgtggcctctctgtggtttcctatgatggaaggcaaacagcagaccccagactctggacagtatgaggggctcaggctgcagagagggaaaacctctgtggctcagcaagaaggcctagccctggccagacatggtggctcacgtttgtgatcccaaaactttgggaggctgagggaggaggatcgattgagaccaggagttcgataccagcctgtgcaaactagaaaggccctgtctctacaaaaaaaaatacaaatttagccaggcgtagtagcttatgcctgtagtgccaactacttgggaggctgaggaggatcatttgagcccaggaggtcaaggctgtagtgagctgtgtgtttgcaccactgcactccagtctgggtgacagagtgagaccctgtctggaaaaaaaagatgtccagtctcctcctgtccaaggagaccaccaaccatgcttcctgcaagcttgaagtgggccaactctttttaggatctgatctgaatcccagagggaccacatctcctcccacggaccagggctaggcagcctcctgtttcagtcaagagggctgaaggtggtgttttccctcctgactcctgggagcagcaaggggccaatgggcggtggccagggatgtgcacgagaccattcctgcctgccaggggcctcattacaggctacagagacccttctcagcccttgactcatgtggatcggaacagctccattccacagctgagaaaaccaaggttcaggaaggggtgagacccacccaagggagtagccagtactgaactgtgagcccagcccagagccaggaaggaagacactaggactgagctagcagtggctgcctggcggcagggcctcgggggtaggacgtgaaggtcagcctggccagctagtggtgagcatcacccagcaagggcatgtggggtgtaaactgtaaagcacctgatttattgtaaaggacccaggggcttcctgctggtgactgagtgcaggagggtggctgtggaggggtcagtgcccacaggcaacggagggtctaaggggcttcaaccttgggcactcctcccctccccgtgaggagcctacaccctgggctgagctgggagagcctgcgcctgaaagttagcccctaaggcttcctcctcatcttatgtaactgcttttattcctggggaaaatcaagagcctgggaaccccacaaatctcccgtgacatctgggacagtttgaagattatgataaggatttcggagcctgggaaaataaggcctgtggactaggggtttgcggggctccccaggagcagcatgtgtgtggagcacatgcagaggcccgggcctgggcaaacaggtatgtgaacaggtgtacacactccagagccactcacagaaacacacacacacatacttaggcacaattccaaacacctgtgccttgtgaatgcatgcgcatcttccagcacaggtacacatggctgacaagcccccaggcagacactgtgcaaccagcattcatgtcctcccccagcctgggggcctgactggggttggtggctctcaaggctacctcagggctatgcctctgcctcccggaacaagctttcccaggcctccttcccagccttgtctctttcccgtctctccccccacaccttcttaccacaaggacagaggaggggcccttcctgtcagctggctgggagcagaggtggctttgtcttttcggaagaactggttctgtggaatttgtgcttatttcccatcaaggatcaaggacctgctctggggctacctcagggccccacaggatgaggggctggttttcagatgagttttctgcttgcctgtcatctggatagtgtc

SEQ ID NO: 7856 - DNA, 2300 bp, Homo sapien
tgcaaactgccttcttgtcagtgtcttgctcattcttcatgacactcctgatatgtaagtgccttcacttcctctatttggcagatgagggagctgaggccagagagggatgggactgcctggactgcctgaggtcacacagcaagctgaggcagggttgaccaaaactctcatgagctggggttgcaaggaaaatgccttcagcttcctggggcttggggtaggagaatttggctgtcagagcctggagggtggggcaggctggcactaccaggtgggcctgccacagaaacacctcacactcctttaccaggagctgacggggggcacagccagcccctcacaggccagcactgtgctgggaggctcacccctgaacctacctttgtggacatgccaagagagggcaggagagggagctctgccttgctgtgtgacccaggcaagtcccgaccctctctgggtccagcgccctctcgcctactgggatattgggattggggattggttgagggatgtgctccctctctggaccacagaggaagcagagagcttccccagggctgggagtggggcacaagctcgggatgctccctgccaaagcgttggtggccctgagttgctgcctgtgcccagggagtcccagtcttcgcactagcctgctgctgagatccactgaggcagagcctggcacagagtgggggcttggggcctgggggagggtctcctccaggctaggtggctgggagagggtgatctggcaaatctagatggggcctgtccacctgtccgaggctgcagccccctagctctccgccccttaccctcctttatgtttctatatcgctgctcttatcactatctggcctgctatatatttactcattaaccaaaagaaactaatctcccctgctagactacaggtgtctcaagggcaggactttgttttttgacctcaagtgcgttgaacattacccgaacagagtaggtggccaataagtacctgtaagaaagaagaggaggaggaggaagcaggagagtcatcttacagacggggagggcccaccatgggcccaggtagagccgcccgggctgccttctcctcatcaagcccaagctcaaggatggattggcgctggggaggggaggattgcctggggtcagcctttcccccccggcatcaccctccatcttcggtgctgtagcaggacgagccgcggacaaaacccttcagacactgagatagtgaagggagtggctttaatcagctgggagcatcggcaggctagcatcttaaaatctgagctcgtcaggtgctcaacttctgtcccttttaagggctcacagctctaagggggtccacgtgagagggtcgtgatcaactgaacaagccagggggtacatgatagggactgcgagcaccggtggtcagagtgaaacagaacagaacgggaggtttcacaatgtccttccatacaatctctggaatctatagataacaacagctgctaggtcaggggtcgaattttaactaccaggcttaggtcaggcaggcccaggcctggtttcgggtctggttccttggtttcgggtctggttccttggtttcaggtctggtttttaggcgccgggctacctgcctttagtttcgcttctctttccttttccgagtataaaacagtatgagagggtctctctcctccctcagtgccatcctcatccctgggtgggagttgtctggatccatagggttggagccacagataacagagccattaatctcggggtctcagcctctcttaacggaccttccaggcactgctgagaaaaccaggttaatggtttcctgcggcagcaatgagcagaagcagggccatctccagactccagagaagccaggagagggctggggtgataatggggaggaggataaaaaacagccacccaatgcgtgccttccctgtgccaggcccttgtcctgaaatgttatctcactccatcctcccaacagtcccttgggctaaattggtgatgctgcttgtttgagtgagcaaacagagggtgaatgaagtgacttgcgggcagctgggtagaggatgagtcagcattggtgtaaaggactggagcttcagggttctcgggattcgagtcctggccctgctgcttgccagctctgtgctgtggcaagttacttcctctccccaggtctctcggtttcctcatctgctgcctctccagacttctgccagaacattgcacgcgacagtttcaggcacagaactgactggcagcaggggctg

SEQ ID NO: 7857 - DNA, 2300 bp, Homo sapien
tccctctggcccttcagtgcccagcaatggacatgctttctccatgagctttgcaggttactccctcccaggtgcacccatgacccctcagacctgagtgttccctcccgggccctgccccctcctctaggcctagccaggtccatgggcaaagctaaggcccggtgagagcaaggcagttccttggctccgattcagtcatccttagattctttgaagtcccaagccctaggatgctgtggttccaaggtcctgagggccctcaaacctagactctgttaggaaggcaaagaactaaaaggccggtgggtaatgggtactcagtggttgttgaggtgccaggccaggcctcttgtatgtccttgaacccctgagaagagggtgaggaaggggcagctggccttagtttctttctccatctgtcaagtgggaccccatgagcctttccttcccctctgaggttagtccaagtgctcttatctgagcagagcggtgggattaggggtctccagatctgcacgtctgggtggataaggcatgatagggacagctttgtgtttcccatccatccaggttgcagggactgagaccacttaggcttcttacccaagccttgccctgccctgccttggggccaacacctcccaggagtcctcagagctgttcccattcctgggacagtgacccgccctgctgggagtgggtacgggaggttgtcccagggacccagcaaaggactggctgctgagctgaaggccaccttgctctcctgggccacagcacaggtcaaatccaaccaggaggtccacactcagctggcagaagtgacctcttagcacaggcctgagcaagcactaggtgctcaacctgtgcacaactgaccaagtgtttaccagaagttcaaacctgatttttctcagtgtgatccaaactttgggttcccactctgttcctcaatccccttgcctgtaaaaatggctttggggtgagatcgatgcctttaaaggcaccttcagctctgatgctctaggctctaggagtctcctctgcacctcccagggtagaagatgagccaccctgagtggcacttcatcctcccagcacactggtgatcagtatgaccatattctaccgaggaggctcagagaagggaaggggcttatctagtcagtgattgggggcaaaggtggagtaagaacctgggcctcaaactcccagggcagcattctttccccacaccatcctcccatgccacctgccttgctgcctcagctgctccaaatcaaagcccacctcctccaggtcgccctcttggaatgctgcttccccctctggagctggcctccctgggacagtgaggagccacatcccctgctctggtctcctaacagctctgaggccagtttggtggtgaggaggggctggggtggatgaggcagctgggtcctcaggggcatcacatctatctccacagcccacgtccatcactcctcatgcgctctgcgcctgccgtgtggaaggggcagtcgctgtgaaatgggggaatgtgggaggatctggtgacacatagtaggtactcgataagtgtgtgtggagaaaagaagaagagggaagcggggggagaaggcggctgagtaagtttgtacgtaagtggattgccacatggagggatgggtagatggacatgttggtgagtgagctattgaatgagggaaggcaggctagatgggtgagtgaatggctgggaggaggaatggacaccccgtggctctgagtgttatagctaaaggaggagccatgagctctctaatcactgccctacccatttgacaactgagaagactgagagagggctgagcagaaagaaaattcctggttctgtggggctggcagcctctggttctcccctacccctcctcctctgcccccatccccctctttcccctgctggggtaggggagtattccgggaaggacgccttttttccacctccttgctcctctaagcccagtttccgccaggcactaggcgtggtgttggggatggcagggagccggtggcccccacaggggctcttttagtcagagacagccctgccaggaaacagaggaagctgctcactctgtcagagaagttgcagcctagctgagggcaggagagtggggagcctcaggtctggcttccctttgccccaacacacttgggaccaccagcgtgctgcagggacaggaggctgcctgtgagtgtcagtgcatcttggggccatgggccagtgcaggggttgcggggggtgggggggg

SEQ ID NO: 7858 - DNA, 2300 bp, Homo sapien
aatttcctagagaaaagggagagatttactccttggcccccttgaggcagagctgagatgaggttgaggtgagggactccctggatgctggtctcaacacagagaggaagcactttcttgctacagagatattccacaactcaagaggctgcccagagagtggagagtgacctcctcatcctgtggggtatatgagtagcaagcaggttctggagtcccggctgagtcctctctctctcattcggtagtcaggcaatccctgggtgtctaccatcctttcctatcctcctgcctgcccctctcctctgaaccccgtctcctagcctagtctggcccagctacatctccttggctggacctggtggcagtggggttggctgggtaatgcacagactgctgacctaactatgtgtccccgaggccttgctactgggggttggaggggccagggcagtttgaccaggcctgaagaaggctgggcagcgctggaggggcatgggtcagaccaggttatcctctgttcctgaggagagtgagctcaggcccaaggaggagaaggaggagactgggggctcaaaggaacgagaacctccttcttcatcaggatttgggggtgcatctcagagctggctggaggagcatggtgtttgaagcccctgaaatctgaattttagcaggagctgctatttcctgacttgcatagtggtcaaagttacttctccttcacggtccacagagaaggggtaataatatttgtccccaagggtggtttgtggattttaaaaaataagttaaataatattgcccatacattataggtactccatacattttcattcgttcgttcattcgttagttgggccgggaggatgaatgggatctagaggcaggtgggaatgcggaaggggatgatgccccaataccgagaacaatgtgagactcagacggaggcaggggcgggaggggagctcaagcgagggatcagcgtgaagccagagaaacaaccgacacttttcctgccaagaaggtgaagcagctgcgggtaagagtataggtttggcagtgggaagtcgagggcgttcccgtcgaagctccttttgtgtataaggcctaagaaggggcagtgcgctttgcgaaggtctgaaaaagactaaggggattaggtaacgactgaaaggaagttttcacaactctccgtttttgggggatgggtgctgctttatccgtccaggactccgtgcgttgggaaaatcacgccgcgagggggcgcaagagccgcgtactccagagcaagaagaaaaggctcggggatccaggcggagagtccaggagaagagccgccagactgcaggggcaggtggaaggcgtggcagctggaaaagtaggggtgggggcgcggtcgtgaagggtgggacttctggagcaacgctgggcgggttgggggccggtcggagccggacaggcggctgggaggtgggatgggcggggcgcttgggagcgagatggggggacaagggcgtggctacagctaaattcgccgcagagggcgggcggggagggggagggaaggggaggaggcgtggcctgggcggggagtagggcgcgacggacccttcagttagcccgcggctccccgggctctccctggcgccgagtcccacccctttcccggcccagagagtgtgcgtctgcgtgcacctgagtgtcagtgtgtacgagagtttgtgagtccgaggttgccatgttggagcccctgggcaggaggtgtttccgcgcggaggctggtggcccgcggtggacgcggcgccctggctgcgagtctgcggagctgagcacgctcagcggttgtgtgtgtctcagcgactccctgggggcagctcggcctgctgggctcccgagggacctctctggagggccagagggtcgcctcagtctgcaagtcctccagcaggctttttcttcttcggctcctccctgattccctcccaccacgcggttcccaggctcgcgcacgcccggagcccaccccctcttttgggcgcgaggccccgccccccgcccccttgcctctgccgcaaagtttatttgcaacaaaagggtgccaggagcgagcagccaagggcgttgggcaggcggacgcagagtcgaggaaccaagcgctgggatcccgcccaggcggtgccgcggtgcccctggtcgctccagccgcggcgggggctgggcctgggggtcggcgctgaggcgggaggggccgcccgggatggagacgttgcggccggtggccacagaaacttgagccg

SEQ ID NO: 7859 - DNA, 2300 bp, Homo sapien
tgagagtcctttgttctcaagcctgtggttccccaagctccataaaaagcgagtctaaatctttcctgtggcttccacaactccttccctgtctactcactgtggagcaacccagatgctggtagactctcagggaggagcccacgtcacagtggtttcagggtcagagctggctgcaggaggagctggcgcatccacccagcagtaaataataattaggctccctcctaacctgggggttgcaggagcgagaagtgtttgggctgtggccccaggagacctactctatggagctgctgccagggcagccaggtagccgcctcccacagagaacttcaggcaacatgtctggcaccccagttttcagatgaggaaactgagttgggggtggatttgatgaaaacctcacagagagctggtggtagagaggggcctggaccctctctgggatgtctgattaatagccagtgctccaaaaagcatttccccatttagtttattgattgagacaaggtctcactctctcacctaggctggagtgcagtggcacgatcgcggctcactgcagtctcaacttcctgggctcaagtgattctcccacatatttttgtagagactgggcttcatcatgttgcccaggctggtctcgaactcctgggctaagtgatcctcccaactcagcctcccaaggtgctaggattacaggtgtgaccactacacctggccttccccatttggtttattgagtgacgacacctgaaattgccaccatttgaactctagaacctagagctggggtgtagatggtccccttacaaagaaaacatttccaggagtggaggcattctggatgctctggccttccgtaggctgggatgtgggaccctggaagaacccctgccccagccctggaggtctccattgacatatgagggtgctgatgtcatgatcctgacatcaatgacctgtagctccttatgcccttcccccacaacctgagcatgacccagggaaatgaaaactcatcccctgctcccctccccatgcggtgtccagttcgcctcctggaatctcctggaccctggggacctgaccttttccgtctcctagcccctgggttcagattctatgactgtttagaaccccacccccagccatctatccccagctgacttatttaccttcctttctccatctctgtcatgggctgtgattatcctgaccccagccaggcctctggcccagcactaggtcctccctggtgtctcagtctcccatcagccctactgtcccaggaggaccgcctgagatcccctgaatagtactgagagggggaacgggccactgagctgctccctccagtcctggcacaccctgtagcacaactccaggggacacgattcggagtcggaatacagtgtgaatactgcctggagtttgtgatgactggcattggaaactggcagggtgggatggctgtagtagggaggggggcactgagtcacctgtcctgctggagggaaactaactaccctggcacagagaagtggtgcggggagtaggggagtggaggcaggagacgcctcctggaggatttcactaggccttgaaggatgtgccgaagcccaccgtgtgggcttcctttatagactcaccttcaccaggccttttcgccaactaggtgagggtttccagggttgggcctgggcctcgtcaacaaagcaaagtgaggttattcttcctggccaccaactggcaggaggaagatgaagcccagaaaggggcagaggtggctctagttacactggcaatgctgagaggacccagaggagtatctcagtctccagtctctttatcttgcttcgcacaactccttgcttggttcagagccttgaagaggcggatacaagaggccctctgggcaccgccgcccagtcccgcgcagccccctgcagttcccaggggcgcgagagagggcgacgtagagcagcaccgcccagcggcagagcggcgagcccctccgcggctcggggtgagtcgggcgcggggcgcagaccgcgctctgacgtcgggggcggagcggccgtgacgcgcgggggcgggtctgcgcaccttcccggcccagccggcgattcattcaaaaggcgcgcaggctgcgcggctgtccgggcgctcgccgagccgggccgcggcgccgagtcgaacggggagccgagctggagctgccgcggcgcagccaggtaaggagggcgcgcggagcgcccatccagagtctgctctccgcggccgggccagcggga

SEQ ID NO: 7860 - DNA, 2300 bp, Homo sapien
ccaggtagccgcctcccacagagaacttcaggcaacatgtctggcaccccagttttcagatgaggaaactgagttgggggtggatttgatgaaaacctcacagagagctggtggtagagaggggcctggaccctctctgggatgtctgattaatagccagtgctccaaaaagcatttccccatttagtttattgattgagacaaggtctcactctctcacctaggctggagtgcagtggcacgatcgcggctcactgcagtctcaacttcctgggctcaagtgattctcccacatatttttgtagagactgggcttcatcatgttgcccaggctggtctcgaactcctgggctaagtgatcctcccaactcagcctcccaaggtgctaggattacaggtgtgaccactacacctggccttccccatttggtttattgagtgacgacacctgaaattgccaccatttgaactctagaacctagagctggggtgtagatggtccccttacaaagaaaacatttccaggagtggaggcattctggatgctctggccttccgtaggctgggatgtgggaccctggaagaacccctgccccagccctggaggtctccattgacatatgagggtgctgatgtcatgatcctgacatcaatgacctgtagctccttatgcccttcccccacaacctgagcatgacccagggaaatgaaaactcatcccctgctcccctccccatgcggtgtccagttcgcctcctggaatctcctggaccctggggacctgaccttttccgtctcctagcccctgggttcagattctatgactgtttagaaccccacccccagccatctatccccagctgacttatttaccttcctttctccatctctgtcatgggctgtgattatcctgaccccagccaggcctctggcccagcactaggtcctccctggtgtctcagtctcccatcagccctactgtcccaggaggaccgcctgagatcccctgaatagtactgagagggggaacgggccactgagctgctccctccagtcctggcacaccctgtagcacaactccaggggacacgattcggagtcggaatacagtgtgaatactgcctggagtttgtgatgactggcattggaaactggcagggtgggatggctgtagtagggaggggggcactgagtcacctgtcctgctggagggaaactaactaccctggcacagagaagtggtgcggggagtaggggagtggaggcaggagacgcctcctggaggatttcactaggccttgaaggatgtgccgaagcccaccgtgtgggcttcctttatagactcaccttcaccaggccttttcgccaactaggtgagggtttccagggttgggcctgggcctcgtcaacaaagcaaagtgaggttattcttcctggccaccaactggcaggaggaagatgaagcccagaaaggggcagaggtggctctagttacactggcaatgctgagaggacccagaggagtatctcagtctccagtctctttatcttgcttcgcacaactccttgcttggttcagagccttgaagaggcggatacaagaggccctctgggcaccgccgcccagtcccgcgcagccccctgcagttcccaggggcgcgagagagggcgacgtagagcagcaccgcccagcggcagagcggcgagcccctccgcggctcggggtgagtcgggcgcggggcgcagaccgcgctctgacgtcgggggcggagcggccgtgacgcgcgggggcgggtctgcgcaccttcccggcccagccggcgattcattcaaaaggcgcgcaggctgcgcggctgtccgggcgctcgccgagccgggccgcggcgccgagtcgaacggggagccgagctggagctgccgcggcgcagccaggtaaggagggcgcgcggagcgcccatccagagtctgctctccgcggccgggccagcgggatacggaccctagtggcgccccctgcctccccgtgtctctgaggaagttcgcgggctcggcggatgcggcagcccggccgcgcgcccccccaccccactcctcccgcctcgcgtcctgtcccggcgccttccgcgcaccggccaccgccagtctccgagccccgtgacctgcaggtcctccggccgcgactccgggccggccctgcgtggtggctgtcggggggcgcgcggggaagcagcggaacttgcggtgtgaggggccggcggggcccggagcggtccccggcccgggaaacttggaccgagacc

SEQ ID NO: 7861 - DNA, 2300 bp, Homo sapien
aggagggattcaggagagacagttcattcctaagaatgggaagcagagagaactcctagtgaaatgggctggggacacacactgagaagatggagctttcttttgggatgcgtctccctgtttgggtgtgtgggtgtgaatggggtagcctcgccttgagggaagattgcagaggaggatgtggtcctggagactttcgctgaagggagagcccagaataggaagcgccacctgcagacttggctccagggattataaatgaggctggttaatgatatgcccagctgtgatggggccagggatggacccaaagtaggaggaagtgggggcagaatacgagagaggattcggaagcatttcctcctcatcgttctggttagctggaagggcttgagatcctgatgtggccttatctggggctttccagcactttccagagccagatgtggctctctccttgcccaggtactggtcttgcagcaggtctgggacaggacaggttttcctcagtgtgagggattgaggttagaagagtgtgtccctgaagcccgggtggggtagtcagtggtccctaccactggggtttcaggaaataggtgggggatagatgaccccagagaccccacacccagcactttctgcctctttcaatgcctactgttcttctagctgctgccctggcctctcgccaccctgacatcaacaaccctttggcagtgcccacctggggaggagcccgacctggtgagcattgccctgctctcctgcctgtcctgggagggccctgagggccaggggcagagtcctgtgcctggcccccaagggtcctcaggcttggctcctggccatgctctcaccctttacctcccacaggacccagggcagggcacattatgcaggccctgccccccaggcaccttctcagctgcatggggctccagcccatgccagccccatgcccgttgcagcctttggaggaggctggaggcccaggtgggcatggcaactcgagatacactctgtggagactgctggcctgggtaagccaaagggagtgcggggagggctcctggctgggtgaccaggactctggatcctggggccccagccttattgtaccctgagcaggcctcattcttcccatctgtgaaatgggatggggcaggaccacggagggtgcctggtaggaaggaatccagcctctcctaaggatagtgtttggggaaacttctgggcctcagtggtatcttccctcctcgcaggtggtttgggccttggggggttccccgcgttccatgtcaaccatgttcctgggcacctctgggtactcatggctgtgatggtgagtggcagactggggctaggactggtgcaggggtatgtgcgggaggggccagtgagttggagcccagcagcctctgcagtgttcatgtgggggcagtggggtccttcttccagcccagggcagggcgtgcagccaaagggtctccagcagggcacagtcagccgctcccctggctgtttctgcccaccatgcttccgagtggcagagagtgtcctgcagatggcagccacagctgggggctggggactcacatactgacctgtcccctgtccccatcccttcaaagagattcatgccagccaagtgcagtggctcatgcctgtaatctcagcactttgggaggccaaggcaggaggatcactttgagaccagcttgggcaacatagcaagaccctgtctgcaaaaaataaaaataaaaaattagccgggcgtggtggtgctactcgggaggctgaggcgggaggattgcttgagtccatgattttcatgctgcagtgagctgtgatcgccccactgcactccagcctgggcaacaagtgagaccctgcctaaaaaaacccatgcagatgagtgtgcgcatgcaaacactcacatacccacacgcacctcctcccgccactgagtcagtcaccccctgaggcactagattcatggccaggccacagggaggcagatcccacgtccctgtgcccagacatgtgtcctgtgtgccatctcttcaccccctgaccccagcgtgaggggagggtggggctgggtgtctggccgtcctgaggaggccttgttcaggacaatgcttcgatggccagaagggaaaacaggagggcagtgggttgacctttgcatccccagcatggcggggagtgggctcccctgggcacattggctctcctgcagcccccactgactcgggccctgggcccctgtctctctgtgtttgtgtcactctgctttt

SEQ ID NO: 7862 - DNA, 2300 bp, Homo sapien
gtggtttgggccttggggggttccccgcgttccatgtcaaccatgttcctgggcacctctgggtactcatggctgtgatggtgagtggcagactggggctaggactggtgcaggggtatgtgcgggaggggccagtgagttggagcccagcagcctctgcagtgttcatgtgggggcagtggggtccttcttccagcccagggcagggcgtgcagccaaagggtctccagcagggcacagtcagccgctcccctggctgtttctgcccaccatgcttccgagtggcagagagtgtcctgcagatggcagccacagctgggggctggggactcacatactgacctgtcccctgtccccatcccttcaaagagattcatgccagccaagtgcagtggctcatgcctgtaatctcagcactttgggaggccaaggcaggaggatcactttgagaccagcttgggcaacatagcaagaccctgtctgcaaaaaataaaaataaaaaattagccgggcgtggtggtgctactcgggaggctgaggcgggaggattgcttgagtccatgattttcatgctgcagtgagctgtgatcgccccactgcactccagcctgggcaacaagtgagaccctgcctaaaaaaacccatgcagatgagtgtgcgcatgcaaacactcacatacccacacgcacctcctcccgccactgagtcagtcaccccctgaggcactagattcatggccaggccacagggaggcagatcccacgtccctgtgcccagacatgtgtcctgtgtgccatctcttcaccccctgaccccagcgtgaggggagggtggggctgggtgtctggccgtcctgaggaggccttgttcaggacaatgcttcgatggccagaagggaaaacaggagggcagtgggttgacctttgcatccccagcatggcggggagtgggctcccctgggcacattggctctcctgcagcccccactgactcgggccctgggcccctgtctctctgtgtttgtgtcactctgcttttgtcctgcctccatcgtctgtgatgctcagagtgggggcggcgggcccgacgtggcgtggaggtggcagcaggggccagcagcggtggtgagacacggcagcctgggaacggcacccgggcaggtggcccagaggagacagccgcccagtacgcggtcatcgccatcgtccctgtcttctgcctcatggggctgttgggcatcctggtgtgcaacctcctcaagcggaagggctaccactgcacggcgcacaaggaggtcgggcccggccctggaggtggaggcagtggtgaggcccagctggggtccaggtgggaaggacgggggcacgagcccagccccagctccacttgggggctgccagcggaatcctgcctggcctctggggtctgagagggagaggcttgggaggtgatagctgcagactgacaacatgggaggaaaggtaaggggacgaaggtgtggccgtgggggcagagcagaggtggcacagctggtcaagtggcttcagtggatcctaccctgggtgaagccttgcccagatgtggggatctggactctttggaggccacagttgtgtgtatggttccagggtcggatggtggccttggagttactcaaggtgacctctgacctctggcctggagtagcaggagtgccctgtggcaggagggctggcagggcagctgtcctgtcctgggcaggcaccataaggggctcgggttttggttccaggctgtagtttgagttacaaggcctggaaccggagggacaggcatgcgccaccaccttcacccccagggccccgggcccctttccttcttccccacaccactactcccctgcagggcaggggcccactcgcacacaccctgccctgggcccatgggagcctgtggctacctcaagagtgaaatggcatctcccatgctagcaccctcggctgtctggggctggcatgggagccagagacccttctaagtcctgacactgaagtctggcgggggcaggaagcggacaggagcagtaagccggcaggaggaaacgtggtgactcagggccattttgcctgggactgtgcttgttttcctagagacttccctttaactgctggatgctgcctgggtgcaagtcctgggagctctgtttgctgctgggcccagggctgatcatcgtggcccattctcacacccttgagatttgggcccaaagctgactaggggcactcagttaaattgttacatagggcacagtagagaggcca

SEQ ID NO: 7863 - DNA, 2300 bp, Homo sapien
acctcaagagtgaaatggcatctcccatgctagcaccctcggctgtctggggctggcatgggagccagagacccttctaagtcctgacactgaagtctggcgggggcaggaagcggacaggagcagtaagccggcaggaggaaacgtggtgactcagggccattttgcctgggactgtgcttgttttcctagagacttccctttaactgctggatgctgcctgggtgcaagtcctgggagctctgtttgctgctgggcccagggctgatcatcgtggcccattctcacacccttgagatttgggcccaaagctgactaggggcactcagttaaattgttacatagggcacagtagagaggccatggaatagcagtttgctgtagatttggggagttctgggtagggtggcagcccacagctccttgaggctgaggaggagacagtgcagacccagaagacgctgacgcaccgccccctcgcccgcccaattcaatgactggagttcacgtggccctgaagcctctatgcacccgggctgttgggtgcaggaagcactggtgttgaatcatgaaggtgatatgggcttctctgagcctggatcccacatttgcagggctctgggaggcttgtcacctaaatgcacatgctcagggcccttaagaaggccagggttgccctctgctggcagatcatggtttagctcaggagtgcggcttccccctcttccccaggatcagggcccttctcttccccaggaatcaaccctgcctaccggactgaggatgccaatgaggacaccattggggtcctggtgcgcttgatcacagagaagaaaggtgaggagaaggtctgaccccatcccagtgcccaggagaggagggtttcctccaggagcctgtgaggcagccgcggtgggcagagtcttgccctgctctgccttccctgccagggtgcctcaagcagcctggtgctctctgacccaggagtgcacacctctgcctcccattcttgcctgatgaagtgggaggaaaaggcgcacagcccaggctgggagtggtggtatggagggtaggtggggggttctctgctggggcagggggtgggaggtgtgtcccatatggccacagtgagggtctgactgcagctacccacagagaatgctgcggccctggaggagctgctgaaagagtaccacagcaaacagctggtgcagacgagccacaggcctgtgtccaagtgagtgggctggtgggagataacggggccaaaacctacattaaccagcctgcctcctggggatctcccacttgggtctccctcaagtcaccctgttccctgctggggtctcctgcccctggcctggcctatggccacttctgcctgtgccccctgcaggctgccgccagcgcccccgaacgtgccacacatctgcccgcaccgccaccatctccacaccgtgcagggcctggcctcgctctctggcccctgctgctcccgctgtagccagaagaagtggcccgaggtgctgctgtcccctgaggctgtagccgccactactcctgttcccagccttctgcctaacccgaccagggttcccaaggccggggccaaggcagggcgtcagggcgagatcaccatcttgtctgtgggcaggtgagatgggcacagatgcagcaggggcaggtaaagacgtgacagcctgggggccgggagggggaggcagggccccagcttgggccctgagcaccctgctcaatgggagccctgcccttattgggcctctctgggcagtggaggcggccagagagatcaggactttccggttatgttgtgtctcacatggagcccttgcatccctagggcagcatcttggcccccatggcacccgggcctctcaggctaaggctctggtccatgaacttgctgtgtgaccccgggcacgtgctgccttctctgtgccccgggatccccgctaacggggatgattgccccactctcctcacaggttccgcgtggctcgaattcctgagcagcggacaagttcaatggtgtctgaggtgaagaccatcacggaggctgggccctcgtggggtgatctccctgactccccacagcctggcctcccccctgagcagcaggccctgctaggaagtggcggaagccgtacaaagtggctgaagcccccagcagagaacaaggccgaggtgagagtcaaggagaaaggcatctgttggcacctgggccaaccctgaccgaagacggggcaggggtggaagtgcagcgggccctaggcaggggc

SEQ ID NO: 7864 - DNA, 2300 bp, Homo sapien
cgggagacggaggttgcagtgagccgagattgcaccactgtactccagcctggctgacagagcaagactctgtctcaaacaaacaaacaaacaaacaaacaaacaaaaaagaattcagatataaggaaaaccagtgtgtctaaaatatgttctagggaaggtaggactttggcttgagtttgaagaatgagtaagagaaaaggagaaaatgggtgtggaaagaccagaaatggaaaaattttgagaagacgcattgaaaattgagaaaattctcccttccaactttatgaattggaagtgactactattatttgttttaatagtggaactattaaaaccaggcaggcacagtgctgaagcatgaatgagacaatgggaagccatggaaagcatctaggcagcaaagaaaggttgttagatttggaaattatgttttttggaagtagcacagcttaaaaaattgtccaggtgtagtgtggctcacacctgtaatcccagcacttttgagagctgaggcaggagggtctcttgaggccaggagtttgaaaccagcctgggcaatatagtgagacgacgtctcttacaattaaaacaaaacaaaaaagaaaacaaaaaacagtcgttatgtgctccttttaaacaattcaaacaatatgaaaacaaaaattacagtcgggcattgtggctcatgcctgtaatcccagcactttgggaggctgaggcgggcaggtcaggaggtcaagaaatcgagaccatcctggccaatatagtgaaaccccatctctactaaaaatacaaaaattagctggatgtggtggcgcgcgcctgtagtcccagctactcaggaggctgaggcaggagaatcgcttgaacccgggaggcagaggttgcagtgacctgcgatcgcccccactttactccagcctggctatagatccagactccgtctcaaaaaacaaaaaaaacctacgtgcaatctgacaccctttcccccaagataatcattgctaatattttggcgaacctctttcctgaaatctctccatgcttgtagaatattgtgtcaaacctcacataaatgcactcgtgtagacatgctgttgtgtaatcaactttttccccgaagaataaattgtgaatagcttttcatgtcaatagatttatatcattttaaatggctccttagtattgcattgtatgtatatgtcacgtcttatttaagcagcaccctatcgatgaacatttactcccttcataattaactacgtcatataacaactttgtgcattcatcttttcgaaattgttcgatcatctttttaaggtaaattcttaaaagtaatggagctgggtcaagaagaggatatgccctttgtcgtttggattcaagttgccgaatcgtcctcaaatttgcagggagaccagcgaggaagctccggcattagttctggtgagagacagctgaaacggagatggcgagggatgaacagaatcacaggtgatctagcccatcaaggcccatcctcggtgggctggcgtattccttcccttttgcctctctttcacttctttttcttaacatggaggaagaaccgagaactccatctcccagcatttcgcagggaccacactccctgggaactgtagtaccgggtctgagaagggtccggaaggagaataggaagctgaggggcatgctgggaggtgtagtccagagacagagacgagagggagagggagagagggagagagggagagagggagagacagagagtgtgtgtgtgtgtgtgggcggggggaggggggtgtctatgcaaagaggatggagacgctgcgagtacggccccttggggatggggcctcgggcgacctgactttcctcacaggtggtctttgagtctacaaaattcgccagcggatggttggctttattccactgtccgtgaccggagagggcgcggcccctctgcaccgggctcgcggcgggaggcgcaggccgcgcgcgggctaaagcagggcatgccgggagttgtggtcccggcgctctgaggctgtgggacgtgtcgcggcgccgcgccggctcctccttccctgcccttctgagcggtcccccgcctcctccctccgcctcctcctccctcgcccgcagccgagcgtcccctccccccacccgtcgggctcctcggcggctactgcagaggattcagagccgagtcgctgaggaggaggctccggtccccgcgcgccatccgccaccctactggacacgggcgagagcgtcgccgccgtagcctccggaga

SEQ ID NO: 7865 - DNA, 2300 bp, Homo sapien
gtggctcacacctgtaatcccagcactttgggaggccgaggcgggcagatcacgagctcaagagatcgagaccatcctggccaacatggtgaaactccatctctaaaaatacaaaaattagctgggcatggtggtgcacgcttgtagtcctagctactcgggaggctgaggcaggagaatcacttgaacctgtgaggcggaggttgcagtgagccgagatcacaccactgcactccagcctggtgacagggcaagactccatcaaaaaaaaaaaaaaaaatacccactgaattttttactttaaaagggtgaattttatggtaggtgaattacatctcactaaaattatcactttggccgggcgcagtggctcacgcctgtaatcccgctctcagggaggcaagaggcgggaggatagcttgagcccaggagttcgagacctgcctgggcaatatggcgagaccccgttctccagaaaaaggaaaaaaaaaaaaagacaaaaaaaagcgtaaaattatcactttaaagtgttttcttttctttttttttttttttttttttgagacggagtttagctcttgttgtccaggttggagtgcagtggtgaaatctcggctcaccacaatctctgcctcccggttcaagcaattctcccgcctcagcctccctagtagctgggattacaggcatgtgccaccacacccagctaattttgtatttttagtagagatggggtttctccatattggtcaggctggtctcgaactcccgatctcaggtgatctgcccgccttggcctcccaaagtgctgggattacaggcatgagccacagcgcccggccatttaaaatgttttcataagcacttttacttttgctcaaattgcatcttgatataaacttcaagttttttaaaataaagataatataaattattctcattatattatactctctagaaaatgtaagtagtaaatttgaatttgatgagccagtccactatttcctaaacaatgtattatctgtgggctgttcattcaccagggacacttgaaatggcaaaatcttttcctctctgccaatggttctgtgcaccatagccacaaagaaatgtaaaagttacttgttggcttattagtctcaataagttttagttgattgaacaaacaaagtctctcacagccaggactgctgcggctggaattcctgacatactgtcatacctctcactcgtcaatctacactctcctcccatctacacagctctggaaattaaaaacaatccaaccatgactatcatggcttcagaggtctatgaactcccaggaattatacgcagattttttcctgaggacagtctacacttccttattggcttctcaaagagggtcactgaccagcttttagagacatgggccaagtccggctacgtttagattcggtagtagtgtctgtggttttagtttgccacgtcctttcctctttttttcgtcatagtgcccgctctttgggaggtaggggagagtcttcccctgaagtctccactgctgctggagaaccttcctttttcatctggttgctaaatccagagaatgaaatctaggagatgattgcaccgtccccgcccctcaacatgaaggatgccccactgcccatcggggaggggagcagggagagctggagagaggctgggtcggggcaggacccaggcgcagatcctccgaggccagctgcagccctacctacctgccttcccgtctttcccctcccttcttttctccttctgtctttccttccttccatatctctttccttgcctctttccccctcccactgcttcctttcttccttccactgtggaggtggaaaatttagctaggagaagctgggactgggacgttccaggaaccagacagagagtgagttaaaggcacagagatgaaaacgcggtatgggagagctggttcttgagtcggctaagaggggatgaactcaatggttaataggattggccatggcgaatccctcagcagggcacgcaccgcacaaagggccgaggagcgagggtagctcgaggtcaggattacagagactcaggagcaagagaggaaggcttaaagagccagactgcgcagccaggactggggtgatgggcgctgtcctgccaggccaaagaatgaagatgtagccccgcccccaacctagggaggaggaccagcccggttcctgtcctgcccccgcaacctcgccccgattccactccgggaacctcggcgatgctgagccaagaccacttctgaa

SEQ ID NO: 7866 - DNA, 2300 bp, Homo sapien
agattcggtagtagtgtctgtggttttagtttgccacgtcctttcctctttttttcgtcatagtgcccgctctttgggaggtaggggagagtcttcccctgaagtctccactgctgctggagaaccttcctttttcatctggttgctaaatccagagaatgaaatctaggagatgattgcaccgtccccgcccctcaacatgaaggatgccccactgcccatcggggaggggagcagggagagctggagagaggctgggtcggggcaggacccaggcgcagatcctccgaggccagctgcagccctacctacctgccttcccgtctttcccctcccttcttttctccttctgtctttccttccttccatatctctttccttgcctctttccccctcccactgcttcctttcttccttccactgtggaggtggaaaatttagctaggagaagctgggactgggacgttccaggaaccagacagagagtgagttaaaggcacagagatgaaaacgcggtatgggagagctggttcttgagtcggctaagaggggatgaactcaatggttaataggattggccatggcgaatccctcagcagggcacgcaccgcacaaagggccgaggagcgagggtagctcgaggtcaggattacagagactcaggagcaagagaggaaggcttaaagagccagactgcgcagccaggactggggtgatgggcgctgtcctgccaggccaaagaatgaagatgtagccccgcccccaacctagggaggaggaccagcccggttcctgtcctgcccccgcaacctcgccccgattccactccgggaacctcggcgatgctgagccaagaccacttctgaatcagggatgacttgtctagtgaacctagggtcagagccatcagttggaaaggctgggaggagcctggagaaagagggcgaccttccttgggatctgtgcgctccctccttgcctccccctccagcctcccacttggtagcaccttcctgatccccttatctctaaggcgctcagggaaatgccccgctgcgggagccttctgggaaatgctgccctggccacccaggaaccatgagccctgcagccccggtaaggaagagttctctgggacaggaggaagggcccagggcagggtgggcacccttgccacataggggacgggacagaagtcttttaggccctgacatcctctggtctctgaatgacatcctgtggctgctggtaggtgagggtttgcggggctgagctattgaaggaaatgatcacagtccgaggtgatagatacagaaagtcttcctttctccaggtgggctcccgccagtccattcttcactgtgccctagaggggcctttccgaccccctaatcacacacctcactcctcatcttgaaactcccacccccagctccagtcactgcgtcctaacatccaagctctccgcctgtcatgcaaggcctctgtgctatttctttccaaaccctgcagctctatcgcctgacactcccgatgccctccccacccctgcgctttatgttctagacacacggaaatgctgggcactcttcaacatcctgacagtattcataggggaaatttcgggtcgcctaggaaactgcccctcatcctccaaggcccctttcagcctcctctgggaagccttcctgaaccccttgagaaaagtcaggctcatcttttccattgttaaatcacaccttgtgctccaattgtgtgtttccatgtaatctccctcactagactggaagctggggatggaaaggggaagcatcaaaaaaacatgcaaaactaggagcttggcttctccttgcaactttactttttctttttttctaggaactgagttcaatgattcttaagaaaaagtatttcatgataaatgagtgaacaaatgtcttaatagaaaagtaaaattgcaggcggggctgcttctgcccagctctacaggggtagactacaagtcccagtacgcctcgggtcagcatctcttcacgtcactccccctccctggggtgggcaggtccggagggcggggcccgggggcagctgggctctcaggcgctgcgggaggagagaaatgccccaggctctccggggcacacaaagcgcaggcgcagcgggttgggtggcagcagcatcgagtagcggccgcttaggcagcaacatccgcaacaagtgtagacaaggtgggtgcatcaaggggaggggctggaaaaggagtctgcacctgaccctcttgtctgatctgtgtcaagacc

SEQ ID NO: 7867 - DNA, 2300 bp, Homo sapien
gtgtatcgagcttctgctatgcatcagacccaatgggaggcaggaggtgaacaagacagaaagaggtcctgccctcatttcagggggtagacaagaaaaaggtggttgtaacactagggactgaggctgaggggacttgggagtctgtctggggcttctattcccagcaggctctgggatcagcctgcctagtgcatctggaatatcgtacaggctccatcctccgccgctggaagcggaactggtttgccctgtggctggacgggaccctgggatactaccacgatgagacagcgcaggacgaggaggaccgtgtgctcatccacttcaatgtccgtgacataaagatcggcccagagtgccatggtgagcagaagccccttcctctgtggcaccgtgactgtgggcagagcctcccgctgtctccgagaacacttgctgttggaagtctttttgcagctttcagaggcatttcacagacattgcttctgagcctctgtcaactccaattcagtttggtgtgagttaagaaataggtccttggctgtgtgtggtggcgcatgcctgtaatttcagcactttgggtggctgaagcgggcggatcacttgaggtcaggagttctagatcagcccggccaacatagcgagaccctgtctcttaaaaaaaaaaaaattggtgagatgcggtcacatatggctactggggaggccgaggcaggagaattgcttgagcccaggaattcaaggctgcagtaagctatgatcccagtactttgagaggcatgtagattacttgagtctagagttcaagaccagcctgggcaacatggcaaaaccccgtctctaccaaaacaaaaacaaacaaaaattagccgggcatggtagtgtgtacctgtagtcccagctacttaagaggctcaggtgggaggattgcttgagcctgggaggcagaggttgcagtgagtgttcatggcactgcactacagcctgggggacagagctagaccctgtctcaaaaaaaaaaaaaaaaagaaaaagaaaaatcagtcctttagtgcctttctcctctgtgctgtctcagaggtgagccaggcacagttcctgccctccaggcgctcggtactggatgaagacgaaatgaaattaggaggcccagagaagcgaagtggcccagagtcacagcaaatctccacattcctccaccaaggcccaggccacagttctaacagggtaactgggaggtgtgctgagggaagcctcagcatggaaaggttggaaaggttggaaacgtagagtggaatccctcagagagtatatgggatcagaggaggttggcagtggccagtaaacagagcccagagaagtcaattcctattcctgtccctgctttactggggggacctggggcttgtgcctgtggaaacccatatatgtgtgtctgcttccagatgtgcagcccccagagggccggagccgagatggcctgctgactgtgaacctacgggaaggcggccgcctgcacctctgtgcggagaccaaggatgatgccctgtgagtcactcccaggagaggatggggtggaatctcggggaaagttaccatgtgcccccttctcattgggccttctggttctctgaccgtaggaagagggcactaaggccagtcagcaagggagtcttattggaggcgggtggagtggatttgaagggcttgtggtgactggcatggcacacagtgaactcctcatgtggtctacagtgaactcaggattgctgagggggaggtgtgcacacctgcctcaggtatctggttcctggtctttagcggcctctgaggtgagccctcacctgagggtgatgcaaagcagcagagcagcctagtggcacccttgctcccttcttagaagatgccctggtgggggactctgatctgaggggtagccctggacctgcctacaaaggcagtcagctgcgtcccaggcaggggcaccccaatgtcagatgcatatccacgtggccagcctgggtgtgtccttctcaggcaccatctgctggctcacattccgtcccttcctaccctctggctaaggggtacatggcctttgcgctggaggagagtgaaagagatgggtgtgtgggagtgggggaagctgagctccaggcagacagcacagagccgccttgtccaacccagccaggtgccatggcaaccaacaaaggccccattgtcccgtgtctgctgggccttcctgaggctctggggtcagagctttggggaagtgttttgtttgtagatttggg

SEQ ID NO: 7868 - DNA, 2300 bp, Homo sapien
aagaaaatagctactcacttttgtttgcataatctttttaaaaagtttcttggtttaagctgctctttgtatgtgccagggttctgggttaatggtggagaggaccctattagatctgacaaactacttgtaaaatcaaatgtccatgctacaagccaggtttttaccattttattttagatgcatgttctacctgcacatggctgggagaggaaccagaagggagtaaattttgatagagatggtttgaggatatagctgttgtcttgataggccagaatagatgatattttaagaactttggttcttccctgtaatttattctaggtcagcaattcatccctgggcctgagaaggcactttttcaatcctgtcatttctacagctaagcaaataactccccaataatgagaaaaagtacataaatgttttgtgaatgatatacacaaatgatatacatttgtgtatagacacaaatgtaaggacatattttttattattcacttagaaagtttttttgttttttttttttttttttaagacagggacttgttctgtcacccagatttcagtgtagtggtgccatacctcagcctccaactcctggactcaagcaatccttctgcttcaggctcctgagtagccggaactacaggagcacaccacgatattcggctattttattttttgtagagatagtgtcttgctttgttgcccagcctggtctcgaactcctgggctcaagcgattctaccgcctcggcctcccaaagtgctgggattacagacgtgagccaccgcgcccagctgctttatggatttttttttttggagacagagtctcgctcttgttgcccagactggagtgcaatggtgtgaccttggctcactgcaacctccgcctcccgtgttcaagcgattctcctgcctcagcctcccaagtagctgggattacaggcacccgccaccacaccacgttaattttttgtatttttagtagagatggggtttcatcatgttggccaaggctggtctggaactcctgacgtcaggtgatccacccaactcagccttccaaagtgctgggattacagggatgagccaccacgcccggctttttttttttttttttttttttttttctgttgagatggagtctcgctctgtcgccaggctggagtgcagtggtgtgatctcggctcactgcaacctccgcctcccgggttcaagcgattctcctgcctcagcttcccgagtagctgggactacaggcgcgcgccaccacccccagctaatttttgcatttttagtagagacagggtttcaccatgttggccaggatggtctcgatctcttgacctcgtgatccactcgcctccgcctcccaaagtgctgggattacagccgtgggccaccgcgcccagcccgctttatggattttgcaagtcatttactccctctaagcttcagtttcctcatctgcaaaattgggaggccatgattctggcagttataacattcctgggagcaatggaggagaatgttatttagtaagatgcctgtgaggaattatgatgagaggatggagaaggtggggtgtgtgcaatggtgaagaagggatctgaggactgtgaggcacggctgagggctcaggaaagaggctcccattacaaattttaaggctataggaccccacccacactttttgggggatcatattccacctttgtcccggccccgcctccgccccacccttctccccctcccctttctttccttcccctcccctcaggctgagaggcgccacacttcttatggccgccacagtgctccgctttccacagctcgagggctgcgcgcgctctcacgctgccacctcactcgcgtgtgggctcgccctcagccccttccgattggctcattatgtaagtgacgtaagggctccagcctcccactaacttatccctggcttgccccgcctcctcctggcttcttttgacgccagtggaaacctaacctgccccgtcgccgccgtgcgggaggagccggtagagctgtccaaaccaggaaggcgatggcgatggcggtggcgcgcacgcatgcacgcacgcacgcacgccagcggccggcggggccgcaggctcgcgcccgggctcgccccgcgccgctccagaggctcgcgcactcagcaggttgggctgcggcggcggcggcagctgtggaagctcaggcgctgcgcgtgagaggtcccagatacgtctgcggttccggctccgccaccctcagcttctcttccccagg

SEQ ID NO: 7869 - DNA, 2300 bp, Homo sapien
atattcctttaaaagtgctctagtgaatccagtggagatctagtggagaagatacataagtgaacaaatagttacaatacattgtattgagagcataagaaatgagctgtggaagtgcagagaaaggaccacattattttcgtggagtggttggaaatggctacacaggaaaggtaacatttgacttgtgtctggaaagaagagtaggagttttccaggtgaatgaataaagaaaggtcaacagaaatattgtaggagcaaaggcagggaggtgtgatagagaatatcatgattggagaattacaggatttaatattggctatggagtaatatttgtgttgaaaagggtggaaaggccagccaggctcagtggctcacacctgtaatcccaacagtttgggaggctgaggtgggaggattgtttgaggccaggagttcaagaccagcctgagtaacaaagtgagaccccatctgtacaaaaataaaaataaaaataattagctgggcacaatggtatgtgcctatagtcccagctacttgggaagctgaggtgagaggatcacttgagcccaggagcttgaggttgcagtgagcaagatcacatcactgcacttcagcttgggtgacagagcaagactctgtctcaaaaaaaaaaaaaaaaggctggaaataaggctagataggtagatggggattagatttttttttttttttcgagacagagtctcgctctgtcgcccaggctggagtgcagtggcccgatctcggctcaatgcaagctctgcctcccgggttcacaccattctcctgcctcagcctcccgagtagctgggactacaggcgcccatcaccacgcccggctaattttttgtatttttagtggagacggggtttcaccgtgttagccagcatggtctcgatctcctgacctcgtgatctgcccgcctcggcctcccaaagtgctgggattacaggcgtgagccactgcgcccggccaaaaaaaaaattctagttgttttgggaatccttatatcttcgtacaaaggactaaccgtctccttcttccttctttttccctttcccttcaccttacctaccccagagagtgtattaatgcaaagatggatttgtatcttttttttttttttttttttgggatggagtttcgttgtcgcccaggctggagtgcaatggcgccgtctcggctcactgcaagctctgcctcccggattcaggcaattctcctgcctcaggctcctgagtagctgggattacaggcatgcaccactacgcccagctaatttttgtatttttagtagagacggagtttcacagttttggtcaggctggtctcaaactcccgaccttgtgatccgcctgccttggcctcccaaagtgctgggattacaggcatgagccaccgcacccggccatgtatcttattagattgtatttacctggactagacaaggaaagaaactctctggctgccaacctgcccttttgcaaacctatagtcacagtcccataaaatagatgaagcacaggcacggaaatgaaacagctcaccacttatataacattatgttaactaggtaccttcttcctgtctctgttcctcatctgtgaaatgggtataatgatcctcagcctcatagggttattggaaagactaaatgaacccatacacccataaagaaccgacctggcacatactagcatttgattgattttttttttcttatttaaaatttcacttctaaaaccccaatagcatttattaggcaataatcaatcactgtactggaggaggtatgcctggtccattatatttccaagcataattaattgtcgtatctgtgttacctcagtactttgcacacaattctggtatttcacttaccatactagatactaattatttgttactagatactaattattttttgctattattttgattgagttcctcaaggactgagatcctgactaatttattccagcatctagcacaggacgtggaaatctgacttctaaactcaatttaagagatgattggctgggcctggtggctcacgcttgtaatcccagcactttaggaggccgaggcgggcggatcacctgaggtcgggagttcaagaccagcctgacaaacatggagaaacctcatctctagtaaaaatataaaaattaggcgggcgtggtggcgggcacctgtaatcccagctacttggagacagaattgcttgaacccgagaggcggaggtggcagtgagctgagatcgtgccactacactcca

SEQ ID NO: 7870 - DNA, 2300 bp, Homo sapien
gcccaggagcttgaggttgcagtgagcaagatcacatcactgcacttcagcttgggtgacagagcaagactctgtctcaaaaaaaaaaaaaaaaggctggaaataaggctagataggtagatggggattagatttttttttttttttcgagacagagtctcgctctgtcgcccaggctggagtgcagtggcccgatctcggctcaatgcaagctctgcctcccgggttcacaccattctcctgcctcagcctcccgagtagctgggactacaggcgcccatcaccacgcccggctaattttttgtatttttagtggagacggggtttcaccgtgttagccagcatggtctcgatctcctgacctcgtgatctgcccgcctcggcctcccaaagtgctgggattacaggcgtgagccactgcgcccggccaaaaaaaaaattctagttgttttgggaatccttatatcttcgtacaaaggactaaccgtctccttcttccttctttttccctttcccttcaccttacctaccccagagagtgtattaatgcaaagatggatttgtatcttttttttttttttttttttgggatggagtttcgttgtcgcccaggctggagtgcaatggcgccgtctcggctcactgcaagctctgcctcccggattcaggcaattctcctgcctcaggctcctgagtagctgggattacaggcatgcaccactacgcccagctaatttttgtatttttagtagagacggagtttcacagttttggtcaggctggtctcaaactcccgaccttgtgatccgcctgccttggcctcccaaagtgctgggattacaggcatgagccaccgcacccggccatgtatcttattagattgtatttacctggactagacaaggaaagaaactctctggctgccaacctgcccttttgcaaacctatagtcacagtcccataaaatagatgaagcacaggcacggaaatgaaacagctcaccacttatataacattatgttaactaggtaccttcttcctgtctctgttcctcatctgtgaaatgggtataatgatcctcagcctcatagggttattggaaagactaaatgaacccatacacccataaagaaccgacctggcacatactagcatttgattgattttttttttcttatttaaaatttcacttctaaaaccccaatagcatttattaggcaataatcaatcactgtactggaggaggtatgcctggtccattatatttccaagcataattaattgtcgtatctgtgttacctcagtactttgcacacaattctggtatttcacttaccatactagatactaattatttgttactagatactaattattttttgctattattttgattgagttcctcaaggactgagatcctgactaatttattccagcatctagcacaggacgtggaaatctgacttctaaactcaatttaagagatgattggctgggcctggtggctcacgcttgtaatcccagcactttaggaggccgaggcgggcggatcacctgaggtcgggagttcaagaccagcctgacaaacatggagaaacctcatctctagtaaaaatataaaaattaggcgggcgtggtggcgggcacctgtaatcccagctacttggagacagaattgcttgaacccgagaggcggaggtggcagtgagctgagatcgtgccactacactccagcctgcgcaacagagcgagactccgtctcaaacaaacaaaaaagtcagatctgtgctagacgctgaaaggaattaatcagacaggatctcagtcttttaagaactttcaaatacagagaagaggtggtaacaaatcattagtgtataatattgtaagcgaaaaattagaattgtgtgctaagtactggggtaacacagagatggtaattaattctttctggagaaacagcagtgaatgtgacaacctgagtgagggtggaaagcaggagaatttctagactctgaatttcagaagcttccggaactaaaatgatgtggaagttgagtgagtctcggtgggatattgctgctgcacctggtcaaggccgttccttcagtgttttcagacgccctgggaacgcggctgcagggtccggtcttcggtttgcacagctagaggccgcgcagcagcaaaggatgagcggaaccttggaaaaggtaacgtagattccacgcacgcggggcgcggggagatggcggacggtgcagagaggggagatggcggagggtgcagagcggggaggtggc

SEQ ID NO: 7871 - DNA, 2300 bp, Homo sapien
ggcgggaggatcacttgagacccggagttccaggctgcagtgagctaccgttgtgtcactgcactccaacctgggcaatatagtgagaccctgtccttaaaaaaaaaaaaaaactcagttttgtcagtgacaagttaaatgaaaaagagaaaataaataaaaataaaaaatagcttctcatcaaaatataccattataaagttaaaagggggctggaagctgtggcttatgcctataatcctaatactttgggaggccaaggctggcggatcacttgaacccaggagtttgagaccagcctgtgcaacgtggaaaaaccttgtctctataaaaaaatgcaaaaattagctgggcataatggcacatgcctgtaatcctagctgctcaggaggttgaggtgtgacgatcacttgagcctaggaggtcgaggctgcagtaagctgtgattgtgccactgaactccagcctgggcaacagagtaagaccctgttgttgttttttgttttttgtttttttatagacggagtctcgctctgtcacccaggctagagtgcagtggtgtgatctcagctcattgcaacctctgcctcccaggttgaagcgattctcctgcctcagcctctggagtagctgggactacaggcacccgccaccacgcccagctaatttttgtatttttagtagaggcgcggtttcaccatattggccaggctggtcttgaactcctgacctcaggtgatgcacccacctcggcctcccaaagtgttgggattacaggcatgagccaccacacccggccaaccctgtctcacaaaaaaataaaataaaataaaaataaagtaaaaagggaaggtacagagagggagaagatatttgcagcatgtacaaaggatcatgtttagaatatataaagagcctctacaaatcaataagagaaaggcagacaacccagtttttaaaatgagcaaaatacttgaataggcagattacaaaagatagtatccaaatagccagtaatcatatgggaaggtgctcaggctcaatagatataaagaaaatgctagttaaaatctcattgcattaccactaccaaaatggctaaaataaagaaacccacaagaaaacctgactatactgttttctaagtgttaggaagaatgtagagcaattagaactctcatacactgctggtggaagtctaaattggaaactactctacaaaactgtttgagagtgtctattaaaggtgaacctgttcatactgtgtaactcagtagttcagctcccaggtacacccccaacagaaatgcatacatatgttcactaaaagatacatactagaacattggttgcactactattcataacggccccatactggaaataactcaaatttccaccaacagtagaaaggataaataaattgtggcatattcatacagtggactagtagcacatgagaaggaaagaattgccattccacataatgcctggttgaatcttatgaacctaatgaatgaaagaagacggacacaaaagagaatgtatctatcattccattttcatgaatttcaaaaacatgcaaaataactctatggtttcataagtcaggatagtggttactaatttggggaaaggagatctttttagggtactggtaatgttctgtttcttgtctagggtactgattacagaggtactttcactttgtgaaaattcattgaggtgtaacttatttatgtatttttgcatattaatgcaataaaaatttactaaaattcaaacataatagattttaaaattctaattttagattaataagatatttacactattagaaaattttaaaaacagaagaaaatagtttaaaattctcattcctacccccagaccccagccacctagttccctcacaaacagccaatgatactagtttttgggggggggtttgtttttatttttgtttttgagacatggtctcactctgtcgcctaggctggagtgcaatggctcaatcaccactcactgcaacctctgcctcccaggctcaagcggtcttcctgtctcagcctcccaagttgctgggactacaggtgtgcaccaccacggctggctaatttttatgttttttgcagagctgggattttgccatgttatccaggctggtcctgaactcctaggctcaagcagtctgcctgcctcagcctcccaaagtgcaggaattataggcgtgagccactgtgcctagctgatactatttttgtacatgcttccagagatattttttaaatatgcaagca

SEQ ID NO: 7872 - DNA, 2300 bp, Homo sapien
tactcgggaggctcaggcaggagaatcgctttaacccaaggggcggaggttgtagtgagccaaagatcgtgccactgcactccagcctgggtgacagagtgagactccatctccaaaacaaacaaacaaacaaagtgaaagagtgcccaaatatgggtaggttttgacacatgggaaggatggaaagagttcactgtggctgtagcatacagtatgcagaaacctggcctctgggtctataaggtgagatggctttgtaaactatacaaaaatgtgaggtgtatttatttgcccaaactgtcttgcccgtctgcatcagaacactcagcagaaagcagcatacagaaggaacttaaggtttgaagagaaatgacttcagcctttgcaaaaatttcaccatgatgggctgtaaagcaactaggactccttattgccttaactgtgtctctcattcactcaacaaatgattaagtacctatcatgtaccaggcactatgctagtgctgaggattcaagactgtctaagtcagttaagttcctggcttcatggagtttacaacctagacaaggaaacagggcagtttactacacagtgtacagatagcaaagactgggaccacagtggagggatgcctaatccagacaagggcaggaataggcagggaaggcttcctagaggaagtgatttccaagctgaaacttgacagatggaacagaagttagccagagatgggaaaactatttttggtcaatggaagagcaggtggttgagatagaatctgacacatgagagcaaaaaaaaaaaaaagttcagtgatgggagaatacagtgtgagaataagacaatattaaactggcgatataagtaagtgatcatcacaaggctttgtaggacatagtagggagtttaagactttttattctgagggcaatggggaatcacaagagggagttaggcactttacacaactcatttgccttggaggcggtataacttaagcaagagggagaaaatgggctttgaaacagacttggacctagctttgtcactgcctcatttggtgcccttggacacatcatttaataacctctctggaagcacagagatgaagccgggtgccatggctcacgcctgtaatcccaacactgggaggctgaggcgggaggatggtttgcgcccagcctgggcaacactgtgagccgtgatcacgccactgcattccagcctgggttacagcgggagaccctgtctcaaaaaaaaaaaaaaagaaaaaaaaaaaggtaaggtttgtaaggaggctggtatgtctaaagagttcaataaatgatagttttctcttcctaaatacactgttaactctttaaatagggccaggagcaaataatttagagaaagaacagtggaatagaaagtgccttgatcctaaaccaagagatccgtgttcaaatcccagcactacgccttactatgtaatctttttcattttagttttcccattaataatatttaattcgcacaattagaatgaagattaatataacgaatgaaaagcgcttgggctactataggactcagtaaatgctgctgtactctcctctcaccaccttttggcttcagtctcctctggagtaaaatgacgacgacccctgctcagagatcagggtaggctagatggttggcagctggatcgtggaggctggcctaaacaaggaagtcatggaaaggatcttaaagcagaaaaatgctggcagccacgaggcctgaggcgcctcaggcgtatcgaggactttgaactttgaggacgcatgcgcgcgcgcggccgctgatcgcagccccgttgtgcccgcaacgcctcctgaagaacgcggtacgcgatgctcaccgaacaggtgggagaagagggcccgaacgcacgctcctacgcggcggcttgggtttcgcaggcggttggggatcctctgtacatcctttcaggaaccagcccctcgtggggagcgtgcacacggaaggggcggggaatgtgaaaaagtcacgttttcattggtggcctcttggtgttgagcccacctctgtcctcgccgcacgcttctcggggactcacttccgggaaggggcggaagaggtgggctggtggaggcggggtcgagatggcggcgcctttgaggattcagagcgactgggcgcaagccctcaggtgaatccaggcccagaacagagtcagaggaggcgggtagtggatgttgctttgcgtcaaggagagccatgcctggtccaggatatcaataggggttacttcgtc

SEQ ID NO: 7873 - DNA, 2300 bp, Homo sapien
catacagtacagactggtcaagcatgtttgcagactattatgtaaggaggctgggccaggagaaagtaggaagctttcttttaagggtattaatccttctcctttaaagtcacagcatatataattcatgggtattacctgggggatgacagctcagccaggcctccccttcatccttcctacgaagaaagacaaaagcctaattaggcttacccaaagttgaataggatcccatagttacaagggaagaaagaaggtcatgtaacctccagcttggtcatagtacttagacatgagatagtccaacctctcatcgagtatagatcattctaagacagacaaactttatttgttcaagaaatatttgtggattaactatttaatgaatagatatctgttggttaaattaatgctcatccatcaacagtgagctcactttgaaaaatcaaggttatttaattatttatcaggattattgtaaaccaagccctgtgctaagcactttccatacacaatcattaaccctcacaataaccaaacaagattccttttattattttagcacctgcccaatcatccaaatcctgatctcttcaccctagcacttttagggtataatggaaagggtctatgcatttaagacagaaagatctaggttgacagcaaccctctatcatttgacgagatgcatgatcttgggcaaattaagccttctgattctggtgctgtattttctcataggtagctagtggcacttcatgttattgttctttattacttatcacattctgtgtactagcaactagtctgtattttagcccacctaaattaagtaaggtataaatttagtaaggtgtaaatttcttaaatgcagaaggctatgtttcattcatcttcaccattgtttcaatttgaaaaacccttattagtagtagcagttgccaaatatagcactgctatattcatcctgaagcctagagaaataactggaatagtataagatcaataaatgttagatgaatgaatagtttgctgtgtattcctaattaagacgtcagcttttcttcttttttgagatgagtatcgctctgtcacccaggctggagtgcagtggtgcaatctcggctcactgcaacctccacctcctgggttcaaccgattctcctgcctcagcctcccgagtagctgggattataggcgcccaccaccaagcccgactaatttctgtatttttagtagagacggagtttcaccatgttggtcaggctggtctcgaacttctgacctcaactgatccaccaatctcagttttccaaagtgctgggattacaggcatgagccactgcgcctggcctggatgtcagcttcttgaagagcaggaaccatcacttatatttagagtatacatctgagctccaccaagcatccagtatggggcctggacacagtattagtttccttaatagtatcgtccagtatgcctaatatagcattaggggcctaggagaatacaaaggttccatcacatacacaaagtggtggtgagtacagagacttctggaagtaactgacgactaatcaatatttgctaaatgactgcttggccaaaagccttcctgcctcccagtatccctgtctttctccaactcactgatactagttctgacgcggggatcacacagctcatgtgctcccttggcctagggatagcttttcagagaatgaccatacgggtttgatacttctttttccggaccctgttccctccatatccctcgacaattgacgaagtaacccctattgatatcctggaccaggcatggctctccttgacgcaaagcaacatccactacccgcctcctctgactctgttctgggcctggattcacctgagggcttgcgcccagtcgctctgaatcctcaaaggcgccgccatctcgaccccgcctccaccagcccacctcttccgccccttcccggaagtgagtccccgagaagcgtgcggcgaggacagaggtgggctcaacaccaagaggccaccaatgaaaacgtgactttttcacattccccgccccttccgtgtgcacgctccccacgaggggctggttcctgaaaggatgtacagaggatccccaaccgcctgcgaaacccaagccgccgcgtaggagcgtgcgttcgggccctcttctcccacctgttcggtgagcatcgcgtaccgcgttcttcaggaggcgttgcgggcacaacggggctgcgatcagcggccgcgcgcgcgcatgcgtcctcaaagttcaaagtcc

SEQ ID NO: 7874 - DNA, 2300 bp, Homo sapien
agtggtgcaatcttggctcactgcaacctctgcctcctgggttcaagcaattctccagcctcagcctcccaagtagctaggactacaggcgcgtgctaccatgcacggctaattttttgtatttttttttgagatggagctttgctcttgttgtccaggctgaagtgcaatggtgccatcttggctcactgcaacctccgcctcccagattcaagcaattctcctgcctcagcctcccgagtagctgggattacaagcatgtgccaccatgcctggctaattttgtattttttttttttaatagagacagagtttctccatgttggtcaggctggtctcgaactcccaacctcaggtgacccgcctgcctcagcctcccaaagtgctgggattacaggcgtgagccactgtgccccgcaattttttgtatttttagtagagatggggtttcactgtgttagtcaggatggtctccatctcctgacctcgtgatccgctccctggcctcccaaagtgctgggattacaggcgtgaggcaccgtgcctgcacttttttttttttttttttgaaggtaacttgtagattcagttttctttatgaattggagttaatgatgtcaactcttaaggaggagggtggtttttgtttctgtgtgtgtttatttttatttttattatttatttatttatttatttatttttgagatggagtttcgctcttgtcgcccaggctggagtgcagtggtgcgatctccgctcactgcaacctccacctcctggattcaagcgattctcctgcctcagcctcccaagtagctgggatttcagacatgcgccaccacgcctggctaatttttttgagacggagtctcgctctgttgcccaggctggagtgcagtggcatgttctcggctcactgcaagctccgccttccaggttcatgccattcttctgcctcagcctccgaagtagctgggattacaggtgtccgccaccacgcccagctaatttttttgtatttttagtagagacggggtttcaccgtgttaagcaggatggtctcgaactcctgaccttgagatccgcccacctcggcctcccaaagtgctgggattacaggcgtgagccactgtgcctggcctgttcttatttttttgagacagggtcttgccctgttgcccaggctggagtacagttgcatgattatggcttactgcagccttgatctcctgggttcaagagatcctcccacttcagcctcctcagtagctgggaccacagtcatgcactaccatacctggctaattttttaaattttttgtagagacaaggtctcactatgttgcccaggctggtcttgaactcctgtgtttattttttaatacatggggtctcgctgtgtttcccaggtgctgaatttgaactcctggtctccagtgatcctccctcagcctcccaagtagctgggactctaggtgtgatccaccatcttgtttcttgtttttgtttttaaataacagctttattgagataaaaatgtgtgctatctatgtgctagttactttacatatattatttctagtatcacccccaaaacagtctatacccattaacagtcactttccaccccccaatcctagcaaccactagtttactttctagctctgtggatttgcctactttggacatttcatataaatggaatcataaaatacatggccttttgtgtgacttctttcacttagtataatgtttctttctttcttttttttttgagagtctcactgtgtcgtctaggctgaagtatagtggcacaatctcggctcctcactgcagccttcacctcccaggttcaagtgatttttgtgcctcagcctcctgagtagttgggattacaggcgcctgccaccacacccgggtaatttttgtattttcagtagagacgaacgaggtttcgacatgttggccaggctggtcttgaactcttggcctcaagtgatcctcccacctcggcctcccaaagtgctgggattacaggcaacttagtataatgtttctatttgttgtttttatcagtacttcgttcctttttgtggcccggtaatactctgttgtatggatatactacattttgtttatccattcatcaattaatggacacatatttctagtttttggctattatgaaggaaggagattttgatggcaggatagatggcatgagaaccagctgctgtggggaatgggaggggtgaaaggattacaaaactgctgagtttagaaacatgaattggattggt

SEQ ID NO: 7875 - DNA, 2300 bp, Homo sapien
ggcaacatagtgagaccttgtctctacaaaaaaataaacaaaataggctggttgtagtggctcacacctgtaatcccatcactttgggaggctggggtgggcagatcaattgaggccaggaattcaagaccagcctggccaacataatgaaaccccatctctactaaaaatataaaaatcggagggaagggatagcattaggagatgtacctaatgttaaatgacgagttaatgggtgcagcacaccagcatggcacatgtatacatatgtaactaacctgcacattgtgcacgtgtaccctaaaacttaaagtataataataaaaaaaaatctactaaaaaaaataaaaataaaaaaaaaatcagctgggcatggtggcacacgcctgtaatcccagctactccggaggctaaggcacaagaatcgcttgaacccaggaggcagaggttgcagtgagccgaggttgcgccactgcactccagcctgtgttactgagcaagactctgtctcaaaaaataaaattagctggatgtggtagtgtgtgcctgtagtcccagctgctcgagaggctgggatggaaggattgcttgagcctaggaggtcagggctgcagtgagctgtgattgtgccattgcattccaggctgggtgacagagtgagaccatgtctcaaaaacaaacataactgtgctccttttctatttcttattctctttttatttgagcttactgaaagatgattcatccatttattaatcacctactatatttcagccagtcttctggatactgaataaaataaataaaactgcccttatagatcttacatgctagagatgtgggactagacgtgatttgctgatgacttggatgttaagtatgagagaaaaggaggagttgggatgattcaaaaaattttggcctgagaagtaggtgaattgtgttccatttactaattggaggaggaggagttgtattgggatggggcaggggaaataaaagttttctttggacatgttcagtttgaggtttccagtctagcctaggtgttcactgcctaccagcaagcaattggatagataccacctgtatcaggacagaacctgaagtatgttgcttacaagtaaaggatccactactaagttagcagtccttttattccgaggaagcaaaatgaagaagaaaagtcttagaaaatgttagagttgatggatatatccctatagttcttcccaaacttatttattatggtttaattgacatagaacaaagtaaaatggaaagttggataattaaagccaaagtccctacttttttcttaataacttatgtgggaattattgttgctgggaatgtgtctggaattgcatatcttggtccatcatttctggagcatttgcagctggttgttttttaataaaagtgtacatgtatgcatgtgtataaaagatttgttattctgataatggcttatgcatgaagtgattgctgatactgaaattacaaaagtgaggctgggcgcggtggctcacgcctgtgatcctagcactttgggaggccaaggcagaaggatagcttgagcccaggagttcaagaccaccctgggcaacatagggggaccccatctctccaaaaaaaagttaaaaaattagctggacatgccagcccatgtttgtaatctcagctattgggaagctcaggcaggaggatcacttgttcctgagaggctaaggctgtagtgagttgtaatcatgcccctgcacttcagcctgagcaacagagtgagaccctgtctttaaaaaaaacacaaaaactataaaagtgagtttggaaaacaaaaagtgaatctgaaatttctctattctttattctgaaagatctatatctgtatattttctatagctatacctatatataggtatatgtggaaatatctgaactctttttttttttttttacgatgtttctttttttctttttttcttttttatttatttttttttttattgatcattcttgggtgtttctcgcagagggggatttggcagggtcacaggacaatagtggagagaaggtcagcagataaacaagtgaacaaaggtctctggttttcctaggcagaggaccctgcggccttccgcagtgtttgtgtccctgggtacttgagattagggagtggtgatgactcttaaggagcatgctgccttcaagcatctgtttaacaaagcacatcttgcaccgcccttaatccattcaaccctgagtggatacagcacatgtttcagagagcacagggttgg

SEQ ID NO: 7876 - DNA, 2300 bp, Homo sapien
cagtttgtaaaaaggatagtcaaatagaaaaaaatgggcaaaaacataaataggtgtttcacaatgaggaaaaacaaatggccaataagtatgaaaagatactcaaccaagaaatgcaaattaaaatccacaatgagatgccactttatgcctactatattggcaaacgttttaaaacttgacatcaagagttggtgagggccaggagtgttggctcatgtccataatcccagcactttgggaagctgagatggaaggatcacttgagcccatgagttcaagacctgtttgcacaatatggcaagacctcgtctctacaaaaaatttaaaaattagcctgatgtggtggtgtgtgcctgggtttccagctacttgcgaggctgaggcaggaggattgcttaagcccaggaagtcgaggctgcaggaggttgagccatgatcgcaccactgcactccagcctgggcaatagagggagaccctgtcttaaaaaaaaaaaagagttggtaaggatatgaagcaaaagaaactgatacactgctgttgccagcgtaaattagaaaaccacaccagaaaactttggcattgccttgcaaagtgggcgcatatacccaaatgttcatcaacagagagtactatacagcctgtgacaataagtcacacacacaaatacctaccatttgtataaatgataccatttatataaagttcaaaaatatgaaaaggtaaatatgttgctgtggatatttgcagtgtggcactggagctggcttgtactggcttgggaagaactggcaaatgccacaaaacagcacaccactgggtacaggcatatggagtaaagctctaaagaaaagcaagagaattacaaacaggtagggaggggcacatcggggcaatattccttcaacaaggaatgttctaatgctgctctttttcttcctaagaagaaaaaacaaatagaagttagctgggttgaggcgagggtctgtggtgggtggggtgggaggttctgagcagaggtagcagcagaggtgaatgaggagaggggatggctggtttgggcagtggcaggcactgcagtccattctgacaagcagtgggtgcgtgtagggcagtggtgagagctcaggtggaaagggaggcaccagatcacagagggcctgtgtgccatggtaagcagtttggagttcactcgaagtaatgaggagtgtgggctttgcagaacagagacaaggcaggcaggcccgcgaggaagttgttgtggtcttgctgaaagatgaatccagagctgggccctgattatgaggaggaagagcagaggagctgggcttgagaggttgtctaggaagcagaatggactgagcttggtgaccagttggatttgggatgtgcatggaaaacagggctctgctgtactcagagaggtggagcataactccctcactgtaagggtgggccgcacagtgactgccttccaaagagtgcaatacagcaagtggggaaggagggctggcgcggtggctcacgcctgtaatcccaacactttgggaggctgaggtgggtggatcacttgaggtcaggagtttgagaccagcctggccaacatggtgaaaccccgtctctagtaaaaataacaaaaattagccgggcatggtggcacatgcctgtaatctcagctacttgggaggctgaggcaggagaatcgctggaacccgggaggcagaggttgcagtgagctgaaattgtgccactgcactccagcctgggcgatggagtgagactccatctcaaaaaacaaaaacaaacaaacaaaaagaaaaacaccaaacaaattccaattgcaggacattctacaaaacacctgaccattattacttaaactgtcaaggtcatcaaaaacatggaaagtctgagaaactgtcacagtcaggaggcaccagaggagatgcaacagctaagtgtaacgtggcatcctggatggggtccggaacagaaataagatattaggttaaaacaactagtaaatctgaataaaatgtggattttagttaataataatgtatcaatattggtcattatttgtgacaaatgtaccatactaatgtaagatgttaataataggggaatgtgaatgcagtggctcacacctgtaatcccagcactttgggaggccaagccgagcccaagagttcaagaccagtctgggcaacatggtgaaaccccatctctacaaaacatacaaaaattagccaggcatggtagtgcacgcctgtgtctcagctacttggaaggctgaggt

SEQ ID NO: 7877 - DNA, 2300 bp, Homo sapien
tcaaaaatatgaaaaggtaaatatgttgctgtggatatttgcagtgtggcactggagctggcttgtactggcttgggaagaactggcaaatgccacaaaacagcacaccactgggtacaggcatatggagtaaagctctaaagaaaagcaagagaattacaaacaggtagggaggggcacatcggggcaatattccttcaacaaggaatgttctaatgctgctctttttcttcctaagaagaaaaaacaaatagaagttagctgggttgaggcgagggtctgtggtgggtggggtgggaggttctgagcagaggtagcagcagaggtgaatgaggagaggggatggctggtttgggcagtggcaggcactgcagtccattctgacaagcagtgggtgcgtgtagggcagtggtgagagctcaggtggaaagggaggcaccagatcacagagggcctgtgtgccatggtaagcagtttggagttcactcgaagtaatgaggagtgtgggctttgcagaacagagacaaggcaggcaggcccgcgaggaagttgttgtggtcttgctgaaagatgaatccagagctgggccctgattatgaggaggaagagcagaggagctgggcttgagaggttgtctaggaagcagaatggactgagcttggtgaccagttggatttgggatgtgcatggaaaacagggctctgctgtactcagagaggtggagcataactccctcactgtaagggtgggccgcacagtgactgccttccaaagagtgcaatacagcaagtggggaaggagggctggcgcggtggctcacgcctgtaatcccaacactttgggaggctgaggtgggtggatcacttgaggtcaggagtttgagaccagcctggccaacatggtgaaaccccgtctctagtaaaaataacaaaaattagccgggcatggtggcacatgcctgtaatctcagctacttgggaggctgaggcaggagaatcgctggaacccgggaggcagaggttgcagtgagctgaaattgtgccactgcactccagcctgggcgatggagtgagactccatctcaaaaaacaaaaacaaacaaacaaaaagaaaaacaccaaacaaattccaattgcaggacattctacaaaacacctgaccattattacttaaactgtcaaggtcatcaaaaacatggaaagtctgagaaactgtcacagtcaggaggcaccagaggagatgcaacagctaagtgtaacgtggcatcctggatggggtccggaacagaaataagatattaggttaaaacaactagtaaatctgaataaaatgtggattttagttaataataatgtatcaatattggtcattatttgtgacaaatgtaccatactaatgtaagatgttaataataggggaatgtgaatgcagtggctcacacctgtaatcccagcactttgggaggccaagccgagcccaagagttcaagaccagtctgggcaacatggtgaaaccccatctctacaaaacatacaaaaattagccaggcatggtagtgcacgcctgtgtctcagctacttggaaggctgaggtggaagaatcccttgagcctgggaggttgagactgcagtgaggtgtgatcctgccactgcccaccagcctgggtgacagagtgaagaccctgtctcaaaaacatgataatgataataataataataaaataggagaatgtggatgtgaggtatatgggaactctctgtactgtcttctcaacttttctaaactctaaaactgttctaaaataaatgtatttttaaaaaattagccaaatgcatttcttctaaaacctttttattaaaactaattactgctctctttaaaaacaaaaacaaaataaaacagagccctgtgagtcttcaatttccgagttgagtgacctttcacagggtcgcagaatcagccccagctctcccccagtcctttcactgactcctctctgtggcagagctgaaatttgtttagggaagtgggactacaactcccagagtgcacctgtgcggttgtcaggagcaaccaaggaagccaactaacagccttgctagagtctgaggactatccagggcctgactgccagctagccagccatgggccaggattattactctgtgctcgggatcactcgcaattcagaggatgcccagatcaagcaggcgtaagttggggtgggagccaggccttaggggtgtgctggggcaggccctgccctcttctcttccaaaacgagctttcctgcacagctt

SEQ ID NO: 7878 - DNA, 2300 bp, Homo sapien
accaccatggagaaaacccatctctactaaaaacaaacaaacaaacaaaaacaaaaaaacaaagccaggcacagtggtgcatgcctgcaatcccagccacttaggaggctgaggtaggagaatcgcttgaaccgaggaggtggaggttgtggtgagccgagattgcgccattgcactccagcctgggcaacaagattgagactctgtctcaaaaaaaaaaaagaaaaaagaaaaaaaatgaaaggggctttgcagtccaaaaatgccatacagtggaccttgcctccctacctgtctcagttcaaaggagccaagtgagtctacagggcatcgctcattgggaaaggtcaggctcagggtctgggcttcctcaggcagtgcccagaagctatactgccatagtgctccaccccaagggttcctgagtcccatctccctgcagggttgaggggctgggcttcctgtggactggctattggggtgtttactgcctggtacactgtaggtctgggtgaacaagtgaattcagcaatgcaacaggaggaccagaagattcaggcctcttgattgcccatcgcatcttagagggacatagtgtagtcacctcaccatccctgcctaaggtcatttcaccattctagcctgtgaagttcattccatggcattaaccatgagaggcagaatatgaaaactcttaaccatagcgcccctcgagtttacagcttatgaggggcttccacatctagcgatgcggcgtggcacagtggttaaggacacaggttccgtagtcatattgtcctgtggttcagatcccaactctactgcttactagctacgggaccttaagcgttttgtttgggctccctggaccaatgaaataataatgtaaggttccaaaaatagcacctgacgcatagtaagctctcagcaagttttagctcttcatcttaatggtggaaggcaggtcaggcattattaccccatcccacagaccaagacactgaagcccacggatcacacagcacatcaggggcagagccaggatggggctgtctttgcactgggaggaaggatgggggcagcaagaggggttatgggtgcagagctgggcaggggcaaaagaaattgaggaaagaggagtttggggaatgccggtggcctctcaaattgttagggaccaaccctttccctcccccatctcagctgacagctttatagaaacttgagtctggggtctttagcaatcttgggctgggctggacagcgaagggttatggagtctggggaagagtagagaggactggcaggctctcaccttcctgccgaggactaccagcagtctcttctggcactcctgagcgcggccaccagagggagtgcctccctttcctgagacagccagagttacggtatccgagttgtgaataagagagacggggaagcgttgggcggggtggggggggaatgtcccaaggggaggtgaagcagtgggaaatggcaaaggatgataatcactgcatctgcagttgaagacagctccttggcttggccagtctgagaggtggttataggatgctgggtgttacacaggacactgaagaggttggggagcatatctggatagggaggctgtgtgtgtgtgtgtgtgtgtgtgtgtgtgtgtgtgtgtgtgtgtgtgcgcgcgcgcgcatgtctgggtctctggatacaatttctcttactcctctccctacctcctgcagagttttttgatgcagaaggaagtgaggtagatttgaactttggggggctccagggccgaggggtcaagaagcaggacccccaagtcgaacgggatctctacctgtccctggaggacttattctttggctgcaccaaaaaaattaagatctccagaagggtgagtactcagcttgctcctcccgggagccacctatctcctgcagcctagcagctgcctcctcccttacctgggtgggaggactcagggatggtctctgatggaattatggaaccttagattcagagacctaggatgttagaattccggaatctgaaattcggaagggacagttgaagacattagcccggttctttcctagtgcaggagtgccctctgcagccttcccaactgggacaggctctttcccttcctttctttcagttcagccccatccccgtgggaactggaaaggctctgaatgggaggagtctcttctgaattcttccttctgggctttaccagaccatattcccaggatttcatcagggtgcatgcctcgtgcataagaaagaacagt

SEQ ID NO: 7879 - DNA, 2300 bp, Homo sapien
gaaaggcctgcaaggtaggggctgtaagctttaagaaacgggttcagagaggtgaagtgatttgcccaaaggcacacagctggctagtagcacactggggatccagaacaggtgtgtctgactccaaagcccacatgcttttaactactatgctgaaatgcttcctggagccctggtcccagagtcttcacctcaaggtctttgggtagctgacttcatggtgattttttttttaattttaagatggcgtctcttctgtcgtgcaggctggagtgcagtggcaagatctcagctcactgcaacctctgcctcctgggttcaagtgattctcctgcctcagcctgccaagtagctgggattacaagtgcatgccaccatgcccggctaatttttgtatttttagtagagacaaagtttcaccatgttgcccaggctggtcttgaactcctgaccttgtgatccacccgcctcggcctcccaaagtgctgggattacaggcatgagccaccgcgcccagcccatggtgatttttttaatgacaaaagtgctactgaacccccgttttaaaaaaaaaaccttaagctgatgtgatttgaatggtggagtcccaagcaatctggagaacatggggccttttctggcacctctgaaggcattccatggaattggctacctactccccgtaagcctggatctatcctcacccaagctcagactctagaagggaacctccctggcatggaaggggagcataacacacgtgttgactatgaggaggcaagtgtggtctacgcaggcccagttggacctggatgctggaactccaggccttgagggcagcagtgctgttaccccttcctgaatctaagcagtgagttcaccaagcactttcacatcaatgttctctgtcctcacaacatgcccgtgaggggggttatgggctctgctttactgacaagacaggtgtggtgactggtcccaggagaaagtggcagggctggggtcagaactcaggtttcctgcctcccagatcaccctgcccaggaccctatcacagaccaggggattgaggccagagaggtagaaccaaagctgtttccagtgcacatgtgttctttatgctgcttctctacgcagggcgagtctgtgggaagtgaccttcaaggtttttgggggttttttttgttttttgtttgagacagagtcttgctctgtcacccaggctggagtgcagtggcgcagtctcggctcactgcaacctccacctcctggattcaagtgattcgcctgcctcagcctgccgagtagctgggattacaggccctcgccaccatgcccagctaatttttgtatttttagtagaaacgggttttcaccatgttggccaggctagtcttgaactcctgacctcaggtgatccacctgcctcggcctcccaaagtgctgggattacaagcataagccaccacacccggcctttctagtttttttgagatggaatttcactttcgcccaggctggagtgcagtggtgcaatctcagctcactgtaactctgcctcccaggttcaagcaattctcctgcctcaacctttggagtagctgggattacaggtgcccaccatcacacctggctaatttttgtatttagtagagacgaggtttcactatgttggccatgctggtctcgaactcctgacctcaagtgatccgcccaccttggcctcccaaagtccaggcatgagccaccgcacccagccaccttcaaggttctgatgacagctttgccactgaggcctgagtgacctgcaatgaatgttttcttttgtgctttagttttcctgtctctaacgtgaccatatcatgctccagagattgtctcttctgtcatgaaaagccagagcagagctagagaccctcagaggccacacagccctgccccactctatcaaagtggaagcacagaggatctgaacccttacctgccctttcccacaaagccaggacagggactcaggcactcagctccttaggcctctttcttccctgtgccccacaagaagggctaatatgaagctcctctccaatgtactctcgtgggtgtagctggaggacaggaaatagatctttattatgtcagtttaagccctgcgccatcccacccttgtatcatatctgtgcagcaggctcccctgcacaccctgaggctgtggcgggtaggggtggggtgaggcccggctagcctcctctcacccctgctccagcccaccacagtcatgtcagcaatgcctggcgcagcat

SEQ ID NO: 7880 - DNA, 2300 bp, Homo sapien
tgttaaaattatacaacaaaatatatgaaactttgtcaatttggttattggcacatacaaaatatttacaaataaacgtgtgtgtgtgtgcgtgtacacacaattcaatgaaatagatgtgaaacaagttttcttttttttttttttgagacagagtcttgctctgtcgcccaggctggagtgcaatgtcgcagtctcagctcactgcaacctctgcctcccgggttcaagcgattctcctgcctcagcctcccgagtagctgggactacaggcacctaccaccactcccagctaatttttgtgtttttagtagagacagggtttcaccatgttagccaggctagtctccaactcctgacctcaggtgatctgcccgcctcagcctcccaaagtgctgggattgcaggcgtgagccacctcacctggctacaagttttcaaaatacatttatctgtacccatacattctccagtttgtccacaggacatcttatgacttgagcaagctgctaaaaatccaagggtgcagcgtttgtatgtctataggattgctcagatctgcccccaccctgaaagaatttaagagaatttcttgaggccaggcacagtggctcacacctgtaattccagtactgtgagagtccgaggtcagaggactgcttgaggccaggagttcaagagcagcctggacaacatagggagacctgtcactacaaagaataaataaattagccaggcttagtggctcatccctgtggtcccagctactagggaggcagaagtaggactgcttgtcccaggaggtcaagactgcagtgagctgagacccagccacctgcattccagcctgggcaacaaaaagagaccctgtctcaaaaaataagttaaataaataaataataaaaatagtttaaaccctaaacacatcttctttttcaaagaggacttcttaaggacttcatgctgcgtcctgttgatctccacttccctttttcagcgtccacacttttaacagtctcttttgccaaggataataagtatatagtttctggaatccagattcttccctgtttggacagccagggggacaatttttggtctgcaggcctttgcatctgttctgctgttgctcagcaatctcacagcaaatttgccgagcctctccggaatgcacagccagacagagctcagcgcaaaagctagagaacctggcggagggagactcacagtgccacaaaaaaactttatcttttctttttttttttcttttctttctttctctttctttcttgtctttctgtctttcctctctctctctctgtctttctttcctctctttctttcttttttcctacatggcaagatctcctcatggcagaaataatctgccttgacttctgtttccacgctgcttctgccaggaccatgcgctcggcgtgtttttctttccgctataattatccaggcccatcccagctctggtcccctcagctgttccctggcagtcccttctgctggtgaaaacacatatggcgccggcctgaccagggtgtaagtgtgtgaatatcaggaagatgactgaacgtctttgggactccgtttcctcattgtaaaatggaggttaataccagccttcttctactccccaaacgcacgtgtttgtcccggccagagggcccaattgttggctgttcacgcgtcagttacccccacaggacgggtcagccaattaaaggcgaaccaggcccggtccatctcctgacgccttttctcatcccagggctggacaggcagctggcctgggcccggctctgccttgtcacgtgcgggggccggcccgtttgcttgtctgtgtgtaggagcgtgaggtcacgctgggtgctcccgccccgccggggcctttagtgtcctggtccctaaacgccaggccgctccaccgggggagaaggcgcgaaccccagccgagcccaacggctgttgtcggttgccgggccacctgttgctgcagttctgattggttccttcccccgacaacgcggcggctgtaaccaatcgacagcgaggccggtcgcgaggccccagtcccgccctgcaggagccagccgcgcgctcgctcgcaggagggtgggtagtttgcccagcgtaggggggctgggcccataaaagaggaagtgcacttaagacacggccccgctggacgctgttagaaaccgtcctggctgggaaggcaagaggtgtgtgactggacaagacttgtttctggcggtcagtcttgccatcctcacagaggttggcggccc

SEQ ID NO: 7881 - DNA, 2300 bp, Homo sapien
cccaggctgagagcagcctctgataacacaaaaggaccctgagggtggagacctcccacctccacttcaaaacagtgtgttatttatcaatatcttatccccggaagttgaatctatctcccagtgccaactccgagataaatgacttgaccaggcgtgtggcatggattaaggcatgagataggtgttcccaccaccagaacgagccagtggctgcctctcttccctttgagccctccctccacagagacctgtgaataggtgtttctgatccctaggctggttgcatcccaacccagagcaggcagccttcggacttctagcatgggctggcctcaggacatggagccaaagcaggcagacctggccctgccctcaagctcccaagctaaagagagcctggccctccctcccactaggtttctccagagcctgctgcctcctggtttgggcttctactctattcttcccccacagactccctgcaatttactgcatcacctctagactagcaattacagatggagctcagaacctacttcctgagccttcctaatctcagcagccctgacagccacttccctcttaacactaatgcagctgcttattctgctgacattaaggtcagggcctggtccaaggaagaggacaggtacagcccaagctttgcacttgaacatccatgcttctgaccacctgccctgtgacgctggctctgtgccccagtccagaaaagacttctgcctactcctcctctgccctacccagttaactccctttccttccctcccttctgcttctcactcctcccctcccttctcttcttcttctccccttcccccatcacctggggcccgattcagctgtgcccagcccttactctgagtgcccacagatggagcctccagtagcttctgtggggcacccttccaccaggtcccagctcccttggctccagcagtgtccatgctaaagcctccaagtgtcatgttggagagaatggtggtcacagtagataagcccaaaatgccttacagtttacaggctggagtcaggccccgccacgtgctggctacatgacttccctgagattccatttcctcctcagtaaaataagtggtaagattttaggatccccagcactaaaaagaaacgaaatactgatacaggctccaacatggatgaattttgaaagcattactatactaagtgaaagaagccagtcacaaacaagcacatattggatgattccatttctaggaagtgttcagaacaggcaaatttatagagacagaaagtagattgattagtggttgcctgaggctggggagcgggggaagggaggtgactaccaatgtgtatggagtttttccagggtgagagggtgatgaaaatgttctaaaatagattgtgttgatggttgtgccactcagaatatactaaaaaccatttgaattgtgcacttgaaacagatgaattgtacggtatgtgaattctatatcaataaatctgtaatttaaaaaaaaaaaattaggtcgggtgcagtggctcacacctataatcccagcactttgccagactgaggcaggaggatcacttaagcccaggagttcaagaccagcctggggaacacagcaagacctcgtctctactaaaaaattttaaattacaaaaaaaaaaagtaaaaaaaatagaatcctaatagtacctatctcataggattgtggaaaatagtagtaatgtatgtaaaatatttagcacatagtaggcacaaagaaatgacattattattaagagacctgggagagctgtgcccagcctatcgtgggaggccttgacctttggactcaaaagtggcagcaggtccacccccccatacacccttgtcaccaaggaagcgtccacagcttaaaggagctatattaaagcaccccaagtcaagaggactgaaccagatctggaactcactcacctcccctctcacctcactgccctcaccagccagcctcttgtcaagtgatcaggctgtcaaccaacttctctaggataaggtttcaggtcagcccgtgtgtataagaccagtgccaagccagaagcagcagagacaacagtgaatgacaaggaggggccatccaatccctgctgccacctcctgggatggagccctagggagcccctgtgctgcccctgccgtggcaggactcacaggtaagacccctttctcctccctcatcccttcccctctccctctcccttctccttgttctccctttcattggaggctttcagagagcagcccc

SEQ ID NO: 7882 - DNA, 2300 bp, Homo sapien
gatctttaactcagagtgaatagaacctttcttggacatagccagtagtctttaaatgccgtgaagctaaggaattgaggctacttcactactatatatccagctgagcccaaggcatgacacacagagcagatacccagcaaataacgactgaatgagtgaattcaaaccagcttggggcccaagcctttctgccatctcactgccatctctgaaagttccctattaagagtccttcactgtccatatgcaagttctttcttttgtatatattatctaatgttatctttacaacaccctatgagtattttatcctcattttttttttttcgagatggagtttcactcttgtcgccctggctagagtgcactggtgcgatctcagctcactgcaacctccgcctcctgggttcaagcgattctcctgactcagcctctgagtagctgggattacaggtgcccgccaccacgcccggctaagtttttgtatttttagtagagatggggtttcgtcatgttgggcaggctggtctcaaactcttgacctcaggtgatccgtccacctcagcctcccaaagtgctgggattacaggcgcgagccaccgcacccagcctatcctcattttttaagctactgctagcattcaatttattttcaccccatttttcctaggcataatatatacttcatggtatactattgtatggatgcacattaatcttctgttaatgataaatcatctattaatgatcattaacgataatgaaaaggaaaaagtttttctttttttcttagaaatgaaattgcagtaagcatccaaatatataatatacatctttagtatttatatactatcttatgttaacctcatcttagtgaagaggaaactgagacttaaaggaggttgaataacttatccagagtcacatggtaagtaaatggtggagccagcattcaaacccagatctgtataactccaaattactactctctatgaagtacagtaaggttttaacaggaaggaacccagaagtctactttagggatatcaagaaatgcttcaaaaataggtgatttctttgcctagatgtcaactctatcgccttggggagtttagggaaagggggtttgtcccatactgtagctacacccaaatgacttgactactctttatgagtgtcgttaaaggcgtgtagattccatttatacatcatggaacatctgtgctgagaaagataaaagcagccccagacttctgggaattgggccaaaattcataggtaggctttggtgttttcttgttgaccataagtaatcttacagaacatcagcatcagacaagatcactgtatgactatgatgaagtgagacaaaaacaagacagctccatcatcatgtctaagcacagaccaaaacgaggtcacttatgcaaaccatagaaacagccaacatcctcctgtctggctaaaatgagtgacagctgctgcttcaccagttatagctttagctttactctagtattccctccgtctagataagattctttaagaaaatcaatccagagcaaagccctgctcctttaagccctcactcaagtcagctaacacaagtccaatgctgataagccctttctgatacttctcactgagatgtactatggttccccatggtgtatattttccttaattgcaatgagcagtaaacccagcttgttcaactagagttggttcctgtggtccttgacttaagagcattgacaggacagtgggtcatcctcagagtcactctgatgggcagatgttatcccctccactcccatatacatatgccatgatatctagattactaagaaagcccattgtggcactgccaaaagcctagatagaaagcatatagttggttttattcttggtggtctcatagaagtaatgaagttattttctagaaaatcaagctgatttctaatgttaccatggtatcttctcatttccacccttctcctctacagggctttggctgaacgggaacccgctctacagtttagtgccacagtcggggtcaatgcctctgtcaccactcatctctccttcctgccccagggagaacagcgccgaacccaccctgtggcctgttctttctgccctgagttctcccatcacgttgagttcacatgtaacttggtgactcagcactgtagtggagaggcctgtttcctagcagagttgttggagtttgcagaagttatttttgctgtctatcatgaaaataccaagtcaggtgagcaccatatgacttgtca

SEQ ID NO: 7883 - DNA, 2300 bp, Homo sapien
agtaacagtgtcttcactacctcccaaagtagtccttaccattattggacagtcctggtgttatacccaactgatttgaaatagtaattagtacctgtttgctattctgaatggccagactgaggagtcctgctggaatcgtggatgccactgtctgctgtaggctattagttttcctttttttcttaaattatgatattagtttggtctggtgttacccttcttccacttcacttctcattcctttgctgttctaaatgtagaatttattctaaatttacgatttattatttttcctatgaagggaacagccttctattcttagtatattaagagcttttatcaggaacaaatgttgaattttatcaaatgccttttcagcatttgtgttaatcatttttattgttccattaatgcactgaattacatttatggatttcctaatattaacccagtctcatagtcaagagtacatcctgtttagcctacttacagtgagtagttgtgagagttacaatgaaaattaagtgtctattttagtatcaactaattatacttatctctttatctatactcagacttcatagagaagcagaaatattctaagcaagttactctttaaagctcaccagtgtttctgtttcatttaataggcagaggaccgaggaaatggactgatggagcactgctttgagatccatatagagatggttaaagggctagcccctcttcaggcaacagtctggggagaagcagattgttatgtccagtactactttccagttcaacactctcaatccagtgtgctgaaaggacctgagttccttgaaaatggtaggtttagatattaggctttcttattcttatatggttcttttattagattatacttaagagttttttttttctgagtgaattttgtgttgttgaatatttctagtcttactgggcagtaaaacaggagataggccaagttttttttattttttaactatttttgtagctttttattttgatacaatttcaaatttacaaaaacctgtaaaaatagtacaaagaactttggtatactctttacctagttctaccaattatttgcatttgccctattttatatcctttacatgcccactcttatctatacacatagtataagttgattcttattcctcgcagtagttctgttctgtaaagccaccatgaacgctgaattaaggaatactgaaccactgttcctaagggaaatatgtacatatacatatctcacatagatcattatcttaactcctaaaacaacttaccctggtagactctgttttctttattttatgaaagaaaaaatgagattcacaagcattaagtgacttgcttggggctgccccactaacaagtgccaaggttgggattcaaaccccatcctactgtacccagattggaagcttctcactgcctcctactgtctccatcttctggtagtctcggagagctgaaacaagaagtcaaactcgctcacctttttctcacctgggaacaaacagaccaggtgactcgaactttttgccattcggtgtatgttccagaatgattgccagagtgctgccagtgttgattttgaggttcaaataagagatttgtatatacagaatatataaagaactcttacaaatcaatcatttcttaaaaaccaattaaaaagtgggcaaaggatctgaatagacatttctccaaagatatacaaatggctaataagcacatggaaaaatactgagcatcattacttatttgggaaatgcaaatcaaaactaccaagataccatttcatactagctaaggtggctataattaaaaaaaaaaaaaaaaaacctaacaagtgttggcacttgtatggcaatatatgaattgtccaccagcaaggtatctttttcttctgtattatcatgggaccttagggaaccataactactagggaattactaagtaatattcactggaagaacatgaaagaagaagaaaacactaagtcatatgttggattattctgaaatgcttttcttttccaaaggaattactctgaagcccttcagaactgcaaccacactctgtgttccagatcccatctttaatagtgaacaccatcactctctcctgttgccagctgaggttccagtgcaaaggctcctactaagtgctttctctgcacagggcctcgtgcctggaggtggagtccagtttgaaatctggtgcaggtacagtgtggagaccccagtcctatgcctaggaaggaagtgcacaatcataaa

SEQ ID NO: 7884 - DNA, 2300 bp, Homo sapien
gaattctggtatataattcattggagagagggttatttccttgtattcaggtgagttaggatttcttagatgacagaatctgagcgtgtggcttcagtatagctttgtcctggtgagttttaaaaatcagccgggtgcagtggctcaagcctgtaatcccagcactttgggaagccaaggcgggcagattgccggagctcaggagttctagaccagcctgggcaacatggctaaaccacatgtctactaaaaatacaaaaattagccaggagtggtggcacacgcctgtaatcccagctactcgggaggctgagacacaaaaatcgtttgaacccaggaggcagaggttgcaatgagccaaggttgcaccattgcactccagcctgggcgacagagcaagactctgtctcaaaagaaaaaaaaaaatcatcacagccatgcctaaaacatcctgatggctcccaatcacccaaaggataaagtacaaggcttaatatatgaccctggcctaccatttcaaccttctctcttacagcttctctaccaataactatgtcactctacgtaaagagtcagtaaggtatcatgctggttcatgcctctgtgtttttgttattgattatcatactgccttttcttcttgaaagccttgtctctcttcttggtcttagtaaataccactttgctttaaagacttacacaattattattgcaaaaaattaacatcacctactcttgctatccaagttatagtttttgtctgcctggttcattctgaactacaaagtttaaaatcagaaaggggttataaataggattgatcaactagaaattttttctgttctggctcttttgagagaaatactattctggatagattgctgtctatattcaacagagtaaaagaaccttgctatgtaacacttaggatttcagatcgaagaaacagcaagaaccttttacccctagtaattgagtctcctaacagttagtgaccacttctgttctttaaattcatcatttatcctgcttcccttttcttttttactttttaattatttagacttttttataccctttactgagactccccaattcttactatttgtcacattttctttataattgtctgtctgcctcttctctgcctctctctctctgtccctttatctcctccccccatacatgtacatacacatttttttgtgaactatttgagagtaagttgtacatcatgcctctttccccctaaattctttagtttatattttatgtatttccttagaacaaggacatcatcatgcataatactctagagttacaaaagtcagcatagcattgatactatatctgcaggctatactgagatttcaccaattataccagtgcctttatagcaaatatttttttctagtccaggattatctattgcattttgtcagatcttcctaatctcctttagtcaggaacagttctgcagcctttctttatttttcaatatgctgatatttttaagtaatgccagttattttaaagaatgttcctccactggggttaacctgaatcacttattactgtgatgattgtcaaatggtgatttctaactctaccgtctcttttgcatttattaattggcattctatatagagaagctgtttcttctctcatatttattttatatcaggatggattcatggattcttattcaatagtttataatccattactgttattcattctgatgcttaagttgtcctagatttagccagtgggagcctcttcagctggattctgggtcctttaaacatggctccattcttttctgggaactatcttatattctggcataacttgatcttccaggctcatcttttgttattgataaatcatctgtctagtttttcttagtctagcaagttaatgtatatgcattctgttaatattcttactattagagtgtttgaggatgagttaattcatttcctaataatctgatgttgtttccagcctcaaaattctaattccaattctaaaggacattcttattgactcttctccttttgtgttttacaggtaaccatggagcttattacagataacaaagatttcactggtatcaatactaagttaagtggcaacacccattataccccactttgtgctcctacaagtccaaataaggcactaccagaacttaaccaagatatgacctgtaccaaaaatccacaaaacttaaaccaaattcatgaggaaactgcaaagaaagcacagaacttggtgctccccaaccgaaagtcacc

SEQ ID NO: 7885 - DNA, 2300 bp, Homo sapien
gtcttaaattgtaacttttctttcctgccaagatcacacagtcagtgaggacacagactatctaatcttcagattctgccactatttttaacacagtgctgggttcatatatttattggctttagtatttattgggtttcataaagacattaaagtgtaaacaaagcaattaatcatgactttctaaaaaattttcctttaatgaccctgattgtctttcattcatagtaccttttcgggaaaacttaaaggagatttaagaaaccattcctatattatttataccttttttttcctttgacttttctttgaggagtggttatgcctcaaagaagaaaatatatggaatgtatcagatcaggactaattatttggacttctaatgcaaacaccgcctctgccctctatagtggagaaaagacccaccataatccttatggatagtttcaacataaaaattatacacagttgtgtatacatttctacatatggaaatggtatagcaaaaagtgtattctgttctatgctatgttatattatttctactttgactttccgattatcaaccaaacatgcttaactgttttgacacagggagcactagtatgcttcagtctcagatcctcctatctttcctggcaggaaagtcagtatctcaaaactgccttagtaatctttaaacagcttggataagagtaattcccagattgtagcttcagtcctcaacccaatggcctaatgtcctatcactgttcccaatacttcttttctcgctaaactgcctacaatgcaaaaaggcagggtcacccactgtcctttttcccttcgaggcagtcttgtagagattcaatgtcaagtttcctgatctgccctgggttcctaggttgactgttctcactgcagctaacatcccctactcggtgagcttgtgtctccttgagctgctaacctgatgaggactctctgctgcacactctttcatgatctcaggtccttcaggagatcgtcatgcccttacccccactccaatcctatcacacctgtcattccccactcttcccggctctatactctacaattatttttcccaactcctgctcatagtcagcccttcatacttcattcattcaactaacatttaccgagtcctgctttgtactaatccttggtcattcagtaatgtataaaacgtgattcttgcccacaatcacacaacaaatgatataatccctttgccaatttatgtttcttcctgtccctgtggacctcgaaagctacacacacacatacatttcacttcgttatcaaaaccaatcccatcattgtttgttcttctcctctacagtcatcctaccggtaaccttcatctcattaatcgcctgtctgtggcccctaccccagcccctaattcctttctattctctggagggccaattgcccttccttttaaccttctggttccctggctacttccttcttacgtcccttttcttgtttatccagcgggggtgcgggtctccctaaaattccttacaccctgctctcctattacgctttcctcaatctttgatcgctcaggttacctctttttttgcgcccacggctgcccccagacccttggccttttcgttgtttcatgatgagcccgagctcttcttcaccagctcaactccgtctccagcacctaagcagtatcctcccgccatccctccccacggcgcctgcgttccccggcaaccggcgccgctgggcagcctgggaggcaggaaaaagcgactcttcctctaacagtctccggaaaacggtgcgaagagaaggcgccaagacgccttccctccaatacactacaatacccaggacgctttgctacaatacctctccggggttggctggggggcgcctccagctgcgcaagcgcatagggatgcgccctttgtggactccattgcgcagggtgcattgccctgaagagcgctcctccttccggtgaaagtcgtcgggttcccagccgggagtctgcggagttctcatactctgttacccagcttcctttgtatgagtgctgttgcgcacttccggtggaagcgctgaagcgagtgggtggagtttacggagccggtgggcggtaggcggtgctacgggtagctgggtgctgtccaaaggcgacagggcgtcgttaggggagcgagtcgtgaccggttgggccacactcaacgtgggacgaagcttcgcctactgtttgactacgtgcgtgcagcctcccctcgatgtcggccctcgaaaagagcatgcacctcggc

SEQ ID NO: 7886 - DNA, 2300 bp, Homo sapien
ctcctgctaaagttttctcatttttctactgcgtatcatagcaggtctccactcaattcttagtttccttccctggtttttccacccatttttcccattcctttaccccactgttttataggattctcctttcttttcatccctaggacttactgtcacagtactgcatctcctactctcgcctcctttttgataagtttttacacatattacttcttcagaacctaaggtttctcttctgtagtcctttttcaaagaatatctaccaattcatctctagaatcccaaatatactctggagccctcatacctaagtatctttcctactccttttctctttacagtcactaattcccagaatcctgtttgaaactacaaatatcccctcaaaaccaaatgcctattcaattctctccactttccagcaattacttctcccatgttcacctcattctttctcctcggcccaagtatcccctaacctggcacaagccatttaacgatctaaaattccaaaacctatctcttctacatggctctccttcctttccagcaaactatttctcgaactcccaatgcttcactaattcaaagtcttaggccagtacgtcgcttccctcagatctactagcccagcaaaaactgattgcccaaatcttcctctaagcttcccagaccttacaactgcagcacttccattcaccaaaccgtatttatagtcatctctcaatctttagagcctatggtcactctgtaaattcttcagttctctccttcttctctctcccttatcctgtccagcttctcactctgtaaattcttcagtcctctccttcttctctctcccttatcctgtccagcttctcagcacattcctactacccttaacaatcttcgtggctatgttctccaccttaccttaggcctactccctaaactttctcattctcccttaagagacctaatctcacctctcattcgctgaatctgtctttacacctctgggaattctctagaatcgtctgcttcctagttctcctctttccttctccagccctgtctcgagtgttttctacccccctcagcttttctagtatctagttctcacagtgcagatattagaactctgataatatctactcctcccaaacctttccttagttgttggcccaattcccctcaacttttctctcagtcattccccacttccctccaccttccctggccgattctcctccacctttgtcaccgttctactcccttttctaagcctcctttattgtggaagtgattctcagatcccttatgttagtctctcagcttccccaacctttgcctcattcccctctcccttcaacaacgttatttttcctccaatttctattgacttggcgcctcccctagtaccccaatctgccttctactccatctaaatatctccaggccgccaacattttctcctatcagtagactcctttcccgtgcctctatgaacgcccagagataccattctccaacggctggggcctggcccatagggagaaggggtatgggtcacgtaccccattcgcatcttggctccgctctgactgcccccgctgccgggtagaggtgggcgagagggaaggcggccgaggtgcatgctcttttcgagggccgacatcgaggggaggctgcacgcacgtagtcaaacagtaggcgaagcttcgtcccacgttgagtgtggcccaaccggtcacgactcgctcccctaacgacgccctgtcgcctttggacagcacccagctacccgtagcaccgcctaccgcccaccggctccgtaaactccacccactcgcttcagcgcttccaccggaagtgcgcaacagcactcatacaaaggaagctgggtaacagagtatgagaactccgcagactcccggctgggaacccgacgactttcaccggaaggaggagcgctcttcagggcaatgcaccctgcgcaatggagtccacaaagggcgcatccctatgcgcttgcgcagctggaggcgccccccagccaaccccggagaggtattgtagcaaagcgtcctgggtattgtagtgtattggagggaaggcgtcttggcgccttctcttcgcaccgttttccggagactgttagaggaagagtcgctttttcctgcctcccaggctgcccagcggcgccggttgccggggaacgcaggcgccgtggggagggatggcgggaggatactgcttaggtgctggagacggagttgagctggtgaagaagagctcgggctcatcatgaaaca

SEQ ID NO: 7887 - DNA, 2300 bp, Homo sapien
gtatgtgtaataatttcctctgtgttactactctaaagaccacatattatcgaatctttgttcctgatattttccagtggcctctgagcaaaggcatcatggttttgacttcatgaaattactctgaattcacactaccctatgccaaggggagatggctttaccatttatgcctgaggttgcaattttttgaatttttgcaatcagaacttggtgatgaccttgggcagtaggatataaataactcccacatgcttagtgttccagtagtggaacactagcataaattggttaactcgttgaaacattgaaaatatgtttcagtgaggtaacaagaatctgcagctctttttacttggtagaaatgcaataatatttttatagacccagtgagaaaatgcaataatatttttatagacccagtgagattaattgattaatacagaaccttctagacagggctgctgaaggattacgttaggtgatgttataagaaagtttagagcacaactgaaaaagaagcactgaataagtattagttctcttttctttccttcatatcattttgtctcccagagagaattttgtgttactatagaagcagcactggtgtcaaagaagcttggacttttcgtcttaactatttgttatcgctttggatgactgcctgaactgcttcactttctgtcttaatcttaaatttaagtcgaacgaatattaaactatttgttttcacttacaaagtttggtggcctccctatctcccattcagattgtctacaattgccgaggctaccctattcactcctgcagttgttgtatgagattttaaaaatcagttcctacagaactaataacatttgcctttgccattataaatactgtagagactatatatgaaagtctgtgttcctaccttgacacttgctatatttggttaacactgtgtgagtgcttaaggtatgcagtgacactcaacaagacaaaactttcttttgaagttgaaccagccactcccaaaagaagggggtagaactagcctaaaaatatatatatataataaggcagtagagccagtgggtctccagaaacacaccttactgttcttatccacctattgctatagcaaggaaggcctacatgcaattaaaaaccaaacttcatacttcagttctaattttcaaagctttaaaattagactttgttaaataggtccattaataattgaagattagaaccaaagccaataaaatgagctctgaacacctttctagtttctcagagcactgtacttacatttatgttcatccttcaaacaaatgagaaattgtaaataataattaacatttgtgaagcattttactctttcgaggtgttttcttgttcccttctcagttaatcctcaaagcaatccagagcagtcagtgatatttttatctttttttatagatgtcgaaactcagtttctgagagattaagtaactaacccaagatcacatagtgaaaaataaactgaggctagggctcatcttgtgattctgaggtttactacattataatgcttaataaatttttgttcttgttttatagatgggaaaattgaaacagagcagttaaatgatttttccagtttcaatcttaggttcaaaataaaggtatatgtttatgtaattgtactacatatgtggaacagtgaaagtgtgatgtaaaggaaaattcagtaatttgggttcttagtcctttacctgccatttatcaggagagctaggtgtgtggctacacatattgatgctggggacatgttagaaggtttacataggtatgtttgtaagatggcccaatagacttttacagtttcccagcactgttacacaccaaagaaaggaactgggaaagaaaaccatttttacagtgttgtcagaaagcattcttagatctttttctcttctctttgcagagacgttggcaatgtggttgaagccatgtatggggaccttcctcctccaattatgctgattggacatagcatgggtggtgctattgcagtccacacagcatcatccaacctggtaccaagcctcttgggtctgtgcatgattgatgttgtagaaggtgagttttcttagcactgaccaaatcaggatttcacttataagagacatccttggtagattattaccttgtcttagtttattgttgatttcattcatcttgaaatatgtccctctgtctttatatcttttttaagtttatacaagataaccatttttccatgtcatcaaaaactcttcattaacatc

SEQ ID NO: 7888 - DNA, 2300 bp, Homo sapien
aaatgttgcccaacagaacagacagaagttagatgaaaatgataatggctttgagtgcttactatttgccaggcactgtgcaaggtattttatatgcactgtctcatttttaaaaccttatattatggaaaaattttgcacatataaaagaagagtgatacagtggatggaccccagtgttcccattgtccattttcaatggttattaacccataaccatgtctcatttgtttcatctgtgcccctatgtatttcccctagtcacaaaatattttgaagcaaattccaaacaaatataatttcctctgcaagattttcatatgatctaaaaataagggctctttaaacatcatcacgatgacattattacacgtaaaaaaattggcaattctttaatatcatcaaatatctaatcaatatttacatttctgattgtctcataaataattttttacaattaaagtcaaaatcaaaataagtagatagcaattggttgatccacctctcatgcatcttttaatctaaggttccacttctgtctccctcttttttttgattccttgcaatttatttcttgaggaaaccttgtttgccccatagaatttcccatgatctggatttgctgattgaattctcaggccataatttaacatattcctttgttccttatattctgtgtaaatagttaaatctagaagcttcatcgggttcaggtgttttgtttgcaagaatacttgataggtgatgttgcgtactgccatcaggaagtacataatgtctggttgtcttttttttttttttttttgagacagagtctcactctgtcgcccaggctggagtgcagtggcgcgatctcagctcactgcaacctctgcctcccaggttcaagcaattctcctgcctcagcctcctgagtagctgggactacaggcatgtgccaccatgcccggctaattttttatatttttagtagaggtggggtttcactgtgttagccaggatggtctctatctcctgacctcatgatccgcccacctcggcctctcaaagtgctgggattacagacgtgagccaccatgcccagccaattgtctctttttttttaatgtcaggagccgttgatgtttattacctagattcattaattcatttgcactatctcatttaatccctacaatacctctttaagataagtattgctttatagatgaggaaatagaagttcagagaggtagtttcccaagatcacatagctagtggatgacatagctgagattcaaactcctgtgtatttgacttcaaggcctatcttatggttttatgcctaaaagggcaatttcagtagaaatatcaggcagtcaaaatgcaagactttgaataacctgtgagactgcccacttttcaattcctaaatattttgagacctcaaatttgtctaatcagtagtaaagcattttacatggcatatatgcagatagttgagtgattttaaaattttatttccagtgatgttttctcttaataagtaaacctatgtgtaggagagtgtgtatgtgcatgtgtattaactgtcacatagatagctggaactttcctgccccttataatccaggtgaaattgccttgaacctcctaatccacaggctatagaaattcaaagcatatgtttctttgttacactgttttttttttttttatcacatctatactgtatactacatgtgaaacttggcacaagtttcatataaaacacctacttaacaaaacatttgtgaacttacacttcactgaaggtttggcagagaagacagaaagggagaagttatcattcttaaaaatctaccgctgacttttgaatttatcccagtctctttttatcttgcttgttctctctccttttccttctctgtctttgtcaagggcaaaataacagattgttctctatcatacagagcaaaccttggcactagctgttgcccaggcccttgggatttttttaccttcagagcttgtcaatgtgttttttccatcaagttctctctaaaggaagtatggtaccagctgttgatataataataatttttctaccaaagaatataataaaaagagatgcaatttttaagagaaaaacaacaatgataattggttggttcagatggtttctgtcagctaattaaaaagtgaggccttttatcattctgtttgagccttgttctactataagcagggttcagcagaaaagcaccatgttttggagttagttgagcctggatttgcatcccagccttaaccacttatga

SEQ ID NO: 7889 - DNA, 2300 bp, Homo sapien
ttgtcaaaaatcatttgactatttatgtgaaggtttatttttgggctctctattctattccactggtctatttgtctttacggcagtactaagctgtttcaattactgcagctttgtaattggggagtgtgagttctccaattttgttcttcttcaaaattgttttggctagtcagtgtctatgagattccatatgaattttaaggtgattttttttatttcctaaaaaaaaaagccatgggaattttgatagagattatattgaatctgtggattactttgggtagtatggacatcttaagcatccagtgatctttaagataatatgttactatctcatgttcacttttagattttcatattgtggttgattcagtatatttatttcaattataatgtttcaaatatttcaatggtacagaaaaatatagagaattatttattttttcagccaatatttgattgcatactctgtgcttatctacaataaagatttaataaatgttgacattttgtcatatttgtctcatatttcctttcaaaattactattgcaggaacattatatcattatcataaaatataagaaaaaatgctctactgacaaatcaacctattttcagttttcctttttagtactttactataccacatttttccagtagtaatcctaacttagatgacatgttgtaatctgtttcttgcttatattataagcattttttcatactgcagtatgttctttgtagttattcttttgatgaaacatccttttgccaaccaagtataagaaaggcttaatcttggcactaccacttactagctttgtgatcttaagaaagtttcctaaattcacagaaactaatagcaataaaaagtaaacttgtaattatcttaaaatgaatattaacagtgacccatacaacaagactgttggaaggattgaatgtatattaaaatgtctaggacttagtaggtccttaataagtgctagtttccttccctttccttttcccagggatctagtttttaatcctgttcctccaggggttgccctcggagactcagaacttgctcttattcctccagaccaagaaagaccatccatacacctggagaattgaactggcaaaaacagaaaaatactgggacggctggttccgaggcttatccaatctctttcttagttgtcccattcctaaattgctgctcttggctggtaagtgtatatgtgcatatattagtcagctcaggctgccataaccaaatatcatagactgagtggcttaaacaacagaaatttattttctcacagttctggaggctggaagtctgagatcagggtgccagcatggtcaggttgtggtgagggctgtcttcctggcttgccttctctctgtgccctcacatggccgagaaagagtgaatgtgagctctctggtgtctcttctcttaaggatattaattagggacgttcatcctatcatgtcagagctctgccctcatgacctgaggttacgtccttataggccctagttccaaatacagtcacattgggaattggggcttcaacatgagttttagggggacacaactcagtccatagcagtgttggtatattgtcatctcaatatgacctcattaaaacttctcaccaaatgagtagtgacatccaaagtagagtaccttcctcattcatctatgccttttctcctccccacacccagtctctaaacctaactaagcataagcattcatctaagcataaaggatgacctaattctggcctggcctgtctacttggtcaagctcaagtccttcttagtctagagctagatgcagtggtataaggatattctgattattatgagaattaaaatagtaaaaccttgttttcagaaccagtttaacatagtaattataggggaatctcaacctgaaaagttttatctggtggtgagagtatgctctgggagttaggattggtataaacatgaatggagaatgtcatcatatttaaaactttgtaacactttttacttaatacgtgaacagcaaaatctgtttcacaatgaattctcttgttttctaggtgttgatagattggataaagatctgaccattggccagatgcaaggtaagttatcaagaaattatacccctggacccttttctgaagaaagggtgatagggcagttaacatcctgagatagtgaggtataacggagaaagcatgagctttagagtccgacccaagttggacatccgcctctactcctaacacactatatgattatgggc

SEQ ID NO: 7890 - DNA, 2300 bp, Homo sapien
ggttccgaggcttatccaatctctttcttagttgtcccattcctaaattgctgctcttggctggtaagtgtatatgtgcatatattagtcagctcaggctgccataaccaaatatcatagactgagtggcttaaacaacagaaatttattttctcacagttctggaggctggaagtctgagatcagggtgccagcatggtcaggttgtggtgagggctgtcttcctggcttgccttctctctgtgccctcacatggccgagaaagagtgaatgtgagctctctggtgtctcttctcttaaggatattaattagggacgttcatcctatcatgtcagagctctgccctcatgacctgaggttacgtccttataggccctagttccaaatacagtcacattgggaattggggcttcaacatgagttttagggggacacaactcagtccatagcagtgttggtatattgtcatctcaatatgacctcattaaaacttctcaccaaatgagtagtgacatccaaagtagagtaccttcctcattcatctatgccttttctcctccccacacccagtctctaaacctaactaagcataagcattcatctaagcataaaggatgacctaattctggcctggcctgtctacttggtcaagctcaagtccttcttagtctagagctagatgcagtggtataaggatattctgattattatgagaattaaaatagtaaaaccttgttttcagaaccagtttaacatagtaattataggggaatctcaacctgaaaagttttatctggtggtgagagtatgctctgggagttaggattggtataaacatgaatggagaatgtcatcatatttaaaactttgtaacactttttacttaatacgtgaacagcaaaatctgtttcacaatgaattctcttgttttctaggtgttgatagattggataaagatctgaccattggccagatgcaaggtaagttatcaagaaattatacccctggacccttttctgaagaaagggtgatagggcagttaacatcctgagatagtgaggtataacggagaaagcatgagctttagagtccgacccaagttggacatccgcctctactcctaacacactatatgattatgggcaagtatttccctttcctgagctttaatttgtttaaaaaaaaatccatccaaaaatgaagattataatactactacctatgtctcagttataagagttaaaatgaggcaatgtgtttaaaaattataaagtactgtataggtgtatgatactgtgaaaagagatattctgactactgatcagttttttgtttgtgggttttttttttttttttttttttgaattggagtctcactctgttgcccaggctggagtgcggtgggaccaatctcggctcactgcaacctctacctcccaggttgaagcagttccgggcctcacccaccccagtagtgggattacaggcatgcaccaccacgcccagctaatttttgtatttttagtagagatggagtttcaccattttggccaggctggtctcaagctcctgacctcaagtgatccacctgccttggcctcccagagtgcgaagattataggtgtgagccactgcagctggccagtatttttcttattgttagaagttttaggaaagggaaaggctcaagataatccagatataaaaaggtataaatacctgtttagaagacagcatggtaagatggtaaaagtaaggtctctgaagttcggaaaactgagttttgaatactgcttttccagtaattttttgactctgggcaagttatctgacttgcctcagctttagtcttcttaatctggaaaatgaaaaaactgatggcagcctcaaacagatcgtggggtataatgagtaggaaagtgacatgctgagcactgtatacagatgcatgtatgttagctagataacagtggaggcagcgggtccaattttgtgggggctcttgctttagtacgggtaaaagactcagtgaaggtgaagccagtaggcatacaacttttgggttatgggaagaagaggtgccaactccaagaccaaagtttcaggctcaggcagaatctgttctagacctttcttccctacttactctccctggacaatttcatggcttccatttatatattgatgactcccaaagctaaacatccacctcacccctctctcctgagatccagtcctagcctatgtagcaaacctgctggatatctcatgggcctctcaaactgttcttttagctatc

SEQ ID NO: 7891 - DNA, 2300 bp, Homo sapien
acaaatctatttcaaagcattgtgtgtgagagagaatcagatgagatatggtttgtatgagacctcctgctgtgacaaagttgtgataatgacagtggtggaaagacagtgaaggagaccagcatggtggaatggggttggccagctgctttggccaaaatgcttcaagtgctctcttctgagaatgtaacctgaaagaccagcagggggattttgaccccccactcccgtctccatctgagctacccaaagagattactggtatgagaacaagcatgggtagcagggagaatgctgggctctgaaatcaaagagaaaaaattctgtcctatttccactaataagcttggactccaatgactctgggctatgaacaaaaagaaaacatttggctcggtcaacatggacccatagaatactagacaactatgctattccaaagagtgacaataattattgaaatgatcttcatttattgttaaaattaatacatacctatattgtatattgtcacactatttcaagctgtttatacgcaagccacatacttaaggacaagcaccacattagctcattcagtcactattaacaagatctctcgcaaatactttccacccacaaaatgcttctcttctacatagctctctctcacagtcatggggtcacaaagtttcgcacagggtgacaatgggtttgggggtcacactggacctcagagtcactccccattccacataccttcttctcatgtcaccccagaatcagtattattaccacacacactcacgcaaagttttaaaagcagtgcattgtgctgtctttgctcaatgataaggtcacatgatataagtacaatattaatatatccaaatagtgacgtggtcataaccactctgtcagtgttgtaggcttcttgatgtcccaggcagagaaggcgcagcacatattcatacagatggtatcatatacaatcatttatctttcatttttgtcagttggacactgctaagtcgatacatgactatggtgcctcagcatcccaagtctgacaaccttttatgccacagtgtgtagcactagagtttgttgactgtaccccaaaactatattagctgagcatccactgctgtgtgctacactcagtatcttctgcatcaagtatgttttttcacagtgcttttttgatatcaaatatgttgacacacatataacatctcagttatcatttatttagtatttagagagcttctacatgtgtaaagagaaggaagaactgaagacgtagacggcagtggacatctctgattaacagtcatggtgctacagacccaaactcctcgagggcagagttggctcttgatcaccattttatccccactgcctggaacactgcctggctcttagtaggcactcaaaaatatgtgttgtatgaattaatgaactgaagcattattcatatagcgacctgtacagttactcagcatcattcacatgcagagtatgatatccacagtgtcgtgcccatccagtcccaatgacatgtaaacctcacatatggtggaagactgtcacctgactcctaacactaaacatcagctcactaggtcatgcggtgtttcacgatccccccttgaaaggtcaatacttgcgtagctaaagcgtcaccgtattctctccatgtcactctcacagtgtctctgtcacagcaccgtccactgtgtctgtgtcagtgtgacacagggcctggggctcacacagctttgcacagcacattgtgaggtcctagagtcaccccgccccgctcttccacagtgtatcaactttgctgtgtgacgctggatatggggggtgccactatgtgtgtgatggagtctgcagtcccagtgtgacccaaccctcgccaacacctcatgccacggagtgtcagggtcccacacagggtgacaatgggtctagggggtcacactggccctcagagccactccccaccccatgccacaatgtctcagtcgcacggtgcgacagtgggtctggggtcccacgcagcatgacaatgagcctggggtcacactcaacctgagtcaccccaccctgcggcacagtgtatcccactgaggcccctcggtcgctcccactcgtcgtgccctcacctagtcaggtcccgcagccgcgcctcctccccgcgcaggtaccgcctcagcagccccagcagccggcgctcgggcgccagggcgcgcgccacgctggtcagcgccgagaacgtgtcgccccgagccgcagccctttctgggtctcctgtc

SEQ ID NO: 7892 - DNA, 2300 bp, Homo sapien
gattgaattgatgttacagattgggttttctagaagcagaggcacagctggagtttgaggtgcaagatgtttattagagatcagcatctacgaaagggaaaggaagcaggaaaaggcagaggaagaagtcaaagaggcttgacaaagccttgatcaaggtggcaggtgcgctggagctagtatttcctgtaagaattgtctcacgatgggccaaaatggctaggccttgattccctcaccttgctccattgctggattagggctgttccaggaaggacatttccctaagcgagactgctctctgctataggacagaccctaaagcagctgaccactggatactcttctcatcacataccctgcagctgtgcaacaagtccttcttcgaagggggatctgcatgttacatctcatgtctacacaagcagtggtgtgctggagctggctcaccccagctcacaggagttgttggcatctttatccaaccacagtcagtggtgacatttttgcatgtcgaaattagccactgtgggagaattgacaccacagaaattggcaaatgccacaaaccagaactttatttttttcctggagagctggtttaccagcacacctcgaatgtggtccacaagtgattaacactgagtaggttaatgattgtccctacaattcagtcttctcatcggtaaagtggggccaataatactgtaagaatactaatattacttaggctatagggtcagcatgagaattaaatgagttaatacatgtaaaatactctggacagcgattaaatgagttaatatatgtaaaatactctggatggcgactgccacacaggaaacacccggtaagtattaactactatgtttactgttgccattgttattacaattattgctaccttaaaaacttccactggattttcatagaggacaagcacctaaatttcttagtatgacatgcaaagacctttcacaatctgatagtttcaagcacaagaaacttttcatcatttctggaactcaaactgttttccacctccaaaccttgtcacgcccatgtaccttctgccaggaaagcccactcctcccttgcctgtcaacttccaatttttttcatccttttgaaccagcacccatcacctcctctctgatgccctctccacccactacatgagggttccttcttcagtgttgccattgcatattgcacaaccctcagttactctgacagcactttattgtgattacttgtttacataactgtctcctcctttgagtccaggattggatctgctatttctctgtgtaggcagcacagtaacacaggtactaataaatatttgttgcatgaatgaacattgcctgggaaatgcataagaggggggaaatagagtacatagcctagtaggctataataataataataatatttttatttgcttaagtgactctaagtatattgtgtaaagcagtgactttaggaccccagagcttcaggttctgtaagtcctagatttgtcatatactcacatcctgacacagtcctacttatccttcagatggctcagatgtcacgctctctgtgagggttttcctcccagctgtcctcttgccgctctttgcctgcgcacctattcacatacgcataattgactcttctggacgtccctgtggggatccagtggtgtttgtgtattcccactccatggtacagaggggcggatattttggggatcctgtgagcgtggtgttaacaatatttggggatagtcacagccttagacctgtgaattcatcgctcaccctgcctccgcctcaatttcccctagtgtgatgggcacagtggaaacaccttcccagggtcgcgatttagtggagggcggcggagactgatgttgcaggaagcccccacgcattccgaggagctgaggaatagagagcgaggtgaggcgtcgaaacaaggaaggagtcagggggcgtggagcgagactgggcggtggacgggacgggccgggccggggccagagggcggggcctgagccgggagggggcggagacaggggcggggcaggcgagggcgggagcggctgccgccgcgcggccaggactgtctgaggggaagttcgcgagcgctggctatgggtcctggggcgcggctggcggcgctgctggcggtgctggcgctcgggacaggagacccagaaagggctgcggctcggggcgacacgttctcggcgctgaccagcgtggcgcgcgccctggcgcccgagcgccggctgctggggctgctgaggc

SEQ ID NO: 7893 - DNA, 2300 bp, Homo sapien
ttaaaatgtaggttctgatgcagcagaactggactggggtatgaaattttgtatttcttaataagcttccagaggacatcagcacagttgtcctcctaatcacactttgaattgtgacagtcaatagatatttcaaatatgcaggtacctaggccctatgccaatgtattgattcagaatctctggaggcagtgtccaggaatattaatttaaacaaactcctagggagatatgagaaccactgatctatgggtttgaaatatcctctatcttattctcaacttgtttattttgtttctgaaagcccagtgcaggtccctcctgcttgatgcttttttcattgaccacctcagatgtaaattcattaacagttgttggcagcacttgctatttatcatgggctttcttttcttacatatatcctgtctcctcagatgttacttctcgaagtgaacaattatatagattcttgtagcctcagctcctaccataatgcttagcagagagtaaatgtttaatatgtatcatggataataatggtgatggtagtggaagatgaatttctctccaggacacgtgactgttgcccaggccttgtgtgattaaaagaacaagagtcctgctgactccacaaaagaaacaatcgttagcaaaaactgcaactcccaactatggcacgtttttcagaaactggtaccacaatccttttgtaccttggtagtttgaattttattatggtaaatggcactttaaaggaaataaagtaatactttgaacttaatatgtcttttatctgtgaacctcaaagcagcctaatgccatttattaagttactgtacagccatgatgtaaatattatcataccttccttacaaaaaagctgactagggaaagagttgtaatgtacttgcccaaaatcatagccattctaagaaggccaaaccaagaaacggaggagtagctaggtggctgacaggtcagcacttctcagcatttcccagacctcaacttaggtgagctttccataggagagacggctaagaagtaacggaagactatttcaatttgggtgaaccaatttccttttcctccgtattcccattaccattgctcttggtatcttgtgatgcttatacattcttatatttaggttaaatgccgaccatcttccctcaacaacttccttatctattttccagtaatcttgttctccctacctcctagtttactatagcagcagagatattagattggtacaaaagtcattgccgtttttgccattacttttaatgccattatttttaatggcaaaaacagcaattacttttgcaccgacctaataaaataactgccagctgaggggatctgaaatgagattggaaccctagtttgaccgctcacgaactcggcctcttaggagaggtgtctcagggagtcagtttcttctttgtgtgtgaaacggaaaaggactacgcccctgtaccttactgagggattgaggcgatagaacgcgattcgtaaactgcacagcactaaacggataccactttgtccccttactatgtcattccttgtttaatttaatgccagggccacacagcgcagcataactaatagggatagggcgtgtctgtagggaactacctcgaggtagatctttttcttttgaggaaagggggaacgcggagctgctgggagtcgtagtctcggcggcggtctccgctgagctcagacaaaggaaagaactacaactcccgtgaggcagtgcgcggacagctcgcactgcccctcctcccccaaccggcgcgtgcccccaagagaaactgggggcctgcgcgcgcgctggggacctgcagggcaagcgcaaaggcagcttgctagtggtagccgtgagagcagatcgaggaaaggagacccttggcaaattaaaaaataaaaagaaccgtgcactattgcctcaccacccggacgggctgtaaacccccactacttcggaggcgtggggagcgcgctcccgggctccagtctagaacttcggggacttaaatcagcaagggcgggaaggggcggggcctaaggcgcggggcggggccgtaggcggggcgggcggcggcggcggcggcggagccaggacccagacatctgggactgttgttctctcgcggcgcgaccgcctcagtcacttcgcccagagacccggacctggtccgctggggagcaggcggccataaaccccctctctcccggttccctgacgccgcggcaggagctgttacgaacaccctgcggttggtctccga

SEQ ID NO: 7894 - DNA, 2300 bp, Homo sapien
tcacagctttattccccaacttccaagttaggggttggacaagtgtaaggcaagtgcagtttgtgagaacctgtgaatgtatgggaaatagcaggaacagagagtgaacctggctcatctggggaatcaggagtaggtctggagcagtggggtgcatggaagatgagagcataaacgaagtctaactcctcctcccaagcttaccaacctccatctcactggatcattgactaagattggcgagaatctgtggtgcatgaaaaggccatagtgacgaagttagaggagatgatgccccatgacactaacaggctgtgtctggtgtgatgtgaagcttaggtgtgaggaaacactgccatttgtagtggaaagagcacctgaacagtagcccaaacacctgggttcttgtctgagtgctgccatttatgggccatgtcattttggactagtcacttctcccttctgagcctcagtttcctcatctacgaaatggaggggttggcctggaatctagattctagatgatccttaaagtccctctcagcttggccatctgctcaccttccttcctcactggcctatcttctatttcaaggcaagacctctccagggcaggagctccatctcccccatccaaggatctcagtaatcagggactctcctggacagggaagccaaggagctcagaaacagtggcaaaactcccctgttgctgactgccagtccccagcttgagccccagaggcagccccagagccccatagagaaccaacttgtgccttcatcagctttctgcctctcctaacgcagacaggaggccctggcaccccagccttccctcccatacaaacccagcacctagagatgtggaactatggcccctttcctcctcctgtcagaagcacaaacatcctagtctattcagagagaccctgaggcatgaaaggtctcatgaatctttattcccctcatggaaccctgcctcaaagcccaccctaccctccacactgtccccttcccccaccttctgcagagtctatcccctcctcaggctagatcatcctggcaggtgagctgtgaagaggaaaaatgagtaaatctctcagtttggctcgactgggatattagatgtcagtcagtcccagggctcagaagcatcttaacctgtgaggaagaggtccacagccttctctatcttgggatttgagaagctctagaaagcccccaaaatgcctctcccatcagcctctccaacttcccatggtctcacagcatggtttcatgattcgtatcatcacaggacgttagaaccaactgagaccccttcattttacagatgcggacagaagctgaggcccagaaaagggaagtcttatgtccaaagtcacacaaggagcagctgagctgggacaactcccctggtttccatttccttcaccgtaaagtgagggcatatagcctagatgggctctgaaggcccttccagccttgctctacaaaaacaaccaccgtatgtgcagtgtctagtgccaagcactacatgatgttctttaattttcacaacaaagctatgctacagatagtgttcattctgtgaccgtgttcatatcctgtctatctgaatagattgggtggtaacacatcatttgttcctatgtaaaatatcaacccagctgccagttggcattctcccactcatgtcaattcccttgggattcgaaaaggaccttgctaaggtaacccttaggaaagggaatgttttaggctgcaccatcagctggtccctgagtgggagtccacattttaaacaggtttctcatgaagtcacccagtgaagacactgtaagtctggaggtaggggacagcaatcagaggccctttggtcactgcacagttcctttaactgcaaccctaggctggcctgacccagctgctgcaggaaggggaggggccatgggagggggtcagagcccacagcaggactgttgcataatccttggggcctggccttgggcaatccaccctggttctgaagtttgtgctttgtgtctggttccttccttttctgccttctctcctgctttctagctctgggctttcccagctccgaagtcaatactgagatcccagatgtgtccagagacatcctgaagaggctcgggggtggaggagccttagtgtgtccacaaagggactcctgaaactgactgagagccagtggatttgccagcagtctggtgagtcttccagattgagatttccctccctctccctgtcagttaaaacccctttccaatgat

SEQ ID NO: 7895 - DNA, 2300 bp, Homo sapien
taacatggcaaaaccccgtctctactaaaaatacaaaaattagctgggtgtggtggtacacctgtaattccagctactcaggaggctgaggcacaagaattgtttgaacctgggaggcagagtttgcagtaagctgagatcacaccactgcactccagcctgggtgatatgtttccaaaaataaagaaatgggagaatctgttaggctcatgagggatttgactaggaaactcttgagagttcttccaatttacattccagaaccctaagatgatatgattctaagactttggttctaagattttattagaacaaaagacaatccctatcttcaaagaactcacaacctagcagatggggtggacaaatggttactttctataactgtcatagacagtcctacagagtaaatgcaaggccgtgggcaggatctgagaaagaaccctgaccaagccaggactgcttcctcatggctagtctcaagaaccatttgcatcagagtcatttggaaatcttgtttgaaaatgctgatttctaggctctactccagatttcctgaattagaacctctggagtggagcccaaaagtctacttagtaaaacaagctccccaggggattcttaggcagattgaaaactgaggttgcaggatgggcacagtggttcatgcctgtaatcccagaactttgggaggtggaggtgtgcaggtcacttgagcccaggagttcgagatcagcctgggcaacatggagtaacccaatttctataaaatacaaaaattagccagacatagtggtgtgtcccagttactcaggaggttaagggaggaggatcacctgagcccaggagttcaaggctgctgtgagccataatcactccactgcactccagcctgggtgacacagtgagatcctgtctaaaggaaggaaggaaggaaggaaggaaggaaggaaggaagaaagaaaggaaggaaggaaggaaactgagattgcatgcttaggtgattaggatgacttttctgagaggtgatctccagactgagaaaaaggaatagtagggtcaaaacaaggtgggtacaatatacccaccttgtatattgtatacaatatacaatatacccaccttgtagtaggtctttttaaaacgatagcacttcttagatatattctgggattctgtaattgagagtatgtgcttcagatatcctggagcagacctttgcaagggagtgaaagagctggcctgaggctgttattaattattctgaggcagtgagctggtaaaagggcaccccacagggtcccccggagaaattctctgcaactgtcccttcctctgccactagcctcctggctcttattcctcagctgccccggctgccccagttctctgaagcctgcaatgtcaccagcaaggaaacaacagtttgagtgagggcatggtggtgggaaaataaactgttctgggacagagatgagtaaggtgcggctgaacacaagttggtcaggcactgtcacgaacttttgaggcttggtggaggaaacatttgctggtgctactcagagacagaggggtgtgtagtggattttgggtctgggctctgctacctgggcaaatcccttctccaactgggcctctgcgtcctgtgtggaaaagagtttgtgtaagaatcatattattttgctgttgaccctttggttttaatactttggactcaaaggtctcatctgacctcaaccataagcctgtgaagaatgcatggaggaactgtaccaactttacagccaggccaaggcccagtgaggggcagcgactcgcccaccaccacacagccacactggagcaaaaccgactcctggagatcggcctcatgctgggcttgctgaggcccagcggagcgagaggctttcggtctctggtccaggaagcaggcgctgcaggggacggaagggtcggagcccacagccgggggaggccaaggagctgggcggaggcactccaggccagcccggggagaagtgggtgtgctggggcccgggcggggcagggggaggggacgcccgggggagggaaaagggagccgagcgcgggtgggagcccagagccagagagcgcgctgggcggtgctgggcacccgcggagtggaacggggctggtggaatgcacagggtcgcagcgcttgggccaccctcggtcagagggcgccgtgtccagcgagcaaacgggcgccccggagccttgctgagaggcaggtaaggcacccacccagctgggaaggctgagctgcggcctggggtgga

SEQ ID NO: 7896 - DNA, 2300 bp, Homo sapien
taagcttcccccaaattcctgacccacaaacgagataattaatgtttactgttaagtcactaagttttgatgatttgttacacagcaacagataatacgcagccttacaaatttagaggtctcatataagaaaaactcacttctatctttggcatttgtacagtgtgagaaattattcttatccttcctccagtctttggcctagctcagggtaacccaactaaaaactgctaaattatcaaacttggggaatcaaacccaggaaggtaagatcccattttattcttagaaggttcttcccttttccctttattgcagaaagaacccaggtctcttgagaatgaaaaagcactacatcacatcaccttcacctgggccattcagagatttgattcccacaaaatcaaaggaactagagcccagaattgctcagttagacacagtattgaggaagcaacaattgagaaatgacaatctatgacatcaacaatcgagaaataacaatctatgacatctgaatttctctgagacactgctgtcaatagcagtgctaatgttttatatagcatgtgttgcttttcacagtattgtcacatctagtatctctgaggtaggtggggaagatataaataaaacaggatacatatgaaaatagtggctcagagctcatggtatgtccttagtttcatgatcagtgaatgacaggccaggtctaaaatctgggtttcagtaggtgactcaagtcagacttcatgcttcccaaggcaggagcatcctggctgttatgagtactcttcagttggggctgtcctctgagatcagtgtgcacttgtagatctccttaaaggccacaaggaaaggtggcattacttcttccacggtgacgtgcctctggagctccttactcaaggaagtgacgcctgtcccaaccagtccacagggcacgatgtgctcaaaccacgtgaggtcggtagagcagttgagagccaggccgtgggatgtgatgtgccttccacagcggactcctgcaaggcaagccaaagggtcttagagtagataccctccactctccgggctttggtgtccctctcagggcgatgagaaaactggattagatcaccggttttcaaattttgtttctggagaaacaagggattgtactcagatgggaaaaggaaacaaatgaaaggaaggggtgcgtggcttcaagcagctgcactcatcatgaggattccaggaaatgtcttttaacagattccaatacttaaaaaaaaaaaagcttggggacaggcgcagtggctcacgcctgtaatcccagcattttgggaggccgaggcgggcggatcacgaggtcaggagatcgtgaccatcctggctaacacggtgaaaccccatctctactaaaaatacaaaaaattagccgggctggtggtgggcgcctgtagccccagctactctggaggctgaggcaggagaatggcgtgaacccgggaggcggagcttgcagtgggccgagattgcgccactgcactccagcctgggtgacaaagcgagactctgtctcaaaaaaaaaaaaaaaaaaaagtttgaaaattagcacccttatttgccatgacattgtcattcgcaggacgtaacctggcaattcacttctcttgtctctcccttaacagaaatgcgtgttggactagatgtgaggagccttctgcttctgaatatacgatatctgaaaaggggcttaaaaactcaaacgcagcgggtagctgtgattcaaaacccgcgctagatacgcctcctcccggccctcacctccgttggtccagccccgtcagaccccgcccccaggcctcaagctccgacctcggctctcaggtaccgccctgctccgcggcgctcaccgatcgcgcagatcttgcgatcgtctagccagacgccagtgtagggcgggggccgcgcgcgggcgtcctgcaggccctggagctcgcacaggcgcacggcgcacgcctccagcgacgctacgtgcatgcgcaagcgcaggccgagacgccgcaggtcgagtaccgggtggcaaagcagctggcccgggccgtggaaggtggccaggccaccgcggcctgtgacgcgcacctcggcgcccaaggcccgtagccgcgcagtttcctcgggcgtcaggccgccgcgcagcccggccgtatacacgggccccgcgggctcgcagagcaggagcgcgcccgcctcagtccccgacggggcctcaatgcctggctcggcctgcagccgccgcagccagcggtcctgca

SEQ ID NO: 7897 - DNA, 2300 bp, Homo sapien
tcacttgaacccgggaggcagaggttacagtgagccgagatcgcgccattgcactccaacctggggaacaagagcaaaactctgtctcaaaaaaaaaaaaaattattattttttgagacagggtctcactctgtcacccaggctgtatgcagtggcatgatcaagtgctcactgcaacctctacctcctgggctcaatccatcctcccacttcagaactgggaccacagaccacagaccacaggctcgtgccaccatggctttttttttttttttttttagtagggacggagtttcagtatgttgctcaggctggtctcgaactcctggggctcaagtgatccacttgccttggcctcccaaagtgctgggattataggtgtgagctactgtgcctggcactgctaccctattttattttatttatttattttgaggggggtctcactctgtttcccaggctggagtgcagtggcaccatctcagctcaccgcaacctcggtctcccaggttcaagtgattctgctgcctcagcctcccgagtagctgggattacaggcgtgtaccaccacacctggttaatttttgtatttttagtagagacggggtttcgccatgtttgccaggctggtctcgaactcctgacctcaggtgatctgcctgcctcggcctcccaaagtgtgggattacaggtgtgagccactgcgccgagccattttattttatttttagacggagtctctctctgtttcccaagctgaagtgcagtggcatgatctcggctcactgcaacctccacctcctggattcaagacattctcatgcctcagccctgggagtaactgggactataggcacgtgccaccacgcccggctaatttttatatttttagtagagacagggtttcaccatgtgggcctggcaggcctcgaactcctgacctcaggtgattcatccccctaggcctcccaaagtgctgggattacaggcgttagccaccgcgcccggtctgctaccctattttaaaccaccactatctttcacttaaaaatctcagaatgtaagttacatgtgaacaggctcggtttattattgctcatagctgcagccccagcacctcaacactcagaatagtatctggcctttctcaggattttgctatgctttgaatgaatgcatgtcgcgacaagcctttgaagtaggtactgttattattcccattttatagataaggaaataggctcctagtggctaaagaattacctaagtttacacaacaaacagcaaaaccaggattcaaacccagtaagtctgactctagagcccactctcttacgcactacacctgcgatactgaactgcaccggcttatgctgaagtcaattattaaagatttttgcgggggtgatactaggagaaatttgagttgaaattccccaacctgataacttttctccaagttttcctgagaacacagctcaagcgcctcttcacagtctcctaggcacaacgatttggtttctcccaagtctctctcatccgcctcttctcctaacaatccagagataatgaactcttttccagcaaattctcctgcttctatccgaaacactcagcctctcctcaacccctctggaaaaaccttccctaatttctcaactctgagggattataacaggcagtacttttccccagttggcagcactactaaaattacttgttttcaatagtctcccctttatcctggctttcccgggtttcatcacgcgcagccaacctcggtagggaaatattatacccaatgacatctgttgagagaccatattcactaatgtttattacagtataataataattgttctattttatcgttagttatttttgttaatctcttactgtgcctaatttataaattaaactttatcataggtacgtaggtataggaaaaaaccagccaggaggccccgcacttcggtgttttctactagctctgcctacctccgtctgcgccgtctccctgactagtttgacccttcgagggccgccgtagtgcgtcgcctccgttgccggggaaacgacccgggacctgggagggagcaaagacgtttcccgccggcgggagctgtggctgtgattgagagaggggttagaggcgggtcccagcgctgccgcaccatggcggaccagctttatctggaaaatatagacgagttcgtcacggaccaaaacaagatcgtgagcagctactactggggaacgcgggcgtgcgaccggggtcctgggcccggctagggcggcgg

SEQ ID NO: 7898 - DNA, 2300 bp, Homo sapien
caaaagaaggcattgttatcataagagatgacagcttcatgtgtgttactgcccctgaagaagaccttccagtgggacaaaatgtggaggtggaagacaatgatcattgatgatcctgaccctgtgtaggccgaggctaatgtgtgtttgggtcttagctttcaacaaaaaaagtttaaaaagtaaataaaaaatttttaaaatagaaaaaggcctatagaatagggatataaagaagaaaatatttttgtacagctgtacaattttttgtgttttaagctgtgttattacaaaagagccaaaaagttataaaattgaaaatacagttaaagtaagctgtttattattgaagaaagaaaaacattttaaaataaatttagtgttgcctgagtatccagtgttgataaagtctacagtagtgtacagtaacatcctagggccttcacatttcactcaccgctcactcactgactcagccagagcaactttcagtactgaaagccccattcgtggtaagtgccctatacatgtgtaccatttttaatcttttttatacagtatttttactgtatcttttctctttttagatgtttaaatacacaaataccgttgtgttacagttgcctacagtattgagtacagtaacaatgatgtacaggtttgtagcctaggagcatagactataccatctaggtttgtgtgagtatactctgtgatgttcacacagtgaagtcacctaacaatgcatttctcaaaatatgtccctgtcattaagtgatccatgaccgcagttgggagaagtttcctctgttttctgaaggagtttatatatacgtgtatatttttcaaatgtttaataaaatttaccagtgaatccagggctggattttatttgtgggaaaggtttttattgtgaatttgatttaactagagctgttcaaattctctagttcttcttggatcagttttgactgagttgtgtttttaaaactcagtcaaaatttgatctaaattgttgagtttattggcataaacccgttcattatataactttattcttcgagtttgtagaacctgtactcgatacagatttctttactgtttcattcctgattgataatttatatttttctgttttcaaaatgggttttataaaaggcttattaataaaattaatctcccaaaaataacaactttggctttgttaattttctcttattttttatctcactgatttctgctcttatctttattgtttccttttactttgggtttaattgttctttttctagttcaaggtagaaaggaaagttggtatttaaagttatataggacataaggtacttgatggcaaagattatgtcttgtatatatttgtttctctaacattcagtaggcctttgataaattacttgttggttgcatgaggagtgtgatggagtatccattcatccagaggagctaaataatgtcatgatggagtctaggattttttttattattattatgtcattagaatcaccttaaaaggatatctctgcctttgctcatattgttctttctctttaaaatatgtttcccctttctacatgatgaacttctacttagcttttaagttttccaaatatgaattatattccataacattttatttgtccagttaaatctaccacattgccttatagccagtggtgtttgccagagcttcttgaaaacagtattttcttctgtattgttgcattctcaatggctagcaaagagccttgtatgtatgtagtagctgcttatttaatgcttgttggataattgaaaggccaatcagggaagtaagaaggaatttggaaagattcttgataacctggttgtagcttccagcagtctctagagaactctagaacttttttattcaagtcacctcatgaagtgacttagttgtggtcagttagcagagtatccttaacaagagtccttcttggactatttggccgtccttttctaccctctggaattaagaccacgagttataaagcaaaacccataagagcatgtgaatacttacatttttgttctgtgtaacacgcttaatttatttctggatggcaacagggggaagcgagtagcattatctgatgatgagacaaaggaaactgaaaacatgaggaaaaagaggagaagaatcaaacttcctgaatctgatagcagtgaagatgaaggtgggcattaccattcattttgggttagggggatcaattttactttcaatgttcaaggagctaaaaaagtaatggattaaggatcac

SEQ ID NO: 7899 - DNA, 2300 bp, Homo sapien
gttgcagtgagcccagatcacgccactgcactccagcctgggcgacaagcgcaaaactccatctcaaaaaaaaaaaaaaaaggaatgaagttggcctcaactctggggataatagggatggacaggagggctgagatggtggaggccttttttgaagtatgatgggcaggatgtaggggaacccatcttaatccacttcttacatctaagacatgaatatatgtgcacagcacattttaaacaaagagaaaggaaaagatcactgtcccaaacccttgggatgagattgtttatgcaattaagcagcacaggatttaactctgagatccctggaagcaaaggcaaaaagggaagcatggtgacatgcataagcttgcactatctgttaaaataaagaatactcaggggaaaggaagagactggccagattagagtagaaattaagcctgaagggcactggacagatcatgtttgtccctgatcctgagagccctaggaagggccagtttggggatcactggttcctcctactgctctcttttggagggtggagatcttgggggtaataccctgaaagcacagtgcaatggggagcccagccttggcccagaaagatacctttacagccagccagccaagtgtttaaacccggaaatatgattccctaccagagtgggatatggctcaacatcccttcccacctcatactcctctggcactctttggagtctccattagctcttcaagagaagctgggcagaaagttgaggtccaaagcaaggatagatgtatttactcaaagtggcccaacaagttacggatggagccaggacagtgactctgcccttttgatttcagagcttgtgtgtttctggtctggccagagctggctattctcttcttagtgtcctattagtgcatgtgttcattcaacacaagagatggagcaccatttgagggctggagggtgtcagggccctgtcctcagggagctccccttctggtgggaaagaaaactctttgacaatcagctctccctaaagatgactgaaggtgaccatcactcccagagaagtgcaggcctcacctgcaaaggcaaaggagagatcttgccttgattcgggagtgggagcggggagcagaggaagacctccaggggaaggcacaggatccctatgggctgactttcctgagaatggcgcatgggcagacggagtggggacaggggccactggtattgtaggcacctggaattaggaccccttctctttgtggggtgagtgtttcgacgttcattaccttatttcatcttagcaacactcgtgggaagatagtagagatattttaagatcttaaaatgcccattttaaagctgggaaaacagactctccggtggcgtgctgtagaccacaaactgaattaagaacgccagtgttctgattccatccatctgcggagttccgggcacgcaccgccgagcgccttaccctgagccttcccggtacccgcagccccgacagctcagccttccccacctgaaagttccacctgaggtctccctcaactctgccctcctgcattcttggcgtcgcggggagtcaggggttaaaccccgtggcccgcgtggccccttccccctccgcagccccctcgcctccactcggcgccgcgcctggagcgtccgtcccggagacccgcacaagagaggaggggaaaaagtgggcctgtttctcgggtggccaatccaccgagcccgcggtgccccagaggaggcgccagcgctaggccagcgccaggccgggctgcctgcttcccgcggcaaagtacaaatgcgcccgagcgcggcgcctgaagcccttggcgagcacagccggcccgcgctcagcctccctccgcggccgccgcgccgccgccgctgctgggaccgccgccccgccgggccccaggcccccgcggcccgaccccgagcccaccgagcagggggcgccggccgcctctagcccgcgcgcccgcaacacccgctggtcccgcgcgcctcgcccggcgctgcgcgctcggcagacgccggtcctctccctgctttctcctcctctccctctcaccttccccctttctttgatcgcctctcccttctgctggaccttccttcgtctctccatctctccctcctttccccgcgttctctttccacctttctcttcttcccaccttagacctcccttcctgccctcctttcctgcccaccgctgcttcctggcccttctccgaccccgctctagcagcagacctcctggggtctg

SEQ ID NO: 7900 - DNA, 2300 bp, Homo sapien
gagagtgaacagcctgcacaaatggtcccatttctaatgatggttggcttgatctctggatcacagatctcctttgtcagaatccgggaaaaatgtcctcaagaaccttaagttgggatggaagtgggcaggacccatggataaaggatagcctagccaaggccatacttctgtgtctggcaggattctgtctgggtctctatgcaaacaggtctttgttttaatcacccattggcctttcttcaactcttgactgtcctttagccatctggttcttatcttgggaatccatcacctttttttccccctgctctctgagttaatcaatcactcggcactggattggtttaccgctagctctgggcaatctcatcaaaacccagggcttctcatgccttctattatattatgttgatttttttttttgagacaatgtctcattctgttgtccaggttggaatgcagtggtgccatcacggctcactgcagccttaacctcatggactccagtgatcttcctgcctcagcctcctgagtacaggtgagtgccaccatgcccagctaatttctgtattttttgtagagatggggtttcaccatgttgcccaggctggtctttaactcctgagctcaagcgatctgcctgcctcatcctcccaaagtgcaggcgtgagccaccgcccccagcctatgttgcttttttatttttctctctttacaaaactcgtgttatcctataaaggtttccactaagaaatgccatttatttaatgcttcccattctttgccctgctccaaatctatcccagggcaaagaaagcaaagaatgggagaactactgtagcagaaccacctttccattagagaggggtcattctttctcctggaacctctgcatctagaaagggcactagcatcaaagtccaagcacctctccctagctcaagcaggagtgacacggtcagagctggcctataggaagcaactcgaagagtgtggaggatggattagaaaagaggttgggagaggggagacaatcaatctatagcagctactgcagtaatctagatgagagatgattagacctgaattgggcagtgggaatgggatgaagaggtggggaaatagtcattttgatagtggaattgacaggactaaataactgatggtttgtgggagataaggaagaagttcaagatgactaggtttggagcttgagtacctgggaggatgggacctttcatagaatgaaggaaataagaagagcagttttgaaaggaggatgggagacagtgacattagttttgtacatgaggaatgtagggatctaagaggatgtttccatcaggcagttgaatatggagggctggactcaggaggcctgggctgcagacagcaatctgggagctcctgagggaagaaaatgtggaccagtgcagcacgcagagtgagaaggggactgaggcctaagcctagaggaacacccacatggaagcaccaaacacgggagactgagaaggagccaagagcctgggaaaaaaaccaggaaagtgtggttttaccagccaaggggggcagtttcaggaagggacatggggagagaggatgaggaggtaggattgacaagaggctgctccttttggcagttagttaccacggtgggcctggtttcagtcacaaagctacccccatccttaggagagagctcaggccctcatatcaaatgaacactaaggcaggtttctgagtaactcacatattccccactcactttctcctcagttatcaaggcattacaggataagtacgtgtatcaaagtttaacatcgttcagaattgccagtaaagcccctcagttcccacctctttcagttcagtaagaggaaactgcaaggacttttcgagagtgcggctgatgaccgcataataaagaataactaataaatattaatgaagtatcccctctggccaatcaggtctgaggagaaccctctttgggctcacagaagcctcgcccctcatgaatatgtagatagcactgcccaccgcgcgtactgccccgccctccactcttctccctcgcaaccgactctcccttcaaacgggaaacaagatggcggctgcaggtccgagtactcgggcctcttccgcggcggcagcagccgctctgagtcggcggggccggcggggccgctgtgacgagacggcggcagctaagactggggccccaggcccggcttctggaccttcgctgttggtgttgtcgccgccgttgctgcagccgccgctgccgccgcggc

SEQ ID NO: 7901 - DNA, 2300 bp, Homo sapien
tcccatttagaaaactgaccagcacccagcaagctgcattctacattttagagaccccattggtatttgtgaatttgattgcaccaccgcttttcctttactaagtaatgttatggaaggagaatgaattttctcctctagtgattacaggacattaacatctcttcagaagctgcttttagcttaagccccaagaagtgaggtgggttgtggatcactgacatggtcaggggaggcccacacctcaattcagtaaccacctaatctctcccccaacctgatctctcatcagagctggcagcaacttgggattcctttcctttttcctgcctaacttttcattgaaatgtctagtaggagagtgagaaaagagaacaaaggctgggtcacagtcatagaatgttacagctggaatgggcatggaaatcatccaagttaaacttcttctctgccccccgcccccacttttttttttttttttttttaaccaaacgaacttgtgatccagtgccctattttatagtgtggttttccagggtctgaataaataatcattaaagtttgacacacgcagacacacgcaccaatgatggggatacccccaaatgatttaggaggttattttattttaatagttttttcttcctgatttttttcagttagttagagttaaatgtacctatagcccctgaatacatgctcaggtagagaaagtctccatagtataagtaagtaatatgaatgtggaatcttggaaagtgatatattttgattggaataattttaattaaatttaatgattttaattaagaattaaaagccagctagccaaattttctttaaaaattggaaactcattatggtcttaaattgtcctcaggcagccttttcctcatcaacccatagagtggtcttttgaactggtatctaaacatacctggttatgaattctcaaaagagaaagcaggtctggggcggggtggtcaggagacagattctagggaaagtgctgaagagattttcttctgaagatgatctaggaaatgcatctttatacatgattgttagctgctgtagctttctgaagaagattgtagaaaagagactaagatatatgcaagggtcaccagtttagagatcagtcaaattggaaaaagtgccaagactggatgtgcagattgttctatgtattatcagtatttttttcctcttaagaaaaaaatttactctctctcctttgtgagtaaatgcctccttaatgccttttaagtaaggtggcaacttttaactgtcatcttgtgagaggcaacctcaaactctaagcagactccctctctccctttctggtgtcttaaatcaagaactagtttgaagccaaggcaaagcaaggtttgttcatcttcctttcctgtcatttaaggtaaaacaggcaatgaactcgctcttcaaataccatagttcaagagtagctgttggccctggttccagattaatatagcagcaggcagattgccccttcttggggccaccaccctccaaagctgtgccaccaatgagagcattgggttcaagtttgcatcaaacatggtattaccaacgctgagcctccagcagagcacttaaaagtcctagtgagagaatagatactatgcaagggaaaaaaatttaaatgccaacgaatagtttttttttttttgaacctgatacactgtttgtttactctcaactctttgtacaaatattattgtcctaagggccttttcccctcctgcctagaaaataggttgtgtattggttttattcaacctgctgtctgctttaggattggagaaggtacctggatccttgtggactgccactgctggctgcctcctctccaactcatcagaagagcattttgacaaagacagaggacttggaccagggcatgccctgttggggatgtttctgtcagcaaggacatggcatggaatcaagtgggctgatgtgttgttatttaaacagtaccaaagtgcattcttcaatgtatgtttgcctgcttgaagcaaggcccaagttgagaatacagtaaaggaaactcatgaaagtggatgttctgtttatagtcagagtcttgtctctggtgaacaatctcagacaaaaacatgggttaagcttaggctgtgtgtggatttttggtgctgtatgtgctctgggagatgccccatgttggatgtcttgctttggcattcagaatggcagtagagattaggagcagggatggggtttccatggtgtacaactacgtcttttggcataag

SEQ ID NO: 7902 - DNA, 2300 bp, Homo sapien
gaattctttgtctgagagatcacacatctctattactttatgtttgatctctggcatcttattttgtctgtttggtgacgtcatatttccctgaatattcctgatgtttgtagaagtgtgatgatatccgtgccttgaaatattaggtatttatttttgcctttgtagtctggctttgtgtgtgcctgtccttcttcagagggacttccagggattctaggcagactgactgttacatttcctgagcttgggaccactactggcatctcagcactgagcgatggtctaaacccaggcttgctgcaagtcttgcaaagactgagattggtgtggctttctggcccaaatggctctgggaagacccaaacacaggactggggctatgtgggaatgttggccaaggggacctgagtccagaacactgtcccagtggcccagatatgtgttcctcccagcaggtctctgcatgggcaggatgggtcccagctgtagccagagggactgaatttaagactggggcatgttgggatctgttgtaggaatgaagctggtggtccatctcattggcttagacaggtgtatgtcacctagcaggtccctgcacaagtagttccttgactgcaacaagagggaccagaactgagactgggtccccttgggatctgccgtgggatggaggctggtgtgcctgtcatggtggttcagacaggcacacatctgcctgcatgtctccgcacagatggaataattccctgattgtagagggaggggctggaactgaccataggcccccttgggatctgctgtggaacagaggctagagagccctgtcttggttcagggaggtgcacattgcctagcaagttcctgcacagataggatagttccctgactatagcaggcggggccaaatcgcagactgggcccacacaggatctgctgtgaggtagaggctggagagcccagtctcattggctcagaggggcatgtgtctcctagcaagtccctatgcagatgagatagtaacctgattgcagcaggaggggccagggctgacactgggccccgctgggatttgatatgggaagaagcccatcttgttggcccagacaggcatgtgtctcccagcaggtctcagcacagataggataattctccactgtagtgacaggggtcagagctgagactgggtcctctcaggatttgctgtagggtaaaggctagaaagcccagcctcattggctcagaggggcatgtgtcttccagcaagtccctgcacagtctggttagttctctgattgcagctggagggaccaggtctcaaactgggtcccctcagaatttgctgtgggacagaagttggtgaactcatctgggagcctcaggctgcaagatataggtgagtctccctctgggtccttgtgcaagaggctgtgagcagggacctcagctgagagggggtggatcagaaaaacggcaactttcaggcttactgctaagatcaatgtcagcaggcagacaagcctttccaccaaggcactagtgtgcactactccttctggacctctctgcagatggttttggttgcaggctcaaggccaaatatggctgtagcccaggaccttggaagcctggggtgtttctaggcttgaactggggagcaagcttggtggatcagccacttgggtgttggtctgtaccctcaaaacaatccttcaatgtcttgggatccaccagggtttcaaaaactcctacctgaatcttgatgctcctgcagagagacttttgactgtgggcgggtgtggaatttttgtggttgtgaggggacatgagtgggttactttctattccaccatcttctctctgcctttttgcattctgagagtctctccactcagtcttccattttatgaattagttcacctgggtccattcttctatccagcacatgtatgagttattttcattataaatttacagctttgttagtagctttgcttccacaacaatctgcttttgtttcaggagtgaaacttttgaatttctcagaggatactaattattctattttgaagtttttataacttttgttaaataaactgtttttattcaggtgataattcttcccttttttatattgttaattttcctcaaatagtaggagattcttgattattcagtctttttgtgtaacaatcctcaatcagaagcttaaaatgcagtaattcctgtgattgtggggagagcaggatgcgcgttcagacagcgtgcccatctttctagaggtgctgttgttttct

SEQ ID NO: 7903 - DNA, 2300 bp, Homo sapien
ctgcatgaagtgctcctgtggcattttgttcatgggttgggttagttcaattaacaatcattgagactcttccttcagtaggccaggtcctgtgtgagatgcaggataaagagataagtacaggctcacgcctgtaatcccagcactttgggaggccgaggcgggcggatcacgaggtcaggagatcaagaccatcatggctaacatgttgaaaccccgtctctactaaaaatacaaaaaattacccaggcatggtggcgggcgcctgtagtcccagcttctagggaggctgaggcaggagaatggcgtgagcccgggaggcggagcttgcagtgagctgagatagcgacactgcactccagcctgggtgacagagcaagactccgtctcaaaaaaaaaaaaaaagaaaaagaggtaagtaggacccaggcctgacctgaccttggagatactcacagcctgtagtgaggtggggaacaaacaaggaagcaggcattataatacagtgtggtatagtgcctgtattagtccattttcacactgctataaagaactgctcaagactgggtaatttataaaggaaagaggtttaattgactcacggttctgcatggctggggaggcctcaggaaatttacaatcatggcggaaagggaagaggcaagtcttacatggcaacaggcaagagagggcaagagtgtgaaggaggaactgtcagttataaaaccatcagatctcgtgagagctcactcactatggtgaggacagcatgggggaccacctccttgatccaatcacttcctactaggtctctctctcaacacatggggattatggggattacaattcaagatgagatttgggtggggacacaaagcctaaccatgttagtgcctccattaagaagtgggcctgatggctgggcaagggggttcacgcctgtaatcccaacactttgagaggctgagttgggagtttgaggcagcctgggcaacatggtgaaaacccatctctatcaaaaatatagaaatttagctgggcatggtagcacacgtctgtggtccagctacttgggaggctaaggtgggaggattgcttgagtctgggaggtggaggttgcagtgagctgagatcatgccactgcactccagcctgggtaacagagtgagaccttgtctcaagaaaaaaagaaaaaataaataaaaaaagaagtgggcttgaggaggctcagcctaaggagagggagatacaggaaagctaatctgtatgtagccgggcaaggaagaggggcagaaatgtgataggccaaaggaatggaacaagcaaaaatatgccttactctgtgtgtgtgtgtgtgagagagagagaaagagagatgtttgttttggaggaagcgctacagtcagattggcattagctgcatcaagtttgagatggagaccagaggtaactaaagctaaccaggaagtcagcctccaaatctggaactttgacttttttttctaccatataaagatcttacttgtcttagataatgtaaccaggggttatgtgcccttcttggcccattagttgtagatctacaccttctcacctaatattcctaatagggaactagaatttctgcgatagcatccaggtctgcatgcctcctacaggcttcagtgtgagtcatcttttgtattatatgcatggcaaatatcttttcccagactgtgtcttatctttcaactttgactttcctatttttatctggcagaaatttattttgtgtaaataatcatgtaaacgatcccgtcctttcaggtttgtgcttcgtgtgtctgatttaagcactccagccataccccactatcataattatattctcctataccaccttcccatctatgtcttgtctttgtctccatctctgtattggtatctatctgtttcttggatccttagtcctacgggcaaggactaaaggcaagacaaatattggagtggaaggctcacagtagaatataattaatgaggaagttcaagagctctgaatagcaggctaagaaggaatataatatttatcttacaggcaaagaaacaagtgaagaaacaaaaaaaaaaggaagttaaggggccattcccaaagtcaaagatcaagtaagtactctggagacctgaagccaggtcaccatattctgtaagttactgaaggcttctccaacagccatcatatttaacattttccagccagcaaattacatcacatctaacattttccagccagcaagttactcattcattctttcatttacctc

SEQ ID NO: 7904 - DNA, 2300 bp, Homo sapien
gggtgaagaaagaagaagcaagtatcagaaatagtttcacagggtaggtgacattaaagctggatcttgaaagatgagaagttggcctggtgtggtggttcatgcctgtaatcccagcactttgggaggccgaagcagacggatcacttgaggtcatgagttcaagactaggctgtccaacacggcgaaatcctgtctctactaaaaatataaaaattagccaggtgtggtggcatgtgcctgtagtcccagctacaaagactacagcttgggaggctgaggcacaagaactgcttgaacccaggaggcagaggttgcagtgagccaagatcccaccactgcactccagcctgggtgacagagtgagactctgtctcaaaaaataaaaaataaaataaaaagtgactagggcaatgctgtatcatctcactttattttaaataaaagaaaaatgagaagttgtaaaagataaactgcaacaacaagctacaggggatctgactagtgtccacggattgcttcacagaggtaatgaaatatcatctgatgttattgctatttagtgatatttattttctttttagtaataatttagttatttagtgataattattttcttttctttctgatctcggctcactgcaacctccgcctccccggttcaagcaattctcctgcctcagcctcccaagtagctgggattacaggtgcccgctaccacgcccggctcatttttgtatttttagtagagacggggtttcaccatgttggccaggctggtctttaactcctgacctcaggtgatccgcctgccttggcggggattacaaccatgagcccccacgcccggccgagataattattttcacatgaattttggcttccccaagacaagtttttgtctgttttattcagggatatatccctggtgactagaatagtgcctgttacatagtaagaaactcaaaaatatttgtttaattctttagacgcttatgggggatatataggaattaaaaaacaatacaacgtaatagagcatggtataatacaatactgctatttgataactctgtcatggagtagtagttccaccagagtagcaaccaggtctatcttgatcccctgtatccgttagtacaatattggtgctcaatatacatttgtgaaaaaaattaattaaaatacaacgtaatagagcatggtataatacaatactgctatttgataactctgtcatggagtagtagtccaccagagtagcaaccaggtctatcttgatcccctgtatccgttagtacaatattggtgctcaatatacatttgtgaaaaaaataattaaaatctagaatactattacatcctaaaaccgtaaaagcagagtgtcagaagggatatatattggttttgattttttttaaatgccggcttgaaaaccgagttcagatacatgctatctggctttgggtaggttctttagtttcctcctcatctaacagggctgttgtgggactcagtgagagagaggatggctggaagtgcacataggatactgcctggcagactgtaggcactcagtaaacgcgagttctccgttaacacgaaaacattacaaacagctaaaatgacagctgcttgagagaataatcggtaagtgccacaaccgggctagaaaaggatgaaggacaagctcctgcccactcctttggaaactccacacctgggccggagaaagactcgaattcgaaaactaagtttcagtcgcacctgcctccggcgtcgcttcagcctccgaggggtctgcggaggcgacgtcccagtcaggagggatgcgcgcctgcgagccccccggggatctcggagccgctccactgcggtgcctgccgctatcttccccacgccttagtaactgcgacgcgacggcagacagtgtaggcggcaaccgacggccgggacgtctaacctcaagtcccagcaagccccgcggccacgtcctctgactacctcgcgccagcaagacccaaactacggatcccgattgactccgcgcggcgcgtcacgctgtcagctccagccaatcggcttcagacaagtcggaggggagggagacgcagaggcggacaagatggcggcggcagctgtacagggcgggagaagcggtggtagcggaggctgtagtggggctggtggtgcttccaactgcgggacaggaagtggccgtagcggcttgttggataaggtgaggagccggttcttgggaacagttgaatcctggggaggcctgggaggcggcgagccaa

SEQ ID NO: 7905 - DNA, 2300 bp, Homo sapien
taatgtgtactgtcttacttggttcttcccaaaaccctgtgatctaggtgccagagattccaaaattccaaatgaagaaaggttaagtgacttgccaatcttcatactgttagcaagtagcagaaatacttcaaagctgaaatcttatgatccccacatccgggttctttcaataacacaatggtgccatatacactattccataataatagtattctatactgccttagcagaatgcccatacttaatgtttgctgatgatgatccaagtgcaaggaagagcaagagcagttagtggggcaggtaagcacaggctatgaggtgcttacctagcaagagggaaggatttgtgtacacaaatgaccatcaattccccatactctcacatgtcttgaagcaatttaccatcccaacctccagaatatgtttctgtatcttaaggtttgagtgtgaggccaggtgcatggtgacttatgcctgtaatcccagcactttggggagccaaggtgggaggatctcttgaggcccaggaatttgagaccagccagggcaacacagtaagaccctgactctacagaaaagttaaaagcaaaaaaattagtcaggcatagtggtgcacatttgcagtcccagctactcaggaagctggggtgggaagatcacctaagcttaagagttcaaggccgcagtgagctaagatccattctgggcaatggagcgtgacccctctcacaagagaagagtgtgagaaccatgtctttcaaaaccaatgacactcaaaaagacaagtaaaaagacctggatcttaacccctcaacataatcatgttttcatttcttaagcacctaccatgtgttatgcacagggaagtctgaaagctgttttcaattatattcaaaaattctgcttactatattaaagacaccatgcttaacaattctcatcaaaccagcccagggccctacaatgagagaactggaagggaatttagagttaagtccctcattttaaggctaaatctctcactttgcagatgagaaaacagatatagagagagcaagcatatttcaaggtcacaaagctaattagaggcaaaatcaacaccaggacgttgttctccgtgcaactgtttcttccaagatgctgtgcaaagagcaagaaaggccaacccagggacagttttcctttttttcttttcttttaaacccttgttgctaggactgcagttaaaaaaaatttttttggatgagcagagggaggaaaggggcaagcgtgagcgggcagcagtgcacttggtagcaaagagggaggtggagggaagagaggagagggcggggaaaaacaacaggaaaaaaagaaaaatcttaaaggcttcttgtcagcccagtagaacagtcaatactcaaatattttcagtattcgcctatcatgataaaacgcctaaaaacttcagtaagcaaaaggacaagaagcactttggaatctgtagcagcacgcaagggtgatggtggtagagagtttgggggatactgattctttaatctttgggcttcggttttccgtgtctgtgaaatgggcactgacaacagtgcacccagccccccaggagaaaagagatggacacgattaaatataggaaaaatcaaattaccgaaaaaggtgtggcgaccaggaccagaacacttgcgagaaaagaagaagttctaaagaggaccgggtccaggtttgaagtgtgatgagggcaagggcaggctccaagcgtgcgtagggttgtgatagtggtcacacaagggctcccctcaaaaggccgtagaaaataagggagaccgggatgggaaggttggctcgccgcctcccaggcctccccaggattcaactgttcccaagaaccggctcctcaccttatccaacaagccgctacggccacttcctgtcccgcagttggaagcaccaccagccccactacagcctccgctaccaccgcttctcccgccctgtacagctgccgccgccatcttgtccgcctctgcgtctccctcccctccgacttgtctgaagccgattggctggagctgacagcgtgacgcgccgcgcggagtcaatcgggatccgtagtttgggtcttgctggcgcgaggtagtcagaggacgtggccgcggggcttgctgggacttgaggttagacgtcccggccgtcggttgccgcctacactgtctgccgtcgcgtcgcagttactaaggcgtggggaagatagcggcaggcaccgcagtggagcggctccgagatccccggggggctcg

SEQ ID NO: 7906 - DNA, 2300 bp, Homo sapien
tatcctctgacttttaaaggcaagtttcttttctgtgatgcaatgcaggcagtgaagtgtggctaggtgtctgagaatatgattttcctgtttttgaatgacccataatttttaaatgactttattctgactttatttcacaaataattcaaatgctatggtggatttggctctacaagttggttcttttgcatgtcttcaaagagggatttacttgacagtgtaaatgagctatctagctagaaaacctgctaatttctttttggttcagtttgtatctttaaaattagatgtcgtgtttgatttgtaggctggcagtctatggcagtcaatagtgcagtatgctgccatgagtaattttctcaaagaaaaatttttgcttttacagggcaccaagggggaaaaaaaacttgattgacttttaatcactttaagtatggctatttttagctcatgttatttcttctaacaaacttcacagaacaggttttctcttttgtgtaataatatatagaatcacagttaaaaaaaaaacaaggttgatgaattgtatttctgtagttgtttaaaatctttacaattatttttatcccatctcttattttattttttattgtttgtttgtttgtttgtttgtttatttatttatttatttattttcagagacaagctctcactatattgcccaggctggactcgagctcctgggctcaagctgttctgccacctcagcctcccaagtatctgggatggcaggtactcaccactgccatctctttatttcttataggcattatctttgtacttgtgctcaatccgaaagataaatatgacattctctgtctttcagtaaaataatccattctaaatccagatgaacgttggattgcttgctggtttgtaatttttatggaatacaatatttgttcacttgatctaaaaaattaagagttggccattaatggtctacaaaaaacaggtttgtcagattatttgtagcaccctgttcctcttaagctatatttacttaaatacttgcatttgagaaaattttttactatgtaatatattcacatggttaaaaaattttaaaggcacacatagagtaatcttactcctccccgtatttctctaccctgataagatatctggatgtaccgtagtttgtttaaccaatccccttgtaaatgagcactcgagttacctccagcttttcactattacagacaatgctgcagtgagtagccttgtatttcatttcacatgtattcagttatagaaacattcctggaagtgggaagttgaattcagggtgctaagttggcattcgtaggtgctgtaacattttgaacttctacatgagcagtgagagaattatttgcttctgaatagcagtgtttgggaaactttctaaacctctatagataagggaaatagaagtagagtttgtccactcaactcgtgttgggactgagtctgggacttggtttgtaatttaaaatgtagtgttgtttccaacaggctatcctggaattgctatcttaaagttaagacatgctggtaaaataataaaagttgttagctgacaaagtgatattaaaggagatcctccccattttgttagtatctgtaaattcatgtatctgtattttctgagttttgtggtcacagaaagaaagaatgaacaaatagagtaattttctgtactcacatttcggtaaaatgaaggtgggatatacaagtttacacttacagtctgtgcagcccatatacgttttctggttctggggttgtttttatattctctgcatggagactggcaacatcagcatcacatgagtaccacctgactctagtgacctagtctctttcaacctgatttttaattgtttggtcttttttgtttgtttttaactgcttcttgcagggctaccccataggagtgtgcccagaatagcctgttttgtcttttagttctgcaacatcagaagacaaagagtaaatattatatgtgcatgagggatgctcttaaaaaatggttcattttactttcagtaagaggccaggtttcttgatgcacaacttttttgtttgttttacagtggaagatagatgataagcctgtaaaaattgacaagtgggatggatcagctgtgaaaaactctttggatgattctgccaaaaaggtactttcttgaggaggggttggttagtatctatacagctgatggccatctctcctgggaaatcttttccttttgtaacttggagtgaccttagttttcagtgttagaaattaa

SEQ ID NO: 7907 - DNA, 2300 bp, Homo sapien
gtactcaccactgccatctctttatttcttataggcattatctttgtacttgtgctcaatccgaaagataaatatgacattctctgtctttcagtaaaataatccattctaaatccagatgaacgttggattgcttgctggtttgtaatttttatggaatacaatatttgttcacttgatctaaaaaattaagagttggccattaatggtctacaaaaaacaggtttgtcagattatttgtagcaccctgttcctcttaagctatatttacttaaatacttgcatttgagaaaattttttactatgtaatatattcacatggttaaaaaattttaaaggcacacatagagtaatcttactcctccccgtatttctctaccctgataagatatctggatgtaccgtagtttgtttaaccaatccccttgtaaatgagcactcgagttacctccagcttttcactattacagacaatgctgcagtgagtagccttgtatttcatttcacatgtattcagttatagaaacattcctggaagtgggaagttgaattcagggtgctaagttggcattcgtaggtgctgtaacattttgaacttctacatgagcagtgagagaattatttgcttctgaatagcagtgtttgggaaactttctaaacctctatagataagggaaatagaagtagagtttgtccactcaactcgtgttgggactgagtctgggacttggtttgtaatttaaaatgtagtgttgtttccaacaggctatcctggaattgctatcttaaagttaagacatgctggtaaaataataaaagttgttagctgacaaagtgatattaaaggagatcctccccattttgttagtatctgtaaattcatgtatctgtattttctgagttttgtggtcacagaaagaaagaatgaacaaatagagtaattttctgtactcacatttcggtaaaatgaaggtgggatatacaagtttacacttacagtctgtgcagcccatatacgttttctggttctggggttgtttttatattctctgcatggagactggcaacatcagcatcacatgagtaccacctgactctagtgacctagtctctttcaacctgatttttaattgtttggtcttttttgtttgtttttaactgcttcttgcagggctaccccataggagtgtgcccagaatagcctgttttgtcttttagttctgcaacatcagaagacaaagagtaaatattatatgtgcatgagggatgctcttaaaaaatggttcattttactttcagtaagaggccaggtttcttgatgcacaacttttttgtttgttttacagtggaagatagatgataagcctgtaaaaattgacaagtgggatggatcagctgtgaaaaactctttggatgattctgccaaaaaggtactttcttgaggaggggttggttagtatctatacagctgatggccatctctcctgggaaatcttttccttttgtaacttggagtgaccttagttttcagtgttagaaattaagtcagaaagcagtttctaaaatttctcacagaaaaagtcagaggaagtgtgttgaaatatcaccaacatggcacatgtatacatatgtaacaaacctgcacgttgtgcacatgtaccctaaaacttaaagtataataataataaaattaaaaaaaaaagaaatatagatgttggctatctcaagaaagctggtaattttttgtttttgagattaattagcctagagcacagaagggtgagagaagataggacattcattcatgataaatcatctctccatttgtaaaagtaaaacattttagctgtgggaaaagttgaggagtttaaagttttttatatgagggattgatgaactttttctcttggttctttatagaaggcttgagttttacttgtttggtgtggtaaaatcccaactggagggaactacttggtaattcatatgattcttttatcatggaaatcaagaataaaagcacatactggggaggaagtattcctattagcttgattccttgtttttctcaccaggtacttctggaaaaatacaaatatgtggagaattttggtctaattgatggtcgcctcaccatctgtacaatctcctgtttctttgccatagtggctttgatttgggattatatgcacccctttccagagtccaaacccgttttggctttgtgtgtcatatcatatcctttatttatgctcaggttgttttctagtgactatttttttaaatctgctgatatttct

SEQ ID NO: 7908 - DNA, 2300 bp, Homo sapien
tgtaaccggataagtgtatttttacaatggaggagttacagtcatcttggtatttgtgggagattggttccaggatccccaagcataccaaaatccaaggatgctcaagtcccttatataaaatggtatagcatttgcatataacctacacacatcctcccatatacttttaatcacctctggattacctataatacctaatataatgtaaatgctatgtaaatagttatactgcattggttttttaatttatattttttgttattttttaaaatatatttttaatccatggttggttaaatctgtagatatagagggccaactgtactgttagacacaagggtctcgaggcttgcagatagagactgaataaccctctccatgatgatcccttagagttcccccactgtgcctttttctttacatgtgcatgcaaacatgtgtctccacatacattttttttaacaaaaattgaattatgttgatatatgtcctgtaatttgtgttttaaacttaatatatcttaggcattttccctgtgtgtgtgtataatgcagctattaaaaatgagtctgaggccaggcatggtggctcacgcctttaatcctagcactttgggagaccaagacaggtaaatcacctgaggtcaggagttcgagaccaccttggccaacatggtgaaaccacatctctactaaaaatacaaaaaattggctgggcatggtggcagatgcctgtaatcccagctacttgggaggctgaggcaggagaatggcttgaactgggaggcggaggttgcagtgagccgagatcacaccctgcactccagcctgggcaacaagagcaaaactccgtctcaaaaaagaaaaaaaaaagagtctgacatacatatatataaaagaaactgttctaaaataccagaagtgcaaaggcaggggaccaattgcaacaagtagctggggtgataacccctatatatatatacacataggtcagtctcatttttaatagctacataatattccatagtataagtgattttactttaataccctattgatgataatttttccccagtttttttcactattccaggaaggagtatggattgaggagaggggaagaaaataggtcctcaaatgagagacaagaaacctgggttgttagcaacttttttctaatttgtgaccttgaatacatcctattccttttctagggtgaagtctcttgttaaaaaaaaaaagttttagagaatgtattttgagattatgaagactccttattccctgggaaataaaaaacatcccttatgattacaaagaatgttgggtgccatatccccaatatctgcctataaggctcactggagacttcttggactacatggatctattttaaggtttttccctgactccagaaaccagttgaagcagtttagatttgttgaagaagtgggttatcagcccagctacatgttgcagttggtcccctgtctttgcacttgtggcattttaggagtgtctcatcacatgaacaaaaagtaccctctgcaggctcaagcctcagcatgggcacactttgtagagctgcagagtgcctctggccagcttctgacacatgcatctactgagtggccatttcagcccagtccagaaggctgctgggctgctctgtaccctctagtaggtctgcaacacccttgccaccaggaaaccctgacacccatcacatcatcatgagtgaagttctcagttcctcacacttacctcagacggacttttttctagaaaatagagggccactgaggacagtggaaaaagatcctaatgttttttcattatttgcaaatttcaactgctaatatgtatttaatgtttgtcatgcttttatatacgtgtagaaacaatctttgcttcagaacaatttcggggaatggaagaagatgcaaagtccctttgcatacacacaagttgtgtttttctctggacccaagttcctcctcagcttggagcccgatctctcactaactctaccttatccactcctggctagccccacccacaccccaaaccttttctccatggtggaagtcatcagagaaaactgttaatagcacgttaatttagacttttagaatatatcctgtccccactgacagccttttttgttattaaatagagtattcctaacaacccaacccaccctatggtccccttctcagaataatgttttaaatacatacacatatcattgtctgttaataaggaactggggaggtggttccagagttactggaacag

SEQ ID NO: 7909 - DNA, 2300 bp, Homo sapien
ggccttcctaaggataacctgttaggcctgctatggtaaatctgcacaagtaccattctctctgtattgtgcaacttgcttttttgttcaatattttgtttgtgaagataatttagattgatacctgtagctacaatttattctatttcactgctgtatactgttaaacatgacagtttatttaccctattaatggacatttaggtcttttataatttttcactattaaacatttgctgctatgagcattcttgtatggacacatctaatacaggtagtgggattccttggtgggagaggatatacatttttacttttctaggtattgctaaattttcctctaaagcgactgtaccaatttacattccttctattaatgaaggaaatacaagattggaataattgggatagttgtgttatctttgtgaatagattttaaaatactgatttagatttttaaatagttgtaagacttcacattttccatatcttagtttggtaactttttctaaaactgtattaactttatctagattttcaaacttaaggaataaagtttgtttaatatttatttctcatctctgttgtatccctgcatatagtctccttttcattaatatcatttataacttttaaaaatgagtcttgccagagggtttgtccggtttattagatatgtcaagactaatatttgcttttgtcagtcccctctattgtactttgcttcttgtttcatttattctgttcttattttcatcatttccttttctacctttttgggatttattctgttcttccttttctacattcttaagttagatccttaactcattactgttttgttgttcttatctcctggtatagggtctttatttgagttctcccagaggcaagttctgagaccaggacctgagggcaatagtatatgtgagagatgcagggagtgccataatgaggtgggaaagtaggaagggaagaaaaggtgagcaataagggtgtagcttttagtagctattgataattgctgtctagattcattaaattcattttgtcattaaaggacaaaatgatgaaattctatcattcatttggcattggtcagttaattattttatgaaggagaacttttccccatcaactatttagttacccagaaatagggtttgtacaggaaaggcagaataaaaagctgctttccttagcaaactctgaggtgaccaaagtgacatttttctccatatgtcgatatgaactttctttgcagtccttgttctttttgatgttctaatttttccatatttggccagtggaatcaccttcaaattgattcttaccttcttttgacatgacctgaaatagtcttttatggctttcttgctttctgttaagatgttctaggctaatcttataaattttcttccctgcacctaaaatcagccatttttttcatggaaccctggttcctttggggacaaaatagtattttaagacccattattgccaggcgcggtggctcacgcctgtaatcccagcactttggtaggccgaggcgggcggatcacgaggtcaggagatcgagatcatcctggctaacatggtgaaaccccgtctctataaaaaatacaaaaaattagccgggcgtggtggtgggcgcctgtagtcccagctactcgggaggctgaggcaggagaatggcgtgaacccgggaggcggagcttgcagtgagccaagatgacgccactgcactccagcctgggcggcagagacacactccatctcaaaaaataaaaataaaaataaaaaagacccattatttgggcttattacgatgagttggtctctggttctaggcctttttttttttcttttttttttttttttttttagaaaaatacagcaggttgtattgaggttggcacctatgttctttcaaagaaccctcatcattttgtgagttctttccttgtggcaccacgatgttccaggctcatcttgtatgttccctgcctcagcacaggattttttttaatgagaaaaatatcacgaattcaaatttacagaagctttacatttttatgtcctctaagttagcagtctgtctttccttttattggcgtttgtaaaatttcttctttttaaaattgttatattttagagacagggtctcgctctgtcacccaggctggagtgcagtggtgcaatcacagctcaccacagcctccaactcctgggctcaaggcatcctcccacgtaggccttccaaagcgctgagattgtaggcataagccaccaggcccagc

SEQ ID NO: 7910 - DNA, 2300 bp, Homo sapien
tgggatttattctgttcttccttttctacattcttaagttagatccttaactcattactgttttgttgttcttatctcctggtatagggtctttatttgagttctcccagaggcaagttctgagaccaggacctgagggcaatagtatatgtgagagatgcagggagtgccataatgaggtgggaaagtaggaagggaagaaaaggtgagcaataagggtgtagcttttagtagctattgataattgctgtctagattcattaaattcattttgtcattaaaggacaaaatgatgaaattctatcattcatttggcattggtcagttaattattttatgaaggagaacttttccccatcaactatttagttacccagaaatagggtttgtacaggaaaggcagaataaaaagctgctttccttagcaaactctgaggtgaccaaagtgacatttttctccatatgtcgatatgaactttctttgcagtccttgttctttttgatgttctaatttttccatatttggccagtggaatcaccttcaaattgattcttaccttcttttgacatgacctgaaatagtcttttatggctttcttgctttctgttaagatgttctaggctaatcttataaattttcttccctgcacctaaaatcagccatttttttcatggaaccctggttcctttggggacaaaatagtattttaagacccattattgccaggcgcggtggctcacgcctgtaatcccagcactttggtaggccgaggcgggcggatcacgaggtcaggagatcgagatcatcctggctaacatggtgaaaccccgtctctataaaaaatacaaaaaattagccgggcgtggtggtgggcgcctgtagtcccagctactcgggaggctgaggcaggagaatggcgtgaacccgggaggcggagcttgcagtgagccaagatgacgccactgcactccagcctgggcggcagagacacactccatctcaaaaaataaaaataaaaataaaaaagacccattatttgggcttattacgatgagttggtctctggttctaggcctttttttttttcttttttttttttttttttttagaaaaatacagcaggttgtattgaggttggcacctatgttctttcaaagaaccctcatcattttgtgagttctttccttgtggcaccacgatgttccaggctcatcttgtatgttccctgcctcagcacaggattttttttaatgagaaaaatatcacgaattcaaatttacagaagctttacatttttatgtcctctaagttagcagtctgtctttccttttattggcgtttgtaaaatttcttctttttaaaattgttatattttagagacagggtctcgctctgtcacccaggctggagtgcagtggtgcaatcacagctcaccacagcctccaactcctgggctcaaggcatcctcccacgtaggccttccaaagcgctgagattgtaggcataagccaccaggcccagcctattacctttacgttgtacttagtcccagataaaaaatgaccttagatcagtcctttcctctttggctggggagaggggggcttaaattccggtactgtgaaacagaagaatggactcagtgctatgtgacaaatctatgtatgtaaatgtgtgtatatacacacacataaattatatatatgaatatattttcattttcatattttgcaaggagagtagccaatgctctggacctctggtcctttttgtagggtaccctctgaggccgggaacctttgctcaactctcaggctgtccagggaagctttaggcggtgataccgagctacagaccaatataagagctcggggctgtggcactgaagagaggaggcggccgttgggaactgaggtgggcccagggcttgagctgagttggcgagggtggaggtggtgccggtcccacgccgtggtggggaccgagctgcgggctggagggaggggcagcgccgagggggcgggacggggagggctcgcggagtaggccaacggttggccccaaccgccactgactacagcctgcgcccgcctcttttcgttgccgttacctgtttccggcagtcgacacgctcttcgcttctcggggcttgtctccgtgtcctccgtctcagttgtttctccctctctatcctcctctgtctcagtctccccagccttggggccggtgcctcttccgggcttcggcgaatgagacctgcggacctgcccccgcgccccatggaagaatccccggcgtc

SEQ ID NO: 7911 - DNA, 2300 bp, Homo sapien
ttattgtgcattgcttgactcaaagatcaatgagataggccgggcgggcacagtggctcacacctgtaatcccagcactttgggaggccaaggtgggtggatcacttgaggccaggaatttgagaccagtctggccaaaatggtgaaaccctgtctctactaaaaatacaaaaatcagccaggtgtggtggcacgtgcctgtaatcccagctactcgggaggccgaggtacgagaatcacttcaacctgggaggccgaggttgcagtgagctgagattgtgccactgcactccagcctgggcaacagagagagactgcatttcaaaaacaaacaaacaaacaaacaaacaaacaaacaaaaagaaaaagatcaatcagataaacttagccagacaagctggtccccctaccaagaccattccatgcacagaacttcttcaggccctggggccaaggtgggggtaactgggcttccagaaagtttaaagggatcttcatacctgtaatttggagtctggaaggttgcacccccgccagtcttcatgaggattcacaatgctgacgttcgtcagaaggatttggagagatagacccaatttggttttctcaagtagggtctgatcaggtcagaccctgggtcaaacccatgagggtctggtctttctattaatccaagccagttcttgacctttctcagtggaatggtcatgtactcacatttctggtttctcaaagactcatttattcatgtaacaagtatctattgagtgcctcctgagtgccagggagatctgtgattatttcacacattccctacatcctactagcaccctcatacagcaaataggagccaagtggagctggtgtatgtttctctgttattgcaccctgaaagttagactccaaacccacatcctcattccacgcaaagactttattccagagacagggtcaggttcacttctgcatcttggatttggggaaacccagatcttcctcagagaagatatcctgggtggagggaaaagcctggttctatcattagaggttcaaggcacccaccacctactagctgggtgatctctggcaagttactgagactccatgcctcatttgtaaaatcagggaataaataacctgatgttacagtgtcaaggggaggacccagtggggccttgtgtgtgaaagtgctgtgcaagctgggaaaggcaaagtggatttgctttcccttgctgccctgttcggagccccacctctgccactcccttctctgagctccaggcctgcaggcttggcttctctgtccttcaccgaaccttcacagtggctctgcaagggattactgtcccttctttatagatgagagaatggacgctcagggagatgctgggacttgcctgagatcacttgaccagcaaataacaactgaggtgggacccagatctctctggctcctgaacctccatcctcagtcctcagtccaggaaactctgagaatttcatattttccattctcttcccctcctcctttgcctagatggctgaaattgatggaccttctaccatgagctccacccaggcaggctgccactggatacttagtggacagagccccttcttgctgtggatccttggagctcagggagaagatgagggatttagtgagagggcacgtgggcttgagggggacaggggttcagtgaaagaggacaactgctagatgggggaacaagggctctctatggggccctcctatcaagggagggcaacaaaagttctgtgaagggaacaagagcttggtaggagaagggctcaggtgggaaatgggagtgcagtgaggagactgggggatgaatgtggaaggttggggagcttggggagacccatcagcatcccccctgtgcccccacctctctgctgctaacagagcaggggaaaatacctaagggaaatgctgaggcaagaggctggaaaaggacaggctgaggctgagcctcagggaggcggggtgcagcttcctcttcacagagaggctggacttgaacaaacccagccttctatacaaccgtggagccagggcaagggagagacagaaggagcaagtgacccagggagacaaacacttggagatacttggggctgagtttgagcaagactccctaacctgtgtctggacaagtctgatgtcctgtgtggcccaagaagaactgaccccgtgtctggagctcccaccgttattgcatccctgctgtggctcacctgctgctgtctccaggagcccctgagaagatttgcttcct

SEQ ID NO: 7912 - DNA, 2300 bp, Homo sapien
agaagagatttcttgtcctcactctttgctaggctggtggctgaggtccctataacaaaagacagcttaacaggagaaaagcatacaaatttatttggcttttaaaaatttaatttacttattattatttttacatagagatggggtatcaccatgtcacccaggctactctggaactactgggcttggtaattctcccacctcggcctcccaaagtgttggaattacaggcgtgagccactgcgcctggcccaaatttatttaatataagttttacatgacacaggggccttcagaaatgaagacccaaagaaatgggaaaacgtgtgtattcttaaactttttagtttttattatattgaattaaattaaattatttatttatttattttttgagacagggtctcacgctgtcgcccaggctggagtgcagtggcatgatctcggctcactgcaacctctgactcccaggctcaagtgatcctcttgcctcggcctcccgagtagctgggattacaggcatgcaccaccacacctggctaattttttgcatttgtagtacagatgaggtttcaccatgttgcccaggctggtttattattttttaatcatctagcctaaaatgtcaaaaacttgtgactttttatgccaagtttgatgaagaagtatatagttgtggaagtattgcacaaagagtgtgtgagctaatggtgatacacttaggggaacctagcaaggcctgtttgttcagattcttctctgtgtccttgcatcttcaaagttaaggctgttttttttttctccaggtacaaagacagcaactctcaaatgagaatcttatgacctatttcagggtgaaaggtgggagaaggtcagagtggggtgactatcctaggttttatgacctgcttctactgttttctcaaatgtggccaaggtgccatatttggagaatagtgtgtcctgaattccatcagtaaatactgttatattcaccttacaaatggggaaactgaggctcagaaagctcagggatgtgcccaggctcacacagtgggcttgtagcacatctgggattccaacccaggtctgaggccttaaagcctattctcagcctcacatttccctgagatctgtcctttgctgctgggaggcagccaaaggaggcagaatcctgggcctttcccacagagaacaggtaaaggaaggcggtccttgcagtcaggctggtctctgaaaccttgctcctcatcacccagactcaggtggtgtggagaaggctgactctacccatgaagggcagccccttgaagggtgagtctctgactgaccagatacctgggaaacgaagtttgtggctgacagactttcaggaacttgtctgactgtcttatgaggagctgcaggcaggtggctgactgacggcctgaacggacagctctcctgaaagacagtagcccgccggctggctggcttaccagcaggtggacacgatgtgcctgcatgagtgatcagccaagtgaccgactgacagtcagacacacagacccattgcgggccagctcgggctgtgggtccctagcccctggagccacctggcctacctgggaccccaaaacttagctgcccacctgggagagagagggactgggttttttaaactagggcctggctctctgccccaggtcccttcattcccgcaggcaaccgcctgcccagcccaggttcagtcccatggccgtcccatcctcctgtcaggggtggcccctgacaaaggccccacagcacagggcagggtctcagtgcccttccacaggaggacacgcagtcctggactggaccatccttccaaggggagttccgccctgagtcagggaggcgaaggtttgctgtcagcgcgtcagcagagaccccagcccacaggaaaggctcggagggggtgggcagcctgcctgacaagccccattcagtgaccagctgacccccaatacatgactcgtgctcctctcagaacccggaggaatgtggccagtgcttccctcccctgcccagaggcacaggctgtggactttgccctccacaaacagccatatctctaaaggataaagtactcccaggaaggctttgagccttggcagaaaaggctgggattgaagcttcagggagagccagaggtgaggctggagtgggagatcacctgaggcaggtgagcaggctccatgagtgggcaggtgagaggccagggggctggaactggggctagacaggctggggcacagcaaggatgccaccagtatacc

SEQ ID NO: 7913 - DNA, 2300 bp, Homo sapien
atgcgcaagcatgcacacacactgtttctgttggagcagaagcacaagggttcatgaagggaaggcagggcccagaaaaagaggggccttgaatgccaggccaagagtggggactttctggagagcagtgggaagccatggatgggttttcagccaaggagtaacaagttcagatctgtgtttgatcacgcttgaggccatagtgtgggggcaggtgagcagagtacaggataggacacagaaggctagcgagcattcagtcagtcagtcagtcaacaaacttcactgatctcttcctctgtgccaggccctgttctgggagctgaggactcagagccaaggggcccagtggggaaatgaaggcaatgtaatcagcagcagtgcattctgaatcttaggagggctaagaccagccggttcctcctcccctttttcctcagttccccaaaatgacaaagggggacaatgtctgccttctcaggcccccaggctgtagtgaagcttgggggatttgtgggggcagcagcatcaggctggtggttatgacaacatctccctctctccagagtcctcccacctcccaccctcatgctgggcatcagcatctaaacctgaggctcctccagggagagacctgggctgcactggctggtgcagaagaacctgttgatggtgcatagtccttcagaagccagccaggcaccacctgggcctgagagcccttccagagacccccaggccttggcaggtggagcagtgaactcctgtggatatgggaaccgattcaaatccttcttaggcctctaactgactctgttaccttaggcaaattatttaactagtgcctcagtttcttggtctgtaaaataggggagatattattaagtgcctactacagagcaggaatgtgctgaataaatgctttacctggatgaattcattaactagtaagcaaagcgccacataacgttatccatgaaagcacatagcacagtgcctaggcaattttaaatactcagtaatacacatttctattacgcccattgtacagatgagaaatggaggcccaggaaaggaccagacattgcccagagtctcaataccagggctgggactaggcaccaaggccctggcctcccagccagccccctctttggagcatcacggaggcttggatttaggtgcagtatttggaggagggtgcagctgagaccgggccagcactcagggactgttgtcacactggcctggaatcgtgtcttgacatgtctgcctccttggattgtgaacatcttggctcagggatgggtggctcagtgcccagcacagctgctcagtaacagcttatgagtgcatgagtgaatgaggtaaggtggggcaggtgggcgcctgaacaggtgtggagctgaatgctctgggggaatgagactctgaggcagcagaaagattgaagtcattcataagaaaaacttcctgccatggaattagatgaatgtgaagggtcaggaaaaacccaagtgaagggtgaggaaaaacccaagtgaagcctccagcctttgcgttcatcctggcaacctctgcttctgagaaaaggagcaggggcaggatgcctctctcccaggaaccttgcttagcatttccctttcttgtccctccattgtatctccagcctgtagttggaggttcaggggccgcttttcctgcagtgtaagatgatatgcacttaggggtcacacagcttgtgtgaagggtcttcagacccttgtgtgaaggatcagcacagcttcatcatgtgcattggttctgccggccagtggagagtgcctggtcacccaaccctaagtgctcacgtgctcactctctcttgcctttgtctgattccacctgctaagtaacttcaaatctaaacccatttatccatccacccccaagcccactctatgatgggctccttggcctgcctccccgatctggtccctcctccatgcagctcccagaacaccctttgtaccacccagtctcatctaccccttgcttaaaattttcccaaggcccccagcatccacctcagggattcccaacccttttcacactgggaagtgtctgcagctgccagggctggaggtgagaggcccagagggctccagctgtccaggccagccagccacttcaagggttgatgggactaatccctgcacacctgtctcccatctgaggccctgtgtggctggggcacatgagtctagaagctctggtctatgggaaagcaaagagaagcccaggcctcttggcttgggctg

SEQ ID NO: 7914 - DNA, 2300 bp, Homo sapien
ctgcctgcccttggaggctcttgaagtctcttcctcctcttcccactccaggttttctacaccaactgcagctgcgtggtggagggcaaccccgtgctggcaggatcctgcgactcaacgtgcagccatctggtggtgcccttcctgctcctggtcagcctgggctcggccctggcctgtctcacccacacaccctccttcatgctcatcctaaggtgaaggtgggggtggggcaggggcaggtggataccaggaggtccttaaccacaggcagaacaaggaattccaaggacggagttcaagaaaggaggccacttgggtgtcctggcccccacaatatggccttaactgtgttcatcccatggcaacctactgaggcaaggttttctccccatcttgcagataagaaaattgaggctcagagaagttcaggagctggcccccatcacatagcaagtgttgggtggaatagtactggttccctggcccacagcccaggctcctacttgcccaggggagaggaggacatacctagggccctgtcctggcctctggaggtgagggcataatacctgcaatggatgagctgcaggaggtgcatctaggaaaccaaactgtgtcagtctggtgcatgactctgaatgctgcttcaaggctacatacaagtgcttattaggtgcccgctgtggacccaacccatgctgagcactgccttttgggccaagatctttgtggccctcgtcctaagaatgcctgctggccctgacaaattgtcacctgagttcaaagtcagggtctcctggggtgagggctgggataagaggactgagtgagaaaaaaatagtttttcctttttttttttttttttttttgagatgcagttttgctctgtctcccaggctggagtgcaatggcgcaatctcggctcactgcaacctcctcctcctgggttcacgccattctcctgcctcagcctccctagtagctgggattacaggcacccgccaccacacccaactaattgtatttttagcagagacggggtttcaccatgttggccaggacggtctcgaactcctgacctcagtgatccacctgccttggcctcccaaagtgctgggattacaggcatgagccaccacactcggctgagaaaaacagtttttctattctctcactcaacaatcaacacagaagacttctgcaaccagaagtgtgggggtattttcccacacaccaggcactcaattaattctgcagtggaccctagccagtgtcccccaattctattctgacacaatctacctggagacagcatcagatcccacaggctgagtgctcagtcccacaagactttccctccacttcccatgccaaccacaagcctcaggctgttttaccaatgattctgactgaccagccgtatgctggggtttccacagccccatctttgagtttgctttatttgctagagtggctcacagagctcaggaaaacatctacttaatgtttatcggtttattataaaagatattacaaaggatacagatgaagtgatgcatacggtgaggtatgggggaggagctttcatgccctccctggctgcatcctgcagggacctccatgtgttcagctatccggaagctcgccaaagcttcattatgtaggcatgattgattaaatcactggatattggcagtcacctcaaccttcagcccctctccccttgctggaggttggggctgaaagtcctaaccctctaatcctgccttggtccctctggtgaccaagccccagcctgaagctactaggggctgctcaccatcaatcaactcattagcatacaaaaagacacttttcactttgaacattccaagaattttaggagtgtatgccgggaagaccaaatacacatctcacaatatcacagggacctcagagcaagataatttccattttccttctcctgggattattttattcactatctactttctaggaaattagaagggaaatggagcctcttgcaaataccagaagacatgtagatctagaacacaagctggcctgggagagaaaatagaggaatcagatgcccaacaggcagcctgactaaaaggagttgagaacacagcctcagggctgcgtggatacaggccctgaccgctgtcagccatgagatcttggccaagttattgaatctgtctaagtgtcagtctccttatctgtaaaatggggctaatgtacacctcgctcataggagtgatgtggggttgcagggcagagttactgagcccgta

SEQ ID NO: 7915 - DNA, 2300 bp, Homo sapien
cagaagtccccactggtggcctctggccattgcctggggctgaatatccccaacccggggacgcctgtgagactccatgggagctacattcccgactcactccaccttgattcctctccctccctagtgcgccagtatgcagacatctgccttttcaacacagctcagtacaagtgccctgttgccatggaagaggctgagtaagtgggcacaagtctggccttgggcgtatgggattgggtgggaaaaagagaagctctaggtgtcctgttacaggtccaggtggctcttctccacctggcagagggctgggcctcagacttccttgccactcagagtagatgatcccgaagagccttttagaaaccatccacctgatttagcttcaagaaaatgcatgctacagtcaaggaagagacccactaaaactagagtgacaaaacaatagctaatgaatgtaaggggattggggttgtgagaagaaataattacgttgtacaagaaacctaggttgaagggaaatactttgttcttggcttcctggtagccagggcaaagtgggtaaggcactaggtacacagctcttgtctgataaaggggtaatccaactcattgggaaaaaggggttgtgtgtgggagtgcagagaataattacacacaaaaaaatcatctaggtttgaggagaactgctatggttgagcatggatcgaactttgtcccaggcttgttggcagctaaggcaagtggagagatctgaagtgaaacatctttacttacctaaaggaagtaaatgctcccattcaaagacatacacatttttttttcctggccctgcaagtaatttcttggggcaattatacctgatataattttacatgtatatgtgtatttgtttatgtataattccaatcagtatttcttgcaactgaaaatatttttaaaatgttactacatggcctttgaaatagtttttaatgtcctataggtgaacatgctatgattagatcaagctttctctggttactggatatttttcatatccactgttgattttttcaaaaaaatcagagctatgaggcatagattcctgatggtaaagtgaagtgatctagaaccagagtaacatataatccctaaagagtagaaaatcccaaccactgcagatggtgccagcgtctgcataacgaataccagcagggatggctggggaggcatttgcactcacagacttgtttacttctcaggaagcgctgtggggctggggttgctgctgccccagtatgtagaggaggaagtggctcagagagatgtgacttgcaagttagcaagcagcaaagctggggctggaacacggtcgtccgactccaaggcttgttcactatctgctgcatgacagctctctcattggaaaggatgggggatagagcaaaagcaagtaaaaattggacaatcaaaacaccctatatatgatggatgtgatcaagcaagtaaagttttaattgttgagcctagatggtgggtatatgggtgcccaaatagcttcatttatggtttatgtgtagctataattttttctttttaaaatgtgtttagagacagggctggtgctcacgcctataatcccagcacttggggaggctgaggcaggcagatcacttgaggtcaggagtttgagaccatcctggccaacatggcaaaacctcatctctactaaaaatacaaaaattagtcgggcatggtggcgcgcccctgtgatcccagctacttgggaggctgaggtaggagaactgcttcaacctgggaggtggaggttccagtgagccaggatcgcactactgtactctagcctgggcgacagagcaagactctgtctcaaaaaaataaaataaaataaaataaaataaaataaaataaatttaaattaaatttgtttagagacagagtttcactctgttgcccaggctggagtgcagtggtatgatcatggctcactacagccagcctcgaactcctgggctcaagtgatcctcctgcctcagcctcccaagtagctaggactacaggtgtgcaccaccatatcaggctaatgtttaaaattttttgtagcgatggggtcttgctatgttgcccaggctggtctcaaactcctagcctcaagcaatcctcctgtcagcctctcaagttgctgggattacaggcatgagcaactgtgcctgctgtggctgtactttttttttttttttttttgagatggagtcttgctctgtcacccaggctggagtgcagtggagcaatctcgg

SEQ ID NO: 7916 - DNA, 2300 bp, Homo sapien
gggaggctgaggcaggagaacggcccgaacccaggaggcagagcttgcagtgagccgagattgcgccactgcactccagcctgggtgacagagcaagactccgtctcaaaaaaaaaaaaaaaaaaaaaaatatatatatatatatatatatatatatgtttttcatagagcctggcaggtaaagcaaaattgtcctcttgactcttcttctgccatcgttgctccctcactggaatttaaagtaaattaaatcgaccgggagcagtggctcacgcctgtaatcccagcactttgggaggccaaggtgggtggatcacctaaggtcaggagttcgagaccagcctggccaacatggtgaatccctatctctacaaaaatacaaaaattagctgggcatgatggcagtggctgtaattccagctactggggaggctgaggtggcagaatttcttgaacccaggaggcagaggttgcagtgagccaagatcattccattgtactccagcctgggtggcagagcaagacttcgtctcaaaaataaataaaataaataaatatatttagatgttttgggcatcagcatggagagatccattggagatcttatggtttggtcaaacctgttttacaggtggggaaactgatgtggagagtggcaggacctggcttcaccatcctggttagggatctcctgtcatcaaagaagattctagtctgctcctttccagatctctgagccctgcagaaacaacaggtggcttcctcttcttcctctgtagagggtgaaacccagaggccaagactgggaggagggttctgggctttcatccatactctctagctcctaacattgcccagaggtgggccaccctgcctacccatcagcctccccctgcccctctgccaaatctggacataattatagtaattatactgcatataaacagtataggtaactgcttctgagcataattacaggagatgtttacatactcacaacagcatcagagtaaatgatagcttactttccccttaatacttagatatcagggacctatccgggataattagccaaatctcagtagtgagggtgtggtaaagaccttaccgtttcccactacctgcaaagcaggaaggcacctcagacaaagcagggtcccagccaagatttcacaggacatcaagaagcctgcagagaagtgggctaacatctactgggcacctactgtatgcaggcgctcaggggaggccagcaaacacaagcgagttctttcaacctattaacaattctgcaggctgatattagtgtatcctcactttacaggtccggacatgggttctcagaagcttagtgcacagggtcacccacagcgagccatggagctgggcatgggcgctttccacggtgctacccggtcacagcagcgggccagctctgccctcttcctttatcgcctcttctcacttctcacagcttcctcttcctgggcggcctcctgcagcccctgctggccgcgggtctccgctcagttccccagtgtcaaggccgtctactgccccctccgccccttcttcctgtccctgttgtgtggctgggtgttatctctccagtagaagggggtggggtgggtggaatggggaagggtggagcacagggcgaaggccttgccaggcatcccggggtctccagctaagcgaggggccgcagggagcgcggcctcggggtcgccagaccctcggcttccaaccacccgcacacacaaaggctgccccggcatgcgcgggagagcgcgctcgcacccacggccgtgcgcacacacgcacaactgcacaaagacgtgcacactcctccatccacaccaatacactccctaatagggcccgcacacagccgtgcgccctcacatacaccacaccaccaccaccaccaccacacacacacacacacactctcacacggactcgcacgcgggtggaccccctcccccaccacaaacgccgaccttggggccctgacgcgtcccgccgcgctgccctgcctcgctgggcggcgcgcgcacacgcagacgcgcacacacacacacatacacacacgcacacaccccgcgcggttccacgcccctggccgcggcccgggcgctgcgctgctcgacgcggcgggcggcgggcggggaccgggggcgggggcggcggcggcggccgggagagcggaggaggcggagcagggagccgggagcgggctggcccgcgctcctcctgctggctggggattttccagcctgggcgctgacgccgcggac

SEQ ID NO: 7917 - DNA, 2300 bp, Homo sapien
ctccagcctgggtgacagagcaagactccgtctcaaaaaaaaaaaaaaagaatagtgctggaaattatagactttgcaagtttatttaaacttacagtgaaaagttctacctatgtcaaggttctacataactttttaaaattttatttatttatttattttgagatggggtctcactttgccacccaagccagagtgcagtgctgccaactcggctcactgcaacctccggctttcaggttcaagcgattctcctgcctcagcctcctgagtagctggaattacaggcgcacgccaccacgcctggctaatttttgtacttttagtagagatggggtttcgccatgttggccaggctggtctagaactcctgacctcaagtgatccacccaccttggcctccccaagtgctggaattataggcatgagccaccacaccctgctcaaagttctgcatataactttaaacacacaaaagaaaaacacatccttcaaattcttggaggtggaatgtgagcaactctgaatcccagggctcaggctgtatacctgggagtggttcgtctgggttgtaggactgcaggatcaacattccttaaggatataccagactccacaaagcagctgtgctgctgtatttccccccagcaggcttggcaagatccattgttccacatccccatgaaggggtaaaagacaacgccaacctgaaatatgccagattggtatactgattattgcaagaggaaaacactggagaaattgtagtttctgaaaggctgagctgacctgtctcttgctacatgaagcaagcaataaagattcctctgggaggagtcccttctccacaccagacagagaaaataacacttatcaacggagactgggaattggaagtcaccatggacctgaataaacatacttaacagtaacccttatcttccacttggttcacagctcaccactaccatgtatctcctagtgacttccctagaaaatctactgccccatagccagattttcttggtgctgtcatttcttctcaaatgtatcactctatctaaaaagtataaaagtttcttgctttggccacttcttcatgcttcaccctcttacgaagatccccatatacatgtaaaattaatgaaatttgtatacttttctcttgttaatctgcctgttgttgatttcgtttctagatccagcggaagagctcactaagagctaaaagaaggggttacaggtgatctctggctccccaacactccccaagttgatgactgggtggggtcttgcagcattcctgaggcaaacacatccatcatctctccagggaagtccaaactaagcagaggttacttggagccaggacctcagactcccaagcctggtgagtcaggttttggggtttttgtatgtgtgtgtcttgctttttgttttttttttttttagagacagggtcttgctctgttgcccaggctgaagtgcagtggtacaaccttggctcactgcatcctcaaactcctgggctcaagcaatctccccacctcagcctcctgagcagctgggactacaggcatgggccaccatgcctgactaatttttattattattattatttttagatatacgatctcactatgttgcccaggctagtcttgaactcctggcctcaagccatcctcctgccttgacctcccaaagttctgggattataggtgtgagccaccgtgcctggccaagagtcaaggtctgaactagattggatggttctaatagcttctctttacgaaagccctcagcactcacccctaagttaaagctctctcttccctgtcatacctggttcctgtccctccctggtcagcttggctgcatgccagtccttggctcttcccctccccacttgcctccaagctaaccagctgcctgttcacacagccttattctgggtaggaagctgggaagttggtagcattggcttgttagcctcttgttcctgtcctccagctacttaagtggagtcacacagtatattcagacccatatgtgtggatttcactagtcaaatcctgggaagccagtctcctgcctgttgtttctgtggggcatgcccaccccccgctatgtattgttctccatgctcaggcctttgaatggagtttgaatggggttaccaatggtgtccacttggctgggggccaggtttgtaatggcggtaggatgcggagagcagcagccccaaccctttctgggaaacaaattgaccacgttgctgtagttggttgttatgaccacca

SEQ ID NO: 7918 - DNA, 2300 bp, Homo sapien
aatagttttagagagaaataccctgacttttaaatgaagaaaactattcaaacttaaaataaaactgttggctgggtgcggtggctcacgcctgtaatcccagcacttttggaggccgaggtgggcggatcacaaggttaggagttcaagacaagcctggccaacatagtgaaaccctatctctactaaaaatatgaaaattagctggacatggcggtgcttgcctgtagtcccagctactcaggaggctgaggcaggagaatcgcttgaacccgggaggtggaggttacggtgagcggcgatcgcaccactgcactccagcttaggcaacagagtaagacttcgtctcaaaaataaataaataaataaaataaaactgttattgaagtgtttaggggtaaagtttaccaatgtctgcaacttactttgaaatgcctcaaaagatgtattggtgggtggctacagggatgagtagatccacgataaagcaacagcaaaatattaattgtagcatcattctcaattccccctcagcttggtgatgcatacacgtacagttttttcaactgttctgtaagcttcattaaaaaatgaagggacatttttaattttttattttttttagactgagtctcactctgttgcccgggctgagtgcagtggcacaatcacggctcactgcagcctagacctcctgtactcaagcaatcctctcacatctccctccagagtagctgggactacaggcacacaccaccacacctggataattttcttttttcacttttcatagagatgagggtgtctcattctgttgcccagactggtctcaaacttctggcctcaagctatccacttgccttggcctcccaaagtgctaagattacaggcctgagccactgcacctggctagaattttttttaattgaaaaagaaggccaggcacggtggctcatgcctgtaatcccagcactctgggaggctaaggcaggtggatcacttgaggtcaggagttcaagaccagcctggccaacatagtgaaacttcatctctactaaaaatacaaaaattagctgggtgtggtggtgtgcacctgtaatcccagctactcaggaggccaaggcagaagaatcacttgaacctgggaagtggaggttgcagggagctgagatcgtactactgcactccagcttgggcaaccggagagaaaagaaagaaaggagagaaagagagagagaaagagagaggaaggaaggaaggaaggaaggaagggcgggcccatgggaccttctgggacttctgttacaaattgtaatggacttgatgaaagtaaggtggggtaaatgagaacaacataaaggacacagaacgcagtccctaggacacttagtaagtatcaggttttattattatcatttggaatggaggaaatgggtacagactgggggacatgagttgttttgtttgtttgtttgtttgtttgtttgagacagagtctcactctgtggtccaggctagagtgcagtggtaggatcttggcccactgcaacctccatctcccaggtccaagcaatcctcccacctcagcctcccgagtagctgggattacaggtgcccgacaccactcccagctaatttttctatttttagtagagacggggtttcaccatgttcgccaggctaatctcgaactcctgacctcaagtaatccgcccgccttggcctcccaaagaggagtcttaaatgagtttcactgagggatttcagcagattttcattacagtgtccaccctgaaagtgtaggggccagagttccacgctggttaatctctcttgctgtgtgaacttatacctgtaatttccacctctgcacctcacattgcttgttttgaaactatgagaattgaactctaaggtcccctgaagtttagaagtcctgctggatgaagcccctttcctgttcctgcctacattcttctttccctggacgccttacttacgtaaaaactacatttcccatgagcacccacaggcgtgcacgcagcgcagccctccgtcgtcgctcgcgccctttatactcacttccgcccgcgagccacttcctttcctttcagcggagcgcggcggcaagatggcagtgcaaatatccaagaagaggaaggtgagcctctggggactgggttcggagaacgacggcgccgcgcgggtcgagggcttctcggggtgccaccgcgaggcctgcagctccgtggcctgccctggaagcggcctaggcttcctggcgttcctgcgggccgcgg

SEQ ID NO: 7919 - DNA, 2300 bp, Homo sapien
caaccggagagaaaagaaagaaaggagagaaagagagagagaaagagagaggaaggaaggaaggaaggaaggaagggcgggcccatgggaccttctgggacttctgttacaaattgtaatggacttgatgaaagtaaggtggggtaaatgagaacaacataaaggacacagaacgcagtccctaggacacttagtaagtatcaggttttattattatcatttggaatggaggaaatgggtacagactgggggacatgagttgttttgtttgtttgtttgtttgtttgtttgagacagagtctcactctgtggtccaggctagagtgcagtggtaggatcttggcccactgcaacctccatctcccaggtccaagcaatcctcccacctcagcctcccgagtagctgggattacaggtgcccgacaccactcccagctaatttttctatttttagtagagacggggtttcaccatgttcgccaggctaatctcgaactcctgacctcaagtaatccgcccgccttggcctcccaaagaggagtcttaaatgagtttcactgagggatttcagcagattttcattacagtgtccaccctgaaagtgtaggggccagagttccacgctggttaatctctcttgctgtgtgaacttatacctgtaatttccacctctgcacctcacattgcttgttttgaaactatgagaattgaactctaaggtcccctgaagtttagaagtcctgctggatgaagcccctttcctgttcctgcctacattcttctttccctggacgccttacttacgtaaaaactacatttcccatgagcacccacaggcgtgcacgcagcgcagccctccgtcgtcgctcgcgccctttatactcacttccgcccgcgagccacttcctttcctttcagcggagcgcggcggcaagatggcagtgcaaatatccaagaagaggaaggtgagcctctggggactgggttcggagaacgacggcgccgcgcgggtcgagggcttctcggggtgccaccgcgaggcctgcagctccgtggcctgccctggaagcggcctaggcttcctggcgttcctgcgggccgcggatggcggtggattgagtgagaggccccagccaggagggcgctgtgtggccgggttccaagtgaagcgcagagagatgggcaccaggcgccccttctgtcccggagaaggcgtttgtgagcatttgtcggtcaacggaattagtaaacgtggtattttgagggcgtgtgtcatttccctcatgtcttatcccgtggttttgggaagagaaggcagcagtgtattcttgccttaactggtcgtttctgggtacagtccgctggccccaggacctcaacttgaagggttgctgacggttgcttgctccgtctggggaccccgggaggaagctgcctcggatttaacgccttgtcattacatgggatagaactgtgtaaaaatcattagctttaaaaatagacagtttgtcatttcgtatatacacttcgatgtcaaaattaaatccacaacttctcgagagttaggatttgccagctctgttggtaccgtaaagccaaataacatggctgggattctttagacggtgcaggttgtgtctacaagtgagagagcttatatgttaagtctactatctattccttaacagtgacaagtacagtgtctttgctgtgctgaatgaagtgtaaataggccattagagcagtttcttgttttgcatgtggaactgttttaaacccttcgatgaagagatgatgacgagtctgacttggggatgttctctttgcccaggtggcctactctgtgctgcgttctgtggcacagtttaaagagccctggttgaagtaatttcctaaagatgacttagaggcatttgtctgagaagggttgctgcactcctgttggaacaagggtttggaaccattggttggaggtatttagttttggtgagggatgcattgactaataagactagactggctcaggcgaaagtgagcctacaccgatctcctaattttgaactttgctttgtttggattagtttgtcgctgatggcatcttcaaagctgaactgaatgagtttcttactcgggagctggctgaagatggctactctggagttgaggtgcgagttacaccaaccaggacagaaatcattatcttagccaccaggtaaaactcatttgactggccatcacctataattgttataaatgctaagttggtttatttatttatttatttttttgagacggagtct

SEQ ID NO: 7920 - DNA, 2300 bp, Homo sapien
ctgccctggatgaccagggcatgaaagccaggctgacactaggcgggatctgacctccagaggcagcagagcagctgggagcaggaggatggaaggagaggcagggcgcagagggtggacctgagccccctagagtaagctgatggaaaggagggagctccctgtccctggaggtgtgcaagcagaggttttgtgttcataatggccaaatcataaccagcatggcccagcccctcagtctgcagagcgccttcacaaacacccctctgctgagcctcgccgcaaacttctgaagggcgggtgtcctgtgtgtgcttgtttcccttatgacaaactaaaggggcaggtgtgggctaaagaaacttctcagcttgtgaggatgaaattaaattatgtctataaaagcaactggcacacacagtgtcctcccttcctcttgagtaaaagcaatatagggaaacacccatgtagctcgtactgtgtactagcacttttcatacagcccatgtaatagtcatgaagccacagccctgtgaggtagggatgatgatcccatttcagatgagataactgaggccagggcgggcaggtgagaggagtgacttgccccggccacaccgtaagcctgtggcaggcactgggttagaatccccatttgtccctagagttctttccactttctgacggtgctacctggagaacaccaagagaactcactagagagagggccagcttccctcagcctgggctctaacctttcagaattcgcccatccttctcagctggaaggttcccctcagggacgccctccctgactcccctccacctgggtccagcggcccttctatgaactcccctaacacccggtgcctccccatggcacccccgccaggctgggagctccgggcacaccgtaactatggttgtcttgctcactgcctggcacagaaagggctcccaataaatacttgtcgaattcgtttgcgcgaaagctgtgtgtatgatgctgtctgtcaggggagtgctcagggtgtggtcagtgtccagcacctaccggagatcggcaggagacaggctggattgagcagagggcggtggagttattgtaccctctctcccctgcacatgcacacactgggtctctgtggggcagcctgagtcccttgacccagggcttcagctcctgtcacgggaccctccttacacagatatatttccaggttccagtaacttccctgctctcccgctacagaccccggggcggccaaggcgccctgctgttagtatcctgggacacagccctactcctactggagtccctaacgcctactccgctgttgaaaatagttcctttattagaccctcctccgattaccctgtttgagagcgtgccatctgttacctgcagatatcgataggaaaacgcttagcaagtttgaagaaccgaaaagggcactgtgtctgagtgggtaggcagggcagaatgtcgcgctggtgaggcggggctggggcactgtagccgtaaggaacctggatgctgaacggaggggagagtcgctgaacaaatggtcaagagaggaaataaacggatgagggctgtcgcctctcccgggcgcagccaggtggcttccccgacgctgtttgtgttctctccccggcaggatgcggcaaggccatgcgccggaggagtcggagccgggctgcgaagcgccgtgcgcgggtccgtgccacgcgcagcgcgtgctgcaggccctgaacgcctaccggcggagcggcaccctcaccgacgtggtgctgcgcgccggcgggcgcgactttccgtgccaccgcgcggcgctcagcgcgggcagcgcctacttccgcagcttgttcgcggccgggcggcccgagcgcggcccggccgtggtgccagtggtgccagtagctcccgaggcgccaggcacgagcccggccggggcggcggcggcgctggccgtggtgctcgactacgtgtacggagcgggcgtgcggctgcgcgcggaggacgaggcggcggccgtgctggcgctggcggagcggctgggcgtggcgggcctgcgcgaggcctgcgtgcgctttctcgagggccgcctgcgcgccgccaacagcctagcgctgcgccgcgtggccgccgccttctcgctggccccgctggccgagcgctgcggccgcgtcctgcgtcaggccttcgccgaggtggcgcgccacgccgacttcctggagctggcgcctgacgaggtggtggcgctgctggcggaccccgcgctgggcgtggcgcgcga

SEQ ID NO: 7921 - DNA, 2300 bp, Homo sapien
ccctgggggaggggaccctgcctgggtacccccatccccctgcctctggcacttacaggggccttcaccacttgcccagggcagaccctaccaagtttctgcctctctcttcccatcttctccctccctggctctgcctctcccactgttcactcttcctgtttacctttctctgcctctcccatctctttctctctcttctttacattctatctctaacacccatccctgctttgctccccgcaacacacagccttttcctcattcccctcagaggaccccacagtggctgagcttcctgttctggatatgcctggccgagagaccctggcctgacactgtccttctgggtttcaacatgaatttccaggatgggacctagagcttagggacccacgtctccctccgtctagtgccttagcccctcctgggtcaggcagcttcaccaatcagcttctaggaggagatgctgtccctggctatgggacattccttgagtcattcctgtgtccgcccagttgaccaacatccacatacactggttgctgatgctgtctgcagcaggagttgggccttctcacatggagccccagggtgctggggaggccaccccatggtgattcagtggctggcacagacacgctgggtctgctcagacacagccagggcagtgtcattgtctcctggggatcaggagaggcctggtggaggaaggtaccctgggggacaaggccgggggaggatactctttccctgtgggccttattcttccattcattcactcaacaagtacaggtcaggctcccgggacacggcaggcactgatggtactggggcacagcgatgaacagagagagatttgctcactgccctcaatgattcatagggcagccagcctcgccagggtgtccgtgccaccccccgcctcctgctttccccttgtctgcctgctctgttcatccatccatccgcctgtccatctgtctgtccacttctgctgcgctgaccccatctagtaactcacagttggtttcttgtggagtcttggctctctccatcccccaagcagggttcagtccctgaggcagttgggttcttgttcccaagttgatcaccccctcctcctggtggggacaggggtgagagtccagtgatccttctgcctagatcccaggaaaggtctaagttcagaggccagggactggggctagttcagaggaatgacaatagtgaagacagtggcctgggctgggcacagaaacctgagtcctttccacttagtgcctggtcccttcatgccctgtgcatgctccacctcccagcccactcttgagtaattttacccccaccttgcacctgtctcagccatcagagggattcatgctctgacctccctccgcattaggactgccaggacagagcagcagttggccccactccaagtcactctaacccccttgccttgggaacctgtgcagaccagctctgggcaaagccccctaccacctggccccacccccctgctttccttccctccctctcaaggggtctccccaatggcttcacttagtctggtcatgatggtggagctataagagacatcagctgggactccctgagattggtgtgtgccccagcttaggtcaacagagtcgtgcctactaagctcctcctgctcccaaatctgtcccattcaaagagagccaggtgcattactggggacacctgagacagaactaaccaaccctagtcctgggccagggctgctgactggcggctctggaggtaagagggaggccagggagccctggccgagagtcagtaggctctgattcaagccccaactctgccctctctgggcctatttccccattgtacagtgggacaagagtcctgctggtctcttgggccacatccagagaggctctggaagtaggcagggtctctgctccaagggagggctgaggagagacctgatgcccacggggccatctctgcaggtggcgcctgggtggcatacggagctacaaccctgagcagatcatgctgagtgctgcggtgcgccggaccagccgggacgtcagcatcatgaaggagaagcttattttctcaggtacacagccctgcagacaggtggaggcaggccctgggcccagctttctgcacccccacatgcaaacagatgtgtatgcacacacattcacatgtggcacatatgggtagggacaagggcacagacgtacataaacccaccgggattatacccacagacatacaaaggcataagtacacgtgtgaaa

SEQ ID NO: 7922 - DNA, 2300 bp, Homo sapien
ggagaaaagcatcactaagggctctaaagaagtaaagagctgcttgggtttctttgctttggagggtaacaaggacaggaataggaagcattgaccgggcgtggggctcacgcctataatcccagcattttgggaagcagaggcaggatgatcactggagcccaggggtacaagactaacctgggcaaccctgtctctacaaaaaaaaataataataattaattaatttgctggccaaggtggcacacgcctgtagtcctagctactcggtaggctgaagtgggaggattgcttgagcccagcaggtcaaagctgcagtgagctgtgatcactccagcctggatgacaaagtgagatcctgtctcaaaaaataaaaataaaaaagaataggaaacaattaaaatctgctcagagaacagcaaataaagcaatattttagctggttgactgggcacctgcagataggtggtggctccactgtcaccctgagcatgcagaaggcaggtggagggtatccttatggctgagagaatgcagtgccaatgaatcagacctaagctgtggatggttctatgggagaggagggtgaagggaaggcagcctggggaaagggtcgagaccgatggatgagagtcggcagcggggggcggcaaagccattgtctttcagtatctggctcctgctttgaggaccctagacacacagaccctgcaggcctagcacacaacccctctgccctgagcaccatacagtcccctcctaccctgagagtgcacacgtgtgcacacacacgccccggcccccaggcccacagcgcctggagcctacacctgcaaaatgtcatcttcagcccccagaccctctcagggtcctcccttgcccttccccagtggccatgtggggtcctttggtccacggaccctcagtctggagcctcagtctggactggccatgactggaagttggcctcgggccgtctgtccacagcccccggacgagtactgtctcatgtgggtcactgccgacctggtctccttcaccctcatcgtgggcatcttcgtgctccagaagtgagtaggatctgaccacttccgtggctgtccctaccctgcagcaggcccagcccccaccccagccaggtgaaccctctcctgagccctgggcctcagccaggagcaggcctgaccagggaagaaggacggactccggtggccccatcctccctcagacagaggctgggtgacttctggaatgaacatgcagctgggatcccagagccaagctctgccttgggtggctatgtgggcttaggtgaatttcagctcctcaccgggctggcctgctcatctgttagccagggcatgggttcccaccagccctcagcaagatagctggggtgtgctcgcagtggggaggtgtggttggtcccagggagggtctagggccagcctggggcccccacccagccaggaaccaaggggctgggattttattcttgactgatgttctctctctgtcccatcctgctctgatcggcgcatgtccctcctctctccccctccccctctctctgctgcactctggcatctcacagctatcacttgatcaggtaattctggtgtggtcttcctcctccttctgttcctctttctccctcttgccatcccttctccagttctgtctaaaaacccaccgtgcaccaagccctgtgcccgggccacctcgcagacagcgcgctcgcctgaagcctcccttacccccgcaatcctcttttctgctcctcccgtcccactgccgtgtgtgtccctctgctccctgttcccacggccgtttctgcaggtggggaccagcgtttccttgacagcttcctgacctggcccctctctgcaccaaagtgtctccctgggggaggggaccctgcctgggtacccccatccccctgcctctggcacttacaggggccttcaccacttgcccagggcagaccctaccaagtttctgcctctctcttcccatcttctccctccctggctctgcctctcccactgttcactcttcctgtttacctttctctgcctctcccatctctttctctctcttctttacattctatctctaacacccatccctgctttgctccccgcaacacacagccttttcctcattcccctcagaggaccccacagtggctgagcttcctgttctggatatgcctggccgagagaccctggcctgacactgtccttctgggtttcaacatgaatttccaggatgggacctagagcttagggacccacgtc

SEQ ID NO: 7923 - DNA, 2300 bp, Homo sapien
tcccatgaagacagagaacccaaggccactttctcagaggaggacggtgatctgtctctgggcctctagggtgggattcatccttctcagtcagatttcaggagcgatggtggttgcgtttttgggtgtcagtgctattgctataacttaatgatgcaaggtagggaagtcccacagacactgaacatgcagtgatgctgctgagtgtgttgattagcaccaaagcaactgtggaactcagagataataacatttttaattgtattagggtttggggaatcagttttattgcaagtcgtttccattaataggtattgtgatgagatgctcctggaaaccatccttaactcactgtgtgcagggccacctcccacgatggccacaagggggagctgcgcgccgggggcagccgggagaaggggcctgagtgccgagggcggggttctcaggggttcggaggcgcagctgggcctcccagagactgcgcagcctctctgacaccagcgtgctgtctgtccgagaaagcgcacacccccttaccccctgagatgggcagaaggtgttcgtttctggttctgccccttcaaagctccgtgacccagccagctgttcctctccccgaacctcgcttcccgtgtgtgagatgaggatgctcgtgcctccgcggaaccaacctggggaccacgcgaagcgcccccacaggcccaggcacgcccatgcctcttcccgccccgagcccccatgtcacagcccttccagctcctcacctgcctcgctcaggtctcttgggggaacatttgtttccaggctgatgggctggaatgaaaagcctccaaagggaaacttcatcccaggcgagactcagcattccccgccggcgagtgaaggtccctgggtagggagcggagatgctggccaccgccccaccctcatcgtctagaaatgccactgtccctgctcggcatcagagggccctggccgctgctgcctctgggaaaggttgcctcgggagaaagggggtgaaggccctgccagcagctagaacggctccagggaggcagggcggccggcagtgctgtgggagaaggacaggcctttggagggagatgggagacgagtctggagaaactagggggacggaggtggcggctttgactgacccttccagagactgggatctgcgggaggctttggaggagagccacaacctgggcttcggggaggcacgcctgggggtgtggaggggggtgggtggagtgagatccacggctaggggcgaggggctgggggccgaggagccgaaaacctctgccgagcttcacgtggttaaagatttcaggtcttacctgtcaccagagatctctgtcccgtagaggtgccacctcatcctccatgagagctgtgctttgctttcttctggaggctgcaaggaggatggcccccatcacggcggacctagatgctgggagtccgggagagggcaggccgtggagatggggcaggtggcgatgtgtttcaccacccactcccgcctgaagtgccactgtgagcccagcccagggtgccaggctgggctgcactccaggctcctgcagcagacccagttcctcagcctccttcccctgaggcctgggcatggcctggacaagtgggtttcctcctctgctgtgccatgctgaggtggcagggaggctgggcgggaccttggatgtgactaacctgccaggcccagggaggtcccccttactgaatgtcctccctcctcacagttccctcctcctcctgtccccatcctcccttccatttctcgctgtcccttcctcgctgggtctgccggcctcctgctgcctcctcctgcctcagtctctccctgccgtgtctatctgccggcctctagtttcctggcagcccatgcctgtctctttcctccctcccctctgccctgctccatcggcctctcctgccctctctgtctctccctctggctcctctctcagacacactgggaaccctcccacccgctctgagcctctgtccggtgactcttccccctccagatcgggctggtggtcatcctggcttccacggtggtggccatgtcggccgtggcccagctgtgggaggacgagtgggaggtgctgctgatctccctgcaggtgagtgaggagggtcccccaggaccctcacaacaagagcctttctgtcacttccctttctccagaccaaggcccaaagaagggcagggaggcgcccagggtcacagagcaggtcagaactagggaggacaccagggtcctgag

SEQ ID NO: 7924 - DNA, 2300 bp, Homo sapien
caagtgcctccgattcatgctctcttagcaatggatagttgttctataaaaacacccttgcccataaagcatcagctgatttattggcttttgtcagcctgatgggtgaaaagtggtaccttgctgtagttttcatttgcatttcccttcgggtgagttagattcggcatttttcacatgtttgagtaacttgtgttttcttttctataaaactgtctcttcatatcttttgccatttttgccattgctttttgcttattcatttgcaggaactctttatagatgtgggaaattagccatttggctaacaaactgcaaataattcttcctagtttgtcattcatccttggactttgctcattgcgtttttaccatggggatatatatttttttattcttacatacttgaatctgtcatctcttgatgactccttggttttgtgtcagactcagaaaggtctttcccactccaagattataaaaatttttctatggtgtcacttggtaattatatatttccacgtttttaacatttaattttttctctttttggaagctattttggggtatagtgtgatcttactctgttctttttagatggcttcccaacgtttccaactctctctactgagaatttgtcctttattcatttgagatgctatttttatcatatactaaattttctttatgtatttggatctatttatgaattttttgcttattttcatttatctatctggtcttacatcagcaacatagcactctaaagaccacagttttatagtatgtttgtatttttttttttttttttagagacagtcttgctgtgtcgcccaggctggagtgcagtggcacgatcttggctcactgcaagctccacctcctgggttcaccccattctcctgcctcagcctcccgagtagctgggactacaggcaccggccaccagcccagctaatttttttgtatttttagtagagacgaggtttcaccgtgttagctagggtggtcttgatctcctgacctcgtgatccgcccacctcggcctcccaaagtgctgggactacaggcatgatccaccatgcctggcctatagtatgttttaatcatgaagtttgagagtctctggttcccctgggtcctgaggaggggaggacagagatgctcaggacagggtgagagggagccattcacagcaggctgggtgctgagtagatctggtgcttatgtggggaccttcctcctcctccccagtctgccaaaatctcctgtttcccagaaatctctcccaggtgagtgttcaggagaaattgaggtacccaggaggtgagggagcaggctgaagggttcttgggagctttacagtaaacaggaggccctttccctgagatgccccccttcctgccccacccaccgccctctgtgaggtgttttggtcacagctcacacctccccaggctgccctgagcacactgcactgctcttctgtcctcgcctgactcccctgcctcagtggcagcagcccccagcccaggacctgcacagaggaggcgtctgtcagcgacccaacctgagccccagagaggagcactgggtaccacacagccccaaggcaagttactggctgggctggggctggggcttctgcctcctaccaaggctccatcagcctctacctgccatctgctatgtctacttcatcacctctcctggtgaattcagacttctctccatgcactggccccagctttatggtttttcctggtgtccagcctctgtccctccagcagcagcttaaggaaggcgcattcactgagcacctcctgtgtgtgccaggcactgcgttcaccataacagcagtaaccatcctttattgggtgctgaccacatgtgtcaggcacctttcactcagaatttcacagtcatttcactcctcacaataatcctgttcccatatcatgctcactttttaaaatgatatcactgagatttagtaagcattttcttctggccagccgttgtactaagcatttcacttgcatttcctcactgatcttccccaacccccttccaggtaggtactcactatccctatttcacagctctggaaaggtccctggagaggatgtggaaagatccccagtaggtagcagagccaggattcgactgaagaccgtgattcaagtgaggctcttaaccctgggccagctgtctgccatttggactgcaaaacccagaggccagatacccctaagaggccagctgttgcacctctgcaaggcggggttccacctcctctc

SEQ ID NO: 7925 - DNA, 2300 bp, Homo sapien
ctgaggcaagagaatcacttgaacccaagaggtggaggttgcagcaagccaagattacaccactgcattataacctgggcaacaagagcgaaactccgtctcaaaaataaaataaaaccctatattcacttgctccaacccttcatttcatgtggactaccaggttatagcagtcttttagtgcagtccatgatcctatgaatgaggatcagagagggtactgatgtacctaaggcatacagccagtccacagcagaaaagtcctcaggccaggcagcaaaaagtggagggtgagtcccaagtttgaatgtcaggtaaaatctgagtagatgttgctgtgtcccaatcagcttcccttccttcaccagcttccactactaagccatctgctccagggcactgggggatcctgcaggggttttctgcttgaagagccacttcctgtttggggccgagcacttccttcaggtgactcacaggctcccattggccccgtgctgggaaggcaaggtgggggtggagccagacccgggcgtgtcaccctctacctgagaccccagctgggtgacctgacacagggcagtgggcacaggctggaggtaggaggaggggaatggcaggaggatgtgagaccattctgcctcacccagcctattgggcaggatggagagagggcagagtggggatgggggcggcctccgcgtccagacaaccccacaggtagtttccagggcagccatgggcccaggtaaggctgacagcagagctgacagccctggggagactctgcggtactttccttcctgacaggcagtaaggtgtggtggaaggagcactgggatggagtcatggacttgtatttctcacaccaactttctggtggtcatttcagttttctgcccctctctggacctcaatatccatgtctgtctaatggggggaggggcttgatggctgtgacattttgtgccacttgtaggtttgagcttgaattctggctctgccgccttgctgagtgtgttcacttctcagaacctccatttcaaaatctgaaataatagtcactttaagtgttttacatatggtaactaatttaatccccacattgaccctatggggtaggttttattagtagtagtattttatacctaaggagattgaggcacagaaaggttaagtaatttgcccaaggtcacacagtaagagccaagattctaacttgtgtagttcgactccaggtcccatgctcttgactcattctggccttgctactcaaattgtggtccagggacctgcagcatcagcatcacctgggagcttatcagaaatgcagaatctcaggccccagcctagacttaactgagtcagaccacattttaacaagttccctaggtttccaaggtccaaggccccaggaaatataaagagaccatggcttctcaaacattaaagtttagaggagaagccactggtctatttatatttcctctgccacttaggccttaggatcattgtagggggcagaggaaataagtatgtttaataaactgtaaagtgctgtacattcagggcactgtgaggaacctggaggtgcagaagggcaggcctgggagtgtctcaagtgctgatctctctgtggctgtcatttccgagctgtctctgagtccagctctgtccacctctggttcacacacagaggtgtgtgtttggttatgtgtttcttgctggtgtgtggctctagaatccagttgggttggggagagttgttatattggcaccaggaggctcaggtcccagccctggctctgcctctatgtgatgtaggtaggcctccgtccttgcagcctcagtgtccctagtagacaaggtgtcagcatcctctgaagcctgcaatgctggtctgcagtctcctcctcacctctcctggcccctctgcttcccgtggcctgttggtaccatctcttttcccaattcctgggtggggggttgccctgctggctgcaggagctggcaatgggggaggtggtgcgtgagtcagagctcaggcatgtaattgtggtgccccagatcccacctccgggctaccgtccttcccttagcggctgctttagaagaacaagctggtttggcagctacctcagagaagcaggaccctgggcagcgtgaaagggcctctgcccccagggtggctgggctttggatcctggatccgtgggtcctggaggggcaggagtggttcaggaaacaggttatctgggtctgggcctggggctggtttgtgggcagcatgcgtggaggtg

SEQ ID NO: 7926 - DNA, 2300 bp, Homo sapien
ctgatggagctgagagaagttggcgcaagtagagagggaagtaagcaatggggagatgaggctggtggagtcagcaggcagagagcaataacaaaggggctggaacgccaggctagggatgtagggcttggtcatgctggcaaccgggagccagagagggctctggacagagggaagggccacaaggtttcttagcgtcaagttcaacaagtaaaggcaaaactgccttctcccagccctcaggctccagagaccagtcccaacttcctgggcccaacttgcctactcccaacccctgggcctgaagaagacagggcaccctcaagtccgcagcctgaacttcagcctccagctcaccctcttctttgttcttccaaccagtctctcagccatagtctgatgccatttcttttgcagggaatgcccatgcttcaccctctgaagcctgctgcctgcccagtccctcacctggttccctgccaagtagcacctttattcttcttttatagatgaggaaacagaggctcagagagggagagtaacctgttaaagccacacagctttaccctagaatttgataatgatgggtggatagaactctgtgccagctgtgtggtctcgggaacgtcacttagcctctctgtgctgagtcctcatctgtgaaatggggtacctatcacaacataaggttggtgtgaggtttacaaagagactgtactgtgccaccaacatcccttagctccccaggccagttagcggctttcacatggtccctaccccactcccccgcggcacacattcaactttcattcatacatcagttccctccaacaccttctctgcgcctggtcctgtgcacacactgaagacggctccttggccaagcacagggctcacacctataatctcagcactttgggaggtcgaggcaggaggatcgccggaacccaggagatcgagaccagcctggaaaacatagggagaccctgtctctacaaaaaatttaaaaattagccagatgtggtggtgcacgcctgtagtcacagctactccggaggcacaggtgggaggatctctttagcctggaagttcgaggctgcagtgagccgtgatagtgccactgcactccagcctgggccacagagcgggaccctgtctcaaaataaaatgaaatagaaaataaagacggctcctgcacccaacgcgcggggtgggaaggggcgggagcggactgcagatgcatcacgattcgaagtgtgtgtcctcacacaactctgctcttgagttcgtatttttaaaattgaccacgacgctcctcctcggggatgggcgcagggaagggaggcttgtggaagacaaattcgctcatttccaaaaacttatttttcaccgtttcctgaaatctgaacacttcccagcccaactctcacctctgagcgccgagcactagaagctagggagaagcaaggtgtcggtggcatcccaccactcaggagggctcgctccagcgtccctgggacccctgaccccggatatcctccaccttgcctcgccccggcttcttttcctacactggcccctgctccttccccgtgacccccgcaatccccgcacagcagtccccatgcccccgtcccaggcaagccagccctctcgcctctccctccttccgggtcccgaggccaaccccctccccgattcggcccgttccgaacccccagccccgccattgtcctcttgcagccgcacctctccattgtccgccccgccctctccgaggtagaatccgctttccgcagggcgccgctccgctcccaccctcggattggctcctgcggccccacgcgcgaggcccgggaaggggagagggcgcgcaccccgcccctgcccgcagccggccgggggcggggtctctgctgactccgccccgtccgggcggggccgcgcaggctggcgctggggcgctgggcggcgctgtttcggctgagctcgggctgcggctccggtgggggtgggtggcggggatgacagcggaggtggcagcggcgcggcgctgagcgagcggcgagggagcaggggaagaggaggaagtggagccgcggccgggagctcgggagtcggccgccgcgccgaggttcgccccgttttgcagagagagccgagtcgggacctggaaagacttccccgcggggctccggccgccgcgcctccccgccggcgcctgccctgccctgcccgtcccagccccgcggttcggggcgtgcggccgggacgcgcggagccccggccctgacccgctg

SEQ ID NO: 7927 - DNA, 2300 bp, Homo sapien
tgggggtgggagtagagagtggggtctggcctgggacccgggaggtctccttggataaacaagaatttatcttttttttttgagatggagtctcgctctgtcacccatgctggagtgcagtggcatgatctcggctcactgcaaactccacctcccaggttcaagagattctcccgcctcagcctcctgagtagctgggattacaggcacatgacaccacagctggctaattttcatatttttattagagatggggtttcaccattttggccacgctgatcttgaactgctgacctcaggtgatccacccacctcggccttccaaagtgctgggattacaggcatgagccaccgcgcccagcctagaatttatctttaaaagcaatatacagttgaggcaggaggaagcacatgagaaccacgacagccaccccaaagagatggacaccatgccaaggctggaagcttttgttaataatcagacctgtcctaaaaaagaatgcggggctgcctctgaaggaggtaagctctctcttcttagaggtgcctcggtgcttgcctttttgggatactgagaagagggcttctgcctggggctgcagacaggaacccctgacctctgagatgccttgcagctcagagtctttaatacatttattccagaatccttcgactctgagattttaacatgttaagattccttagctggattcaaagactccttgggggctttgagtggaagtaatctctgattccttgaccctgaatcacagagtctgaagcttttgggatctgagatttcccacagtccttgtactcaaaagactctgagctgcagaagcctacccagacagagaggtttgtcaccaccaccaggcttccccacaaccactaacagagggcagggacccaggtgattgactcatttgctgggtactgggatttttttgctccccaggatccaggcaagcacctagaagaaagaagatactcaatgcattcattcatgactgaatgaatgaagagtccctaccctgtcccttcctctccatactgcgtccatccaatagctatcattaaactactaaagaggacttttcggagggtagggagcctcggctgatcagaaattgagccactgtcgcccagattatttagggtttcctaaataatctgcctcactgaatcactgaattccctactaacaggtacataccccacagatggacatcgcacagggcaaggactttgttcagctctcagctgtgtcctcagcacctagaacagtaatgaataccctagcttaacttggaggtcaaggagctatcagtttgcgagggtggggtaggaattgacagtgagacctgaggcctgtgggaggggacccaaagagggaggggatgcaatagggagggggccaggggtgacaaggattgaggaagggagagaggggggaaaaaaagcaagggatgccttagaaccacatttcacagccaagggaacagaggcccagaaagggaaagtaacctgcttagggtcacacagcaccttgctcagtggagagccaggttttccttcctgtgcactcctccaagcccagccagaccacctgaagttccccaggcatctctgcctctattactccacgacttgaactttccgggtgccgggcaggtaccgggtctggtctgctccctctccctctggccatcgctgaggttgaggttttttgaatgtacaagtatggagaagggcactgccttcagaagcctgaacgtctcccctgagagggagggggtgcacaggactcaattgtttcagcttgaaaatgggggagagcggggagaaggggagatggctctgcttggggcagagcccctgcggggaaaggggcgcctgaaaggacgtgcgattcggagtgggctagcttatgcagagagcctgggggtgggaggaagctcgcactctgaaggacacgctgatccccgtggggactcccggcgccccgcagcccgggccgccgagggaggcagtaggacccaggggccgggaggcgccggcagagggaggggccgggggccggggaggttttgagggaggtctttggctttttttggcggagctggggcgccctccggaagcgtttccaactttccagaagtttctcgggacgggcaggagggggtggggactgccatatatagatcccgggagcaggggagcgggctaagagtagaatcgtgtcgcggctcgagagcgagagtcacgtcccggcgctagcccagcccgacccaggtgag

SEQ ID NO: 7928 - DNA, 2300 bp, Homo sapien
tagagatggggtttcaccattttggccacgctgatcttgaactgctgacctcaggtgatccacccacctcggccttccaaagtgctgggattacaggcatgagccaccgcgcccagcctagaatttatctttaaaagcaatatacagttgaggcaggaggaagcacatgagaaccacgacagccaccccaaagagatggacaccatgccaaggctggaagcttttgttaataatcagacctgtcctaaaaaagaatgcggggctgcctctgaaggaggtaagctctctcttcttagaggtgcctcggtgcttgcctttttgggatactgagaagagggcttctgcctggggctgcagacaggaacccctgacctctgagatgccttgcagctcagagtctttaatacatttattccagaatccttcgactctgagattttaacatgttaagattccttagctggattcaaagactccttgggggctttgagtggaagtaatctctgattccttgaccctgaatcacagagtctgaagcttttgggatctgagatttcccacagtccttgtactcaaaagactctgagctgcagaagcctacccagacagagaggtttgtcaccaccaccaggcttccccacaaccactaacagagggcagggacccaggtgattgactcatttgctgggtactgggatttttttgctccccaggatccaggcaagcacctagaagaaagaagatactcaatgcattcattcatgactgaatgaatgaagagtccctaccctgtcccttcctctccatactgcgtccatccaatagctatcattaaactactaaagaggacttttcggagggtagggagcctcggctgatcagaaattgagccactgtcgcccagattatttagggtttcctaaataatctgcctcactgaatcactgaattccctactaacaggtacataccccacagatggacatcgcacagggcaaggactttgttcagctctcagctgtgtcctcagcacctagaacagtaatgaataccctagcttaacttggaggtcaaggagctatcagtttgcgagggtggggtaggaattgacagtgagacctgaggcctgtgggaggggacccaaagagggaggggatgcaatagggagggggccaggggtgacaaggattgaggaagggagagaggggggaaaaaaagcaagggatgccttagaaccacatttcacagccaagggaacagaggcccagaaagggaaagtaacctgcttagggtcacacagcaccttgctcagtggagagccaggttttccttcctgtgcactcctccaagcccagccagaccacctgaagttccccaggcatctctgcctctattactccacgacttgaactttccgggtgccgggcaggtaccgggtctggtctgctccctctccctctggccatcgctgaggttgaggttttttgaatgtacaagtatggagaagggcactgccttcagaagcctgaacgtctcccctgagagggagggggtgcacaggactcaattgtttcagcttgaaaatgggggagagcggggagaaggggagatggctctgcttggggcagagcccctgcggggaaaggggcgcctgaaaggacgtgcgattcggagtgggctagcttatgcagagagcctgggggtgggaggaagctcgcactctgaaggacacgctgatccccgtggggactcccggcgccccgcagcccgggccgccgagggaggcagtaggacccaggggccgggaggcgccggcagagggaggggccgggggccggggaggttttgagggaggtctttggctttttttggcggagctggggcgccctccggaagcgtttccaactttccagaagtttctcgggacgggcaggagggggtggggactgccatatatagatcccgggagcaggggagcgggctaagagtagaatcgtgtcgcggctcgagagcgagagtcacgtcccggcgctagcccagcccgacccaggtgaggggcgggagacgcctgcgtgcgtgcggcccgggggagcgccgagcaatctgggggtgcgcgagggagtaagaggggcgaggggaccctgcgaagcgttgggtgccgagccagagcctacaaattggagtcctcggcactttgggggccgctggagggtttggaatcgagagcccagggctagccagtgatggtgccagctgagggctagggcggagatcggagccgggttgggagtccgtgcact

SEQ ID NO: 7929 - DNA, 2300 bp, Homo sapien
accaccaggagcaggcgctaagctgctgcgggcctagcgggctgcctgaggaatcccaaaccagttatttggagcttgcttgagaagcccctcccagtcctttgaggttctggctggtgggggtgggggctgtcaagatggtacctgccacgtggcatggctgggagtgggctcttcagctgcctcctcagggaaggaaggctgttggcctctgctgtggtctgagctccagcatcactggtctggatcagaggtggcttttgagtagggtggccatatgcctattgtcctggcataataattagtagtgcccattttactcttataagtgtccttgtttgtgcaataaattatatggttgctctgcctttgaggctccagttctggcagggaaggagccagagctgggagggaggtgtcttggggtttattctaggccccaagatatccccttcattttagggtgagactcagatctccccgctccttccagacatttttagatctctgggccttccctcctctccccacctccctccccttggaccctttgcttatcttatactgcaccttcaaggctccgaggagggaggcagtcccgggagatggggagcctgtccaggtttttgggatggcagcagtagaatcttcccagaaatacagtggtccccaggcagccagagtcctgagggtcttccaccaggatttcaaatgttcggtcttcttcaaggatgactacaagttgggatctaccagagcagtgggatcgcagcctccaccaggattccttctatccttccctttgccctgtcatctctcctgtgctgttgcatgatgtagaggaggataatggcccgaagggagagagggagtgtggaagtatcccaggaacagagactgtccaaattggaggccccagagagggaactggggcttgtccttggggccactgctactgctggggcttggggaggaggcctgagggcaaccctgaagccgtggagcagatggcctgtgtggcagtggctgtcagattggagggcagaatggaatctgatgtggctccagcttctttgaaggctgagtgcacatctggccagctgctggtgatggggaagggggtcactgctctattgagctatgtgtgactcacccttttccctagtatcctgtccttgtgctatgtcaggaagcctcctccccagccccaccgagtcttcaaaggagttggtcccccaggagcttttgtcctggggatttcccatccgcactgggagcactgtgggtagatgggcattccaagttcctgcccagacagaagccatgggcatggagacctggacctttcagcttggaaaagggagactgaggctgagtggacacaggacacacacacacacactctcagggtcacccttggggcagcaaagtggagcatcttggctccccatttaatgagtgacccaactggtgactcattaacatcccagagcagaatgaaaggcatgggggcggggcagccctccggctctgtccctcatcccttgcccaggcatctgggtttcctgcagattctcagctcagctgctgctttttctcactggaaaagggctcccagggctatgtgagatcagggctgaccactctataaactgatgaggaccccaggtctggccaagtgaccctgttttaccttcgttcaggaagagctgaggcctactgtgtactaggcacgggagatatagtggcaaccagattggctagcttttctgtcctggaggccacagcctacttaggagcagaaatagttatgaaataaacacacaaataagtggaagtgttggctggccgatgcaggaaatcaataaggtggtctggtggtgacttgctgggaatgcttctttgagtagggaggtaacagaggcctctgagaggctggcagctctgagtcaagtctgggattcctggactgtgggctctcttgcccccatctccaggggacttgtggcagccagagagctgagggtggttgttggggaggaaggccttgggcttcaagaccaccctgtctgtgcaatcctcacaggcccaccgtggtgcacgcaaaccacttcctggccatgcgctccctcctgcttctcagcgccttctgcctcctggaggcggccctggccgccgaggtgaagaaacctgcagccgcagcagctcctggcactgcggagaagttgagccccaaggcggccacgcttgccgagcgcagcgccggcctggccttcagcttgtaccaggccatggccaag

SEQ ID NO: 7930 - DNA, 2300 bp, Homo sapien
taatgagtgacccaactggtgactcattaacatcccagagcagaatgaaaggcatgggggcggggcagccctccggctctgtccctcatcccttgcccaggcatctgggtttcctgcagattctcagctcagctgctgctttttctcactggaaaagggctcccagggctatgtgagatcagggctgaccactctataaactgatgaggaccccaggtctggccaagtgaccctgttttaccttcgttcaggaagagctgaggcctactgtgtactaggcacgggagatatagtggcaaccagattggctagcttttctgtcctggaggccacagcctacttaggagcagaaatagttatgaaataaacacacaaataagtggaagtgttggctggccgatgcaggaaatcaataaggtggtctggtggtgacttgctgggaatgcttctttgagtagggaggtaacagaggcctctgagaggctggcagctctgagtcaagtctgggattcctggactgtgggctctcttgcccccatctccaggggacttgtggcagccagagagctgagggtggttgttggggaggaaggccttgggcttcaagaccaccctgtctgtgcaatcctcacaggcccaccgtggtgcacgcaaaccacttcctggccatgcgctccctcctgcttctcagcgccttctgcctcctggaggcggccctggccgccgaggtgaagaaacctgcagccgcagcagctcctggcactgcggagaagttgagccccaaggcggccacgcttgccgagcgcagcgccggcctggccttcagcttgtaccaggccatggccaaggaccaggcagtggagaacatcctggtgtcacccgtggtggtggcctcgtcgctagggctcgtgtcgctgggcggcaaggcgaccacggcgtcgcaggccaaggcagtgctgagcgccgagcagctgcgcgacgaggaggtgcacgccggcctgggcgagctgctgcgctcactcagcaactccacggcgcgcaacgtgacctggaagctgggcagccgactgtacggacccagctcagtgagcttcgctgatgacttcgtgcgcagcagcaagcagcactacaactgcgagcactccaagatcaacttccgcgacaagcgcagcgcgctgcagtccatcaacgagtgggccgcgcagaccaccgacggcaagctgcccgaggtcaccaaggacgtggagcgcacggacggcgccctgctagtcaacgccatgttcttcaagcgtgagtcgggggcgcgttcaggggtcctcctcctcctcccaggaccccctgcaagagttaggacgacattccgtgcgctccattcttcactgcctctcatttatgctgtgacaacccagggaggcaggactgtcactcagctttttgtacagactggaaactagattcagagacaggtagcagcgtgtaaaggaatggttcagggagcggaggccccagagggactccatggaatgtattccgaccgaatttcgtcaaagtgctcgtccttgtgtatcttggaatgaataacatttaataatccattctgcctcagtagtgagctagagaaagaactcaaatcctttttttaaaattatttttattttgagatggagtctcactctgtcacccaggctggagtgcaatggcacgatctcagctcactgcagccttggcctccgggcttcaagcaattctcctgcctcagcctcctgagtagctggggttacaggtgcctaccaccacacccagctaatttttgtatttttactagagacggggttttgccatgttggccaggctggtctcaaacttttggtctcaagtgatctgcccgcctcggcctcccaaagtgctgggattacaggtgcgagccaccatgtgcggccaagacccagaatccttaaagcaaccttgggggcaggcagtgttaccttcatttcacagtgaggaaactgaggctcagcaaggaggaagcagagccaggcctcaggcccagatgcctctgtcttcagttgaagattagatgtagggttaataaatatttttgagtacctccatagacaacactattctcacagtttgctgtgagaatgaagtaaccctcgttttacaaatgaggccaagctaggagagctgaggtctccccgagtcagtggctgagcttggattggaacacaggtctggctgtgagcaagggcagggttcaggccactctcagacattttttgttgttattttctggtcat

SEQ ID NO: 7931 - DNA, 2300 bp, Homo sapien
tagctaccatttattgagccattgccatatgccagatgttgtggtaagcatttttagtgcattatctcattttaattctcagaacaaccttgcaagttcagtattggtacccccattcatagatgaaactgaaggtcagaagattgcagtgatttgcccactgccatacagttaagagctacaaaagccaggatttgaatctctgcagattagatttgactcaaagcttctgccctgggtccttcgctatcctcacaaaaccactttttttttctttttgagatggagttttgctcttgtcacccaggctggagtgcaatggcactatctcggctcactgcaacctccacctcctaggttcaagcgattctcctgcctcagcctcctgagtagctgggattacaggcacgcaccatcatgcccagctaatttttgtatttttagtagagacagggtttcaccatgttggccagggtggtcttgaactcccaacctcaggtgatccaccggcctcagcttaccaaagtgctgggattacaagtgtgagccacgacgcccggcccacaaaaccatttttgaggcaggtagtatttcctccattctacagatgaggagactgaaacacagggatgactcaacttgcccaagtggcacagagagtagcagagccaaaccaggtctttcggacttcaaaatctcttctgctttgaagatagaagaagagcaacggcgaggagtgagaacgtgccagaaggcccctgcaggccaggcactgccgtttcctagggcacaggtcctacctactcccaacctccacaattaagccactttccagaattttcttttctctacctctgccccagtgtggcacctgaactgaacagggactgggcggttcttgggggagtctaaaacataccttcgcaaagattccctaggaaaggaacatccagggcaccaccagccctggtgctcccattccgacacatctgagcaaggcctgtgcgtaagactggcaagtgcttgaaccaggaggcaaccaaactgggctcaaacacagcccgccggttttgaccaattccagcagctccccttttcaaagcatctattctgggacagacatttcactaggagtttcctccatgttttaaaatttaatagcaccccccccccccattggccctattttacaaaagaggagcctccgactcctggggatgaagcgacaagcacaaggacagaaagtcctcacgagcttgggacttgaacccactacgtccccagattctgctgttgcccgggagtagaggagggaggagctgccagggcggagggtggtggggagggaaggcaagctcccagcagcgcaagctgacgacagcaggtgtttttgttttgttttgtttttttctgcagcactctttcagtcagcatcgttcctggatttttttctcactgctgagcagcataaaagggtggggccgcttccctgcagcagaggcagaggcggcggcggcagcggctgcagcatcattcgcgggcagcggcggagaccgagagctgcagaaaagggtggggtcgcttcccaggagaagaggcggtggcggcggcggctgcggcatcctcgcgggcagcggcggaggcagcaatgctcggtctccgctggaggtgatggcctcccagccctgctaggtggccggctgcactaggacgccggcaggaaggagactcgagcccggtccgcggaccctgcggccacaccgcccggcccctcctctgcgccatggcttaagcctgtagccacctctcctcacgtcgcctcgctcgaccgaggtctgtgcgccgccgcagccgcagggaggggcgcgtcccagacaccctcgccggggactcgggaacgccgtgcgtctcacccttcggcgctcgcagcagactgcgctcccaaaggcgtttgcgaccggtaatcgagggactctacagactctcctaggacagctctccccgggtgctcgctgagggaggagggcgaactagctccggctgatcgggggtagaaaacggtgggaaccacattggccggtcaggatcggaggctgaaggaagattatagagacttgctttagaaccacaagaagaaagaggaggccggcttttcagctagcatcatggcgtggccgtgcatcacgagggcctgctgcatcgcccgcttctggaaccagttggacaaagcggacatcgctgtgccgctggttttcaccaagtactcggaggccaccgagcacccgggcgccccgccgcag

SEQ ID NO: 7932 - DNA, 2300 bp, Homo sapien
ctgaagtccagtggatgtagctagtggaggagtgcaggagacataaatggagagatagcaaagacagaacaaaagttacttggaggaacaagaggtctcctggagaaggtgtccaagtggcttcttaggacactccacttatgggtcttctgggtgggccttttggatactaatagctaccatttattgagccattgccatatgccagatgttgtggtaagcatttttagtgcattatctcattttaattctcagaacaaccttgcaagttcagtattggtacccccattcatagatgaaactgaaggtcagaagattgcagtgatttgcccactgccatacagttaagagctacaaaagccaggatttgaatctctgcagattagatttgactcaaagcttctgccctgggtccttcgctatcctcacaaaaccactttttttttctttttgagatggagttttgctcttgtcacccaggctggagtgcaatggcactatctcggctcactgcaacctccacctcctaggttcaagcgattctcctgcctcagcctcctgagtagctgggattacaggcacgcaccatcatgcccagctaatttttgtatttttagtagagacagggtttcaccatgttggccagggtggtcttgaactcccaacctcaggtgatccaccggcctcagcttaccaaagtgctgggattacaagtgtgagccacgacgcccggcccacaaaaccatttttgaggcaggtagtatttcctccattctacagatgaggagactgaaacacagggatgactcaacttgcccaagtggcacagagagtagcagagccaaaccaggtctttcggacttcaaaatctcttctgctttgaagatagaagaagagcaacggcgaggagtgagaacgtgccagaaggcccctgcaggccaggcactgccgtttcctagggcacaggtcctacctactcccaacctccacaattaagccactttccagaattttcttttctctacctctgccccagtgtggcacctgaactgaacagggactgggcggttcttgggggagtctaaaacataccttcgcaaagattccctaggaaaggaacatccagggcaccaccagccctggtgctcccattccgacacatctgagcaaggcctgtgcgtaagactggcaagtgcttgaaccaggaggcaaccaaactgggctcaaacacagcccgccggttttgaccaattccagcagctccccttttcaaagcatctattctgggacagacatttcactaggagtttcctccatgttttaaaatttaatagcaccccccccccccattggccctattttacaaaagaggagcctccgactcctggggatgaagcgacaagcacaaggacagaaagtcctcacgagcttgggacttgaacccactacgtccccagattctgctgttgcccgggagtagaggagggaggagctgccagggcggagggtggtggggagggaaggcaagctcccagcagcgcaagctgacgacagcaggtgtttttgttttgttttgtttttttctgcagcactctttcagtcagcatcgttcctggatttttttctcactgctgagcagcataaaagggtggggccgcttccctgcagcagaggcagaggcggcggcggcagcggctgcagcatcattcgcgggcagcggcggagaccgagagctgcagaaaagggtggggtcgcttcccaggagaagaggcggtggcggcggcggctgcggcatcctcgcgggcagcggcggaggcagcaatgctcggtctccgctggaggtgatggcctcccagccctgctaggtggccggctgcactaggacgccggcaggaaggagactcgagcccggtccgcggaccctgcggccacaccgcccggcccctcctctgcgccatggcttaagcctgtagccacctctcctcacgtcgcctcgctcgaccgaggtctgtgcgccgccgcagccgcagggaggggcgcgtcccagacaccctcgccggggactcgggaacgccgtgcgtctcacccttcggcgctcgcagcagactgcgctcccaaaggcgtttgcgaccggtaatcgagggactctacagactctcctaggacagctctccccgggtgctcgctgagggaggagggcgaactagctccggctgatcgggggtagaaaacggtgggaaccacattggccggtcaggatcggaggctgaaggaagattatagagacttgctttagaacc

SEQ ID NO: 7933 - DNA, 2300 bp, Homo sapien
tataccttgatgtattattttggaaaacagtttggctctactcccaaacttgaacattcacatattcataaacccagcagtttctcctgctgtgttgaaattgtggagaggagaatgaggatagaaagtaaacggagaggccaataaggaagacagagccagtctataaaagaggctggctgtggaggtagacagcagctgttcagttcaagagactgaaatcaacaaaacactagaacaagaaggtcatagaaaatgatatccaaatggtcagtaagcatattaaaatgtgcttatatttattagttgttaggaaaatgctataaccacaatgaaggaccactacacacccaccaaaattcagaactcggaattcttatataaggctatgggagtgtagatttgtacaaccactttggaaaactctatggctatctaccatgagacccatcaattctatttccaggcacatacccaacagaaatgtgtatagatgtgtactgaaagacatgtacaggaatgttcgtagcagcaatattcataatagccagaaacaggtgacagcccaaatgcctgtcagcgtccaaatggacactttgtggcatattcacacaatggaatgctatacagcaatgaaaacaaaggcaatacaggcacatatgatgtctcaaaagagtatacactaaatgattcagttttcataaagttcaagaacagagatgaggatggtgctgagctacagggaggagagcagtgactggcaaggccagaaggggtgctaggtaagttctgtttgtcgatcagagtggtgataactttcactttgtgaaaagacatttctctgtccgcttaggatttgtgcatttttccgtatgtatggtatacgtcaatttgaagttgacatttaaaaggagggacttagaagaactgataggacatggtgactggtagaggtggatggagaagaacagaagggatctagtgtgactcaggttttggcctgagcaactgggtaaatggcattaccctttactgagatgggaaagagcagaggaggagtcagtggggcagaagggaggtgggggagggaatcaagttcacctttagacatgctacgatggaggtgcctatcaggcattcaagtgaagatgtcaaggagccacctagagattcaagtttagagccccagggagcagagctgcagatgcagatttggaagtctttgctgtgtaaatacaatgcaaggtgtgagcctggatgagatctcagagagcagaaactggagagaaaagagaagtcccgaggatggagtggaggagggggactcgaacagctggcctggtgaaagacgagaggcacaaagggagcagccagagagctaggaagaaaactgggagagcatagtgtccaaaggccaagtggtttcaaagaaacgggaatgatcaaccatatctaatgctgccaataggtcaggatgagatctgagaattgattactggatttaacatcatggaggtcactagggaacttgccaagggcagttttgtggaagggtgatacctgaagtgtggaccaccatttgtggtaccacagatgggaggtgaggacaggaaggcatgaaagatagctcttccgagagtttgctgtgtgagtgagcagaaaaatggggcaggaggtggaggacacagtgtgggtggggatttttaggtgggagttagtacagcatatgtgtggagggggaacaatggacaggacaaggttatcctatccattgaccttggggccaggtcattgaataggtgggaagggggtgagattgcatatgcttggggcttcacctgcctagttataggaaggacaagatttaagcaattggggaaaggcagccatgcagataaggcattgcctgagaaagttgataaaggctatacaaccccttctcttcctccttccttagccaggctccagcaggtagattcaaaggtttcttgtaggatagaatttcctgcctcagcaggggcaaggaggccttggggctgggctgggctgggctgggtgtggcactctccctgccagcttctacaacctggggagggaacaaaaacctgtgggtgcctcagaccacagcagagctcacagaacctgcgggagccaggctgacccgccagcatggtagagttcgcgcccttgtttatgccgtgggagcgcaggctgcagacacttgctgtcctacagtttgtcttctccttcttggcactgggtaagttgggctgcactgtaagacgggagaccaccgcact

SEQ ID NO: 7934 - DNA, 2300 bp, Homo sapien
tgatacctgaagtgtggaccaccatttgtggtaccacagatgggaggtgaggacaggaaggcatgaaagatagctcttccgagagtttgctgtgtgagtgagcagaaaaatggggcaggaggtggaggacacagtgtgggtggggatttttaggtgggagttagtacagcatatgtgtggagggggaacaatggacaggacaaggttatcctatccattgaccttggggccaggtcattgaataggtgggaagggggtgagattgcatatgcttggggcttcacctgcctagttataggaaggacaagatttaagcaattggggaaaggcagccatgcagataaggcattgcctgagaaagttgataaaggctatacaaccccttctcttcctccttccttagccaggctccagcaggtagattcaaaggtttcttgtaggatagaatttcctgcctcagcaggggcaaggaggccttggggctgggctgggctgggctgggtgtggcactctccctgccagcttctacaacctggggagggaacaaaaacctgtgggtgcctcagaccacagcagagctcacagaacctgcgggagccaggctgacccgccagcatggtagagttcgcgcccttgtttatgccgtgggagcgcaggctgcagacacttgctgtcctacagtttgtcttctccttcttggcactgggtaagttgggctgcactgtaagacgggagaccaccgcactcaggtggggcagagcagccacaccaggtgcacacagcacattgatggtggcaagacatttatcctaaagggggctttgttgcgctcagagcccctgcccagagagaactcctgggcctgcccagaggcttcttgggggtggagtggggtagaagtcaccgtctgctgctctgggcaggttacttactcttcctggcttgcactgtgggttctcctttggcacttggatgaagaccagtctgcaggctgccaagtggtgtgggaaagcctctgggcgatgacgggaaagttctgggctctgcagcctgctcagagaggagagatttccttctgtgcgctcagggaggaggaaactggggctggtagtagggtaagtgagagaaacagggaaagaaaagaagggtggggagaaggtgcagactgagagtggactgtggagtgggcatgctgggtaccaggaaacccggagtcagactcagctgggcaactgactttagccagcccatgcctgacctctccaagcctcgacttcaccatctgcagaacggggacaacaatgctggccttgcagggctattgtgaaggaaatgaagaaatgtgctgacctctgcttggcacagacctggcctggaccctgggctgggctcacactggagggcatgagcatggccccttacccaccccaccactgatttgtggccagagagatcacccttgcccaaacaatagctctgccaaaggtaacattttctaggagggtctggatctgtggcttgggaagggagaatgactaggagtccgtggggtttttcctttcatctgctggcaccagacaaggtaggaactgctgcttccagggctgaggttcagcctgtacacagataccactctcctggttgttaaaatattgacacactctgaacacattgctcagtagccatctctctttctctctctctctctcacacacacacacacacacacgtacttcctcagaaactcccccacaattctgtagtgaaaaaactcccccttggcaaagcaggccctccaggaccctgccctagcatcccttctggttgagctgtgtctctgttctaagggtttttagacattttacacattcctgtataccccctttgcacagatgagccaaacaatcaaggatttgcctccagtaagggctgagaaaccatcagtcagaggggaattccacactaggcctggtcttagccctgatgcacccctgattatggggcggccaggggctggcctcttcctccctccctcctttcaacaacaaacgtcactggtcactgaaggcaaaggaatcagagctcagcaggtttgggaacactgtgtagttcagagtggccacagacaagaggcaggagcgggagggacagggccagctctggggctcctggaggccaggctgagctacttggactgtgcccaaagttatggggaagtcatgaagggcttgaataaggggaggcacctggctggatttatctctgggaaaatggggcagaggatgaacagaaagagagca

SEQ ID NO: 7935 - DNA, 2300 bp, Homo sapien
atgcagaaaaggaaacctagacaagatagcgatactgacttgcccagggtgagtgggtgggccatgagttccagcccaggcctcctccacaggagacccttctggagcaggcacgagccacagactgacctgggatcttccaggccagcaggagtcttgcctccaagagcaccctctctgaggagaggatgccaggatttactggcaccttcagtatcctcctggcttcactcctctttgcccaaaaacaaaccacacctgtttctacctcccagcctttgcacttaccagtccccatgtctccccccatcccccacatgtggcatgccactagcctaccctcagtttcctaaaaggcactaagatctttccagcctcatggcctcaccacatgctgggagctctgcctggaatgcttttctttctactcttggccaattcgggccttggggcccagtaacacggttgagagatttactcctgtggccttgagagggctgaacaaatggaagcatctctaggttgcaccagaggcatctattacctgctgccctgtgcctgtaacttctgtcattctcctctccccctgtgagaacatgataaagaccacaaaggcagggaattcctctcctcttatgctgtgaccccacagctatctcgctccagctatgcctaagaaatctgtcttatcactgacatgcttgttgtccccactcgttccctgagcctccatccaacaagtcgctccaccacatgctggtggatctcgcttcctatgctcttccctagatcaggccttccctccattccctctaccactgccgtgccttgaggctcatcctctctcacatggatcccccgcccctacagcctccccactgccctcctgacctacagcctctcctgtccatttcccataccatggctaaggacacttaaaacccacctgaccagccatttccctactaaagctctcccaagacccggctcccccccaatatctcaagagtggcactcccaaacctctctcagttcaagcacccgcgcctctcacttcagcctcattttccacagttgcctgggctccagccactccagggcccccagccctgccccaaacatgctggcttttctaacactttatgcctatctttctgctttgccctcacaccttccatctgcaaaattcctattcattaatgggcaaaccattctggaatgctttctatgtgccagacactacctaggctctttttataccttatctcatttacttctcaaagtacctcacaaaaataataattattattcccattttacagatatggaaactgaggctcaagagaggcagggcaagaactggactcctagtctatctgattccaaacctgctgtgcaccaacctctctgggaagtgcaccagcgcccccactcccccagcccagggcagagtcttctctactctgtggttccatagccccctggtttctcgcttgtcccggccgttgtcaccagtgactgtgtgcggctgtctctgctgccccccagcgtgagcatcccaagggcagaacctgggctgatctggctgggtccccagcacccagcagggtataggtgctctgtgaggtttcttaataaagagatggaaagccagaagcagtttgggtggttgagatacccagccctaacctaactaatcctgataccagtgaccaaaagcgggaccttcgcatctttgctgccaaaagacagcccctcctaaagagtaaaggcccgaccccctgcacgccctctgcctgcaccgcacgtgcttggttttccccgcccgggtactggccgccgggccgtaccaatctccgcgggggagcgcccggggtcggactgagggagcgaggggaataaccgggcgcgccccttggaagcagggctcagagctgctctcctctcacgcattccccggatccgcgcggagcaggctgctggccagccccgggcccgcgccaagcagagcctcaggtgcggttcccccacaagcaagtggcgcgggcggcggcttagaacggcccgccccgcccgccgcgtcggcgcctgccccgttgtgaggtgataaagtgttgcgctccgggacgccagcgccgcggctgccgcctctgctggggtctaggctgtttctctcgcgccaccactggccgccggccgcagctccaggtgtcctagccgcccagcctcgacgccgtcccgggacccctgtgctctgcgcgaagccctggccccgggggccggggcatgggccaggggcg

SEQ ID NO: 7936 - DNA, 2300 bp, Homo sapien
tggcttggttaaaaccattcgctagagtacaagttctcctaaggaacaaactctaagtcaaaaacatgacagccagggtcactgcctcctggaagacacagctcccagcctgtggatggcagagccgacggaatggggtctccaggaagcactaccacagagaacatccctatcccactgcccagtgcaaaaacatttttaacagcatgaacaagggcaagtccattcatccattgatgtccctaaggacatcaaaggacacagggaacagaaaaggactcaagtgagagaaggggctgtcagaggctactggctggatacatggggcagctcaagctgctcgcccccgagacagggcagcagctgggttcctcttcaagggctacgagcagcacccacaccaagaggggcagataaccacagcgataatcacacaagaagcaatgccaatgcctaggtcacagttaaagtgtggtacagctgcagggtgggttattgcaaccactaggacattgtaagtgattctgattaacagaagggaaacctcgatgttacattaagggggagaaaacaagattcataactatatctacagcatgtcctcaattgtatctatgcaatgtgtataaagaaaatgatcaagagatatactaaaatgctaataggaaggtatctttggatagtcgatttaccagaaatttttttcatttgtctatattttcaaaaattccataattagcaagctttatttttgtaacaaaggtgggcggtgtaggcgaccgttagttactaaagaaaaatccatgtcagagaggctcagcaaacagaatacagacttagaaagagggagaggggcttcatgcaagacacacacgcagaccaggacagctgtgatgacttcccagggtctaccggatttgtacttgaatccaggggtcaaggcatcagctaaggaaaacttaggcatgcttcctcccacttcagtttctccagctctaggtaagggaggtgggggttggaagagttgctattcctcgcttgggaaaagctgcggggggtgcggggcgggggttgatttcaactctgcgcgattcactgaggacctcagttctaccttggaggacatgcagggtcctctccgctgccttctaagcatgccaggctcaagagttgctgctatgtgggctccagagcctgggcgagaggatggatgtgggacagaggacagggcagacacacctgttccagtcgggcatgttccccgtctggtggctgtctcaggagacggcaaaacccataccatcctgcccatccagtctatcactgccaaagctcgctctacctggtgaagggagaggggagggaagtgccaggggtcaccagccgcagtgggggctggggaggagttctcgaatatccctaataactaagaatggtgggtggtaccgctcccacctcacggatgagggaaacaagctggggggcgggtggaaagcgatgtaacagaggtcgtaaaaattgatgagtgccacagtggagaatgaacgtggactcatcagtacccaccagcctgccacagggccctttccagaaaatcttctcgcaggtccataacccctgcgccgtggcactcaccccatctcccagacccctcgcgcgacagcgcaggtcctccgtgagagcgctggctccggtcagcctcggcctgacgctcgccgcgcaggaccccggagtaggcggctatgagggtcttcatggctgaagcccgcccagtcacggccccgcgggaagccgcttcaccccgcgcccctggcccatgccccggcccccggggccagggcttcgcgcagagcacaggggtcccgggacggcgtcgaggctgggcggctaggacacctggagctgcggccggcggccagtggtggcgcgagagaaacagcctagaccccagcagaggcggcagccgcggcgctggcgtcccggagcgcaacactttatcacctcacaacggggcaggcgccgacgcggcgggcggggcgggccgttctaagccgccgcccgcgccacttgcttgtgggggaaccgcacctgaggctctgcttggcgcgggcccggggctggccagcagcctgctccgcgcggatccggggaatgcgtgagaggagagcagctctgagccctgcttccaaggggcgcgcccggttattcccctcgctccctcagtccgaccccgggcgctcccccgcggagattggtacggcccggcggccagtacccgggcggggaaaaccaagcacgtg

SEQ ID NO: 7937 - DNA, 2300 bp, Homo sapien
cctatctgagcaccttgcctctcctgggagggagggtataaagagtgacttgataggaatgtgtcccagactgacattagcgagcaggccgggcctgggcatcgtgttgggctgggactttgccacgggaaacaggcagcaagaggacacaagagcaggcatgtcaacagaaccttcattggcggtatccttcccctccttccagaacggacattctctccagccctgggggaggggagtgtgacatgaaaacagatcagagctggtcagatgcctacattcttctgggtcctacagcaagggcattgacttgcactgtgtcccaaggcacctcattcaaccaaatgtcccatcagagccttggggagggaggaaatgatttaaagagccacctggggcccactgggtgacacatcttcatccagcagcccagggaaaagtgcagcgactggcctgctccagatgtgcaggataatttgctgtgacctccacaggggaattgcagctcccttttctaggcctcagcttccccccgtcatccaaggaatggcttagacctttcagggctctgccagcccatgcagtgctgtgggttcctggttatcggcccagtgggaaggtcgggggagccataggaaggggacaaaaagatgctgcacggcgtgatggtcacctgccagggtaactatcccaggcctggccatcagctcaggagcaagtttccaagtttcccacctggtattggctgccccagctcttccctcaatgcctgcctgcctttttcatcaaaactagcacaaggaactttttaattccagcttcactgagagctaacttggtgggcagacctgcttgttaggcaaaacattggaacagcaatcttaacagagctcatgtaaacgagattttgagatctgctcgctgccccgagccccactagctatggattagactgctgctgtttcccatttatttggggagtagctgagagttggtttggtttttgagcaactttaatctgtttgccaagggcaaagcgggagaaagagcatcagtgccccaagcagtggggatgagagtgagggagtcttgctcacatttgcacagactggcagcgtcagagctgggagtggtgccagccagccttttccatcccctctgtcacctgaagatttgcatttcaattttccaaggccagccaccagcaccctctcccccagagctgcacacaagtccttcagctctgccaggaggctcccaaatctggagtcacagaaaacctgggctcttgacattctgctggtggccagtgactctgcttccagctggcaccagtgcagggaaggggcactttgcagcactcaggtgggagtgtcattgatgtcacctcttttgaggcagggcagccaaaaagaccaacgtgttcattccttgttatccaggaattgtatttctagaagtttgtttcacaaaagcaatcagatatgtggacaaagataaggtatttattgaagcattacttctaagagggaaattttggaagcttttaaaatgtccatcaatcagggtttgagtcagtgctgttacatgcatgagagctgtgctgtagaatacaaatgcagccacgagaagatatggaactgagggattttgataaggacagatagctgtatgtttggtagaaaatgatataaaaatgatatcaacccatataacctcaattttgtgggttttgaaaaagagcatgtatatttttgagtagaaaaaggactcaatgcgtcagatggttttatctggatggaaatattatggattttttaaattttctttttgctttcctatatttttaaaattctctaggagtttctcttcttttccctctcccctcccctcccctcccctccccctcctccgttcctctcccctctcctccgttcctctgccctctcctccgttcctctcccctctcctctcctctcccttctctcctttcttcctttccttctttcctttcttctcactctgtcactcaggcttgagtgcagtggtgcaatctcggtttactgcagcctctgcctcctgggctcaagccatctttccacctcagcctcctgagtagctgggaccacaggtgcgtgccaccatgcccagttaatttctgtatttttgtagagataagcgtttcaccatgttgcccaggctggtctcaaactcctgagctgaagcaatcctcccaccttggcctcccaaagtgttgggataacaggcatgagccaccatgcctggccctattatttttc

SEQ ID NO: 7938 - DNA, 2300 bp, Homo sapien
cagctctgccaggaggctcccaaatctggagtcacagaaaacctgggctcttgacattctgctggtggccagtgactctgcttccagctggcaccagtgcagggaaggggcactttgcagcactcaggtgggagtgtcattgatgtcacctcttttgaggcagggcagccaaaaagaccaacgtgttcattccttgttatccaggaattgtatttctagaagtttgtttcacaaaagcaatcagatatgtggacaaagataaggtatttattgaagcattacttctaagagggaaattttggaagcttttaaaatgtccatcaatcagggtttgagtcagtgctgttacatgcatgagagctgtgctgtagaatacaaatgcagccacgagaagatatggaactgagggattttgataaggacagatagctgtatgtttggtagaaaatgatataaaaatgatatcaacccatataacctcaattttgtgggttttgaaaaagagcatgtatatttttgagtagaaaaaggactcaatgcgtcagatggttttatctggatggaaatattatggattttttaaattttctttttgctttcctatatttttaaaattctctaggagtttctcttcttttccctctcccctcccctcccctcccctccccctcctccgttcctctcccctctcctccgttcctctgccctctcctccgttcctctcccctctcctctcctctcccttctctcctttcttcctttccttctttcctttcttctcactctgtcactcaggcttgagtgcagtggtgcaatctcggtttactgcagcctctgcctcctgggctcaagccatctttccacctcagcctcctgagtagctgggaccacaggtgcgtgccaccatgcccagttaatttctgtatttttgtagagataagcgtttcaccatgttgcccaggctggtctcaaactcctgagctgaagcaatcctcccaccttggcctcccaaagtgttgggataacaggcatgagccaccatgcctggccctattatttttctaatcagaataaaaatgatgtttttatgagcagaatacccttactcattgtctctctcagcctcttccacccccatcacattccttgtaacacagggtaggtgtcacaggctttgcctctcatgactcagggtttagggacactgcatcacccaccccttcaagcaccagccccagggcaggaggtgggccctgaggaagccaatcatcgtttagagcatcccagtgtccttagtaccacaggtcaggtcctcagctgctgcagccttacaactaacctctaccccaggctggctggcacagggctgtcgcttgtcctgtcttgtccttcctgccttagaacctgaactgagcccagctgactgtgggaaagtttccatttgggccagctgcagtgtcccttttccaggccaggggagtaggaggtgggctgcctgtctcattctgtgagctgtggaggagcccacagagcacagggccaagtaaaccctacctccaaggagctcacagtttggagagactgacagtgggggcagagcttgcagccaaggccccggttgccaaactcaggaacttggactttactcacatgaagccagacacactctccagtctaagagtgacaagggttggatttgagttttagaataatcactctggctgttgcgaaaaggatgggcccagagggagggaaggcaggaggctggcagagtgcaaagaagagctgctgtgtgcatggctgaagactgagaggaacaagggcaaacattgcccaccccttcccagagacccacagtgcaaatggtgactgcccaacaccagcactgtggccctggggatgagagtctgaggtaaggtgtggagattcattgcagccctcaggcccatggaggtccaggggaaatgacacatccaatccctccctaccctccgggtatgccccggtatccctctcccagccagtttcctctgacccaaggtcatccttgcagctggtgaagacacacaacctgctgaccaccaggaactatatctttggataccacccccatggtatcatgggcctgggtgccttctgcaacttcagcacagaggccacagaagtgagcaagaagttcccaggcatacggccttacctggctacactggcaggcaacttccgaatgcctgtgttgagggagtacctgatgtctggaggtaagaatccaccccctgtgctcctgctgggcactgttgtca

SEQ ID NO: 7939 - DNA, 2300 bp, Homo sapien
aaatgggaaaatattccaccctctcagaagtactagggaagagtgtcttccaaacttgcagtccaccccatggaaacaaaagtgaaatatttgatttgtgagaagactagaggttgtcatcctctggtccaacttctctatcaggtggtataaatatattaaagtcactgtattagtttaagacacaaactgggtggcttaaaacagaaatttattctctcacagttctggagtccagaagtccaaaatcaaaggctgtgctctcttagaaggctcgaggagagaatccttcaatgccccttccagattctggtggctccaggtgttccttgccttatgcctacacaactcccaatctctgcctctattttttttttttttttttttttttgagacagagtattgctctgttgcccgggctggagtgcagtggcataatctccactcactgcaacctccacctcccgggttcaaacattctttttttttttcttttttagacggactttcgctctcgttgcccaggctggcgtgcaatggcgtgatcttggctcactgcaacctccaaggttcaagcgggttcaagcgattctcctgcctcagcctcccgagtagctgggattacaggcatgcaccaccaccccagctaattttgtattttttagtagagacggggtttctccatgttggtcaggctggtctggaactctcgaccttaggtgatctgcccacctcagcctcccaaagtgctgggattacaggcgtaagccactgcgcccagctggattcaaacaattcttgtgcctcagcctcccaagtagctgggactacaggtgtgcaccaccacacctggctaatttttgtatttttagtagagacggggctttgtcatgttggccaggctggtctcactacattgcccaggctggtctcgaactcctgggattgagcaattctcctgcctcggcctcccaaagcgttgggattgtagcgatgagccactgcgcctggcctgttcttctaagaacacctatcattgaatttgggtcccacctagatattcagtattacctcatcttgaaatctttaacttaattttatctgcaaaggcccttttttccaaataagactacattcacaggttcaaggaattaggatgtggacatattgtgtgggccactattcaacccactacaccattcttatatggcctgcccctcttttctctcaagctaccctgtccaaatgatggagaaattaagatgttaatcttaatttgtattaatctggactaaagtgtcaaccaaccactaagaaaataactcaaaaatatacagaaacaagaagataattaaaatagtatattagaaaacagttgtctaacacacaagaaggcagtaatggaaagagtgaggaataaaaaaataagacacacagaaaacaaatagcaaaatgacagatgtaaatcccaccttataattatattaaatgtaaagagactaaacaatcatatggcaaagagtagaaatgtggatataaaaaatatccaacactattatgtctacaacgcactttatattcaaagacacaaataagttgaaagggaaaggatagaaaagacatgtcatgcaaataggaacaaaagagtgttggggtcgctgtaccaatgtaggttatacacagtaaacttagagacagaaactgttactacaaagagcagcattttataatgataaagcgtggattcatcaggaagacataacataaacatgttataaacacgcatgcaggtaacggcagagtcccaaaacacatgaagcaagaactgacagaactggagggagacatcaatcaataacaacagttggagaattcaataccctgctctgaataatggatagaacaattaggcagaagaccaacaaagaaagaggatatttgaacaacgtgataagccaatttgacctaataaatatctttatctgtgaaacaccctagcttttagcctgggtaaggagctggagagatgtgaaaatgtggaaagcaagcctaagtcgcagtgtggcctatgcctgagagccatcttcagtgcccccttgtggctgtatctgggaaccacagacagaatcatggaactgaccatcttcagtctcaaagtgctgccctcaccactacacccaggggcaggtggtcttcgggggaaaggcggttccagttccttctcccaaggtaacaactcccatcccaaggcaatgttcacagaacctatcagagtcccccctgccctatgcacagcttaa

SEQ ID NO: 7940 - DNA, 2300 bp, Homo sapien
cccaggctggtcccaaattcttgggctcaagcaagaattgtgataatgtgttatggcagcctcagaaaactaatacagcttagaaacagaaatgtgttttctgtgaaattcccccagatcttggcaccacatgagttcaatcagataatatttgggatttcccagtgactcctttctcaacaaacacctgatcaagcgactcctttctcaacaaacacctgaccacacgccccaggctccagccatgaggaaccactcagtgtgtcagaacaggagacagtgtgacatctttgtgatccagctctgagaaaagatccaaggtgtttttcaggcttctgaacaccctggaaagatagtatgcttacattttgtttaaaaaatttaaaatgcaactactatatgccaggtcctgtgtgggcactttacatatgttgatttactttaatccctacagcaatcctattactattttaaagctgagagaggggaagtgacttgccttgggatacatagctcaaaggtggtagagccaagattccaaagtgcctgattcctattgtgtctgactctaaaacactatgttctttctgctatgttcatccaggtggtggaaaaattcagtctaggagtaaaaaaaggaagatcaacatcctgcagaatgactcatgctattcattatagaagcaattgctggagatgctatcattgtggatcacggaagtcttcatggaagaggtggcatttgagctgggccttcactgcaaaaaaaaaaaaaaaaaatttcctgattctctgtcaggcactggggatccagagatgaatcagacaaagtccttttgcttgaagaattcacagtattttgtgtgtgtgtgggaaggagggtggctgcttacatgtgttaaaagacaatgtggccaggcctggtggctcatgcctgtaatcccaacactttgggagcccgagactggaggatcgcttgagcctgggagtttgagactagtctgggaaatatggccagaaccccatctttacaaaaaaattttaaaattagctgggcctggtggcatgtgcctgtattcccagctacttaggagggtgaggtgggaggatcacttgagcccaggaggtcgaggctgcaatgagccgtgattttgccactgcactccagcccgggcgaaagaatgaggcactgttaaaaaaaattaatagaataatccagacccacggtagggtcaaaattcctaactcaaggtcccagagaggctcagagaagccttttggaagaagggactcctgccccagctaagactgatggataagtagcaaaggctttctggggacacagcacaaacagcccacctgaagcggtgaatcggcgtcctgggtgcctggcacaccttgtagctcagcttactagctagtggagtgcgaaggggcgtgtacttgtcggttggagctggtcatgaaagagctcgtgggactgcccgacggttctcaggtcccagtgcatcctgcgtggtggctctctgctgaaccataaagcattccttttcaatccctgcacgctcacgccgggaaaagactgcacaaggggcctgccaaggcagacaagcgatcgccacccagctggcttccgagggtccccgccctccaccggaggcctgttaccacggcaaccagtgagggcggaagtggctcagaagaccggttctccctaatcaggtgactctcccgcctcctgcacgtgacaccggagcccagaagcgcgctctacctaatcaagaccccacccctctttccctttactgacaattgacagcgacctcttgcaatggcccttccgcctccaccaggagactctgcccgttggtagtaaaagaaccaattagactgggaaaaaaagaagcaacgccccaggtttcaccccggcttgacagacgcaattgaggccatccttgagtccctccgcccccaagtccagtaatgccagcgatggacagaccttctacccaatagcacgccccttttctgccgttgggtcccgcccccttgagggctaagccaatgagcgctccgggtctcagcggggtggaggggttgcactgcggtaatatggctcttccttagccagcggcggcaacggcggcagcggcggcagcggcggcggctactgtctgggctgagcagtagtgcctctcgggtggcgggtttctaggctgcaggggcttggtaggtggtggcaagggggcggcggcggatgccggaagagtgcccgccccgccgcttggcggcccctggat

SEQ ID NO: 7941 - DNA, 2300 bp, Homo sapien
tgttaactttctgtctcgttgatctgtctaatgttgacagtggggtgttaaagtctcccattattattgtgtgggactctaagtctctttgtaggtctctaaggacttgctttattaatctgggtgctcctgtattgggtgcatatatatttaggatagttagctcttctagttgaattgatctctttaccattatgtaatggccttctttgtctcttctgatctttgttggtttaaagtctgttttatcagagactaggattgcaacccctgcttttttgtgttttccatttgcttggtagatgttcctccatccctttattttgagcctatgtgtgtctctgcacgtgagatgggtttcctgaatacagcacacttatgggtcttgactccatcctatttgccagtctgtgtcttttaattggagcatttagcccatttacacttaaggttaatattgttacgtgtgaatttgatcctgtcattatgatgttagctgattattttgctcgttagttgatgcagtttcttcctagcatcgatgatctttacaatttggcatgtttttgcagtggctggtaccggttgttctttccatgtttagcgcttccttcaggagctcttgtagggcaggcctggtggtgacaaaatctctcagcatttgcttgtctgtaaaggattttatttctccttcacttatgaagcttagtttggctggatatgaaattccgggtcgaaaattcttttctttcagaatgttgaatattgcctccactcttttgtggcttgtagagtttctgccaagagatccgctgttagtctgatgggcttccctttgtgggtaacctgacctttctctctggctgcccttaacattttttccttcatttcaactttggtgaatctgacaattatgtgtcttggagttgctcttctcgaggagtatctttgtggtgttctctgtatttcctgaatttgaatgctggcctgccttgctaggttagggaagttctcctggataatatcctgcagagtgttttccaacttggttccatcctccccatcactttcaggtacaccaatcagacatagatttggtcttttcacatagtcccatatttgttggaggctttgttcatttctttttactcttttttctctaaacttctcttctagcttcatttcattcatttgatcttctatcactgataccctttcttccagttgatcgaatcggctactgaagcttgtgcatgcatcacatagttcttatgtcatggtttacagctccatcaggtcatttaaggtcttctctacgctgtttattctagttagccattcatccaatatttttcaaagtttttagcttctttgagatgggttcgaacatcctcctttagcttggagaattttgttattaccgatcttctgaatccttcttctctctgctcgtcaaagtctttctccgtctagctttgtttagttgctggcaaggagctgcattcctttggaggagaagaggtgctctgatttttagaattttcagcttttctgctctggtttctccccatctttgtggttttatctacctttggtcttcgatgatggtgacgtacagatggggttttggtgtggatatcctttctgtttgttagttttccttctaacactcaggaccctcagctgcaggtctgttggagtttgctggaggtccactccaggccccgtttgcctgggtatcaccagtggaggctgcagaactgcaaatattgcagaacggcaaatgttgctgcctgatcattcctctggaagcttcgtgtcagaggggcacctggccgtatgaggtgtcagtcggcccctgctgggaggtgcctcccagttaggctacttgggggtcagggacccacttgaggaggcagtctgtccgttcccatatctcaaactctgtgctgggagaaccactactctcttcaaagctgacagacagggatgtttaagtctgcagaagttttctgctgccttttgttcagctatgccctgcccccagaggtggagtctacagaggcaggcaggcctccttgagctgcggtgggctccacccagttcgagcttctgggcagctttgtttacctgctcaagcctcagcattggtgggcgcccctcccccagcctcgctgccgccttgcagtttgatctcagactgctgtgctagcagtgagcaaggctccgtgggcgtgggaccctctgagccaggcgcgggatataatcttctggtatgctgtttgctaagacctttggaa

SEQ ID NO: 7942 - DNA, 2300 bp, Homo sapien
ctcttgcagcccccgccccctccccacccaggaatgccgggtgccttcggggggcggcgcactttgggagaggggaagacggtgactggagttttgattcccccctccatatccagcggatatttttctcgttctgagaagtgcaagaaacttgcaggaccaggaagacaaaggatttggatacaggctgggtgggaggacgggactgggttacaccgagaacccctctgagacccccagccttgacggcatgtttgtcgcaggcgcccctgtgctgggcgctagctgcggggctctgcggaggaaaaaaactgtacgatccaggcttctcctcgccttcctgtgggttttgccgacaggctccagaaaacagtggggcttcccatctctgcgtgctgactacccacgcgcaggaacgcgccacgcaggtggcgtcgcggtgcaaatagcagaggggcgctgagccccgcaggctgcagggagacggggtcctcgggggacgcacggcgaagccccattcctcgttcttatggaaggggacaccgaggctggggtggctgagggcttgcccaagctcacagagccagataagaacgtcccttttctgctccagcgcccccactaccgtgggcgcctccttttccaactccccaaacccttagaaaggaatccctttgtctctgctcctcccgaggggagaggggctggggctgtgtctgactccgggcgaacgccaggtgttggtaaatttgggagaagctgggaagggagttaatgaggtgagaatgaagtgaaggagaaaaaaagcggagatagctgctccgcgggctgcgggcgggcggggcagcctctcctccgcggcccgagggcgccgcctggaggccagaggcaacaccgcgccagccccgcgagcttccccgcttcgctaaggcggggctgcccagtcccagcccgcatgcttccactcccaccctccaaagtggagcggctaaagacggacttggagactcggaatcctcactgtacaaagagccctaccatcccgtttcccatcctccccttcccacaccgagaaagcagggccccgagcaagccccatttcctgatttcgccggacacccggcttgccgctccctagctgaaccccacctctgtgcctcagtttcctcatctgtgagatgaggcagcgatagtgcctatctcacggggtgctgggaggagcagatgcgatcgtgttagggaactttttttgtttgtctgtttgtttgagacggagtttcgctcttgtcgcccaggctagagtgcagtggcgcaatctccgctcgctgcaacctccgcctcccgggttcaagcggttctcctgcctcagcctcccgagtagctgggattacaggcgcccgccaccacgcccggctaattttttgtattcgtagtagagacggggttttgccatgttgggcaggctggtctcgagctcctgacctcaggtgacccgcccgcctcgacctcccaaagtgctgggattacaggcgtgagccaccctgcccggccagggaacgttctttataaaagcggaattgtgcccgaattgccccagcttactgaggaggtaaactgaaacacgtttgggaaggagaattgccgaggccctattaactaatgctcaatattgcagggataagccccagctccgggtcctcgactctgctgcctcgcctggactcctgattcctcattcctctcctttccgtcccaggttgcgtctgtccgggtttccccctctgtctccgtggctctcagccttgtcctctgagcgtccttctccctctcgctgtgtctgcccggtctctcctgggtctccggttctgccgcctcctgtccctccttccggctgccccggccagaggggctcgaaggcgcgttggggcccggggccacgctgggagacacgccttcggccgcgcctaattcgagccaggcgcgggacgcgtcccccggccgggcggagcgggaggggacgcccgccgcgctcggcctccccgggccccgacccctcctttgtaatttgaataaaacgcctcccccgcccgcgcgccgccttaacccgccgcctccgctctccccggctgcaggcggcgtgcaggaccagcggcggccgtgcaggcggaggacttcggcgcggctcctcctgggtgtgaccccgggcgcgcccgccgcgcgacgatgagggcgcggccgcaggtctgcgaggcgctgctcttcgccctggcgctccagaccggcgtgtgctatggcatcaa

SEQ ID NO: 7943 - DNA, 2300 bp, Homo sapien
cctgggtcctgatccacaggacacagctgagtagctggcaggtggcaggagggggcagggctgagcttcaggagtatgggatgttctgctggtttccttcaactccccacaagacaatggaaagtcactatccttcccccatgtgttcactgggagccaccagccatagtggagtctgagccagagatctgggttcatatatcagctcccttttgagcctcagcttccacatctgtgaaatgggaatactaatcctgatcttggagaagtagaggattccatgggattgtattattcccattttgtgggtgagaaaactaagtcttggggaatttaagcaacttgctcaagattacacagctaaaaataaaattgggcaaaatctgtattggaatccaagtttacatgactccaaattcttccatttctactctagccgggagccagaggggatttctggcaggactgctgcaaatgtttggaggcaactgactgagcctcttaaacgggcagagggtgcgcatcccaatcagacagagaccacctggaatggctctgactgaagtggccggggggcctggggcaggggagctgaagacattcttgggcccccggaggcctttgctctctgcctcttaggtggaatagcccccgccttcccttcctcaatgccccaagcccactgtctttccactgcttttttgatcagattgccccagtgttctggcatgagagatgggggtgtcccagcgtatgttccaaaggatatccctgtgattgtgtgcagaagtacatgttaggcattgtacacttgggagctgtgtgtgcatggaagctcacgcatgtttgcacctgaactgtgtgcgcgcaggtggtctgtgtgcagcctccccttcatgatgtgtgtacggccatttcacacctctgtgctactgtgtgtgagggcagatgatatgtcctggtatctcccgagtgtgtttgtaaccatatgcggggtgatatgccccagcctgtgtgtgaggactggctgtgtgggagtactggtatggctgggaggctgctatgggcactgtgggcccagatgtttgtgttgtatgtggaggtacctgtagctgggtgtggggcagcctaggagtgccacttcatctgcagctgcaaagaatggggaaaagaatgtcaggcattttgggggacctgagacaggctccgtgtcctcactaagtctccatttccctttctgctaatgaaccagttatccttgaggacgtcctgggattgaggcccctagaaggagggggagacatggatgaacccacagcacccgatgggcagttagaaatcgcagtcatgttgtggggtaagcagctggtctgctcaggggaggccaagtgagggggtccagaagcaccacacgcctgggctactcgacgcaggaggtgcctctctaggctcctttaacttaggaaacccagtcctcctctgctccccctcccctgtgtccagaacactccccagcagtcaccccaacggctgggacgccgcccagctccacacctaaggtttacagcgggctttgtagcgcggagtcctcgtgtctctttctcttgcaggatcgttgattccttttccacaactggaaccagaggccagaagagatggccccccgaaggaccaggactaggacacgaaggcaggtttcgggacctcagacgtctacagtaaccacgctgcgcgaccaacacctaaggatgccccggctccagactgagacccaagtctgacttccccctgccagttgaggctccttgcctggttgctgcgacgattcgagatgggccttacccgggccccacgcgtgtcgcaggcacgcagcacgcacgcttagtaaacaccagctgtagtgagcgagtccccctttgtaactcgacagagtactaagttctctggagcggcgggcgccgccggtcagtggcgtccgcggggaccccgcccccgccccccgcgcgcggccggggccacccggtggggttgcgacgcgctgacgtgggcggatcaaagcggccgcccgccttataaagcagtttgggaggctcgcgccggagatcgcgccaggcgaggaggagagctcgggcgagcggcgagcacaggccacgggagctgagcgcagcagagagcagccggagtccgcgcctgactccgcgcgggtcctgagccggccgcagcttgccaggatccccggcgtccttctcgcgccgcttcacgaagagggcgccttcgccgctcgcccagccggagtgcgc

SEQ ID NO: 7944 - DNA, 2300 bp, Homo sapien
cttcaccttcaaaccatatctcaaatttaccatctcctcctctattaatctggattattacaacagccttttaactggtcttccggctttcacctttgcctccccacaatctaatgagcagccactgatcctgttaaaatttaagtctctgctctaaacccttcaatgacttcctatttcactcataataaaaaccatagtgccttccaagacctacaaggtcctacctaaagaatttgcccctaccatacacacacctttctggtctcatctcacctctctcccagtccctctccctggactcctggttgccctgtctttgccttctttggaatgctgctgcccaaggtatctccatggctggccccttcacctggtctttgctcaaattcaccttcttagtgaggccttctctaatcactgtatttaaaatagcaattgtgcgtcccttgatactacttattcccctaccctctaacctttgtttatttttctccacagtatttatcatcatccgacacactacgtattttacttgtttattccccccccattagaatgtaatcttcatgaaagcaaggacttcgatttgttcatctgtaacccccactgctcacaacaatgccaacacaagtagaccttcaataattaattgaactaattaataaataacataaattatagtcgcccgttgctgcacctgttcccttactggactgagagctttctgcaagcagtgacacccttattcacccatgaactcccagcacctaacatttgcgctcggcacatagtaggcattgattttaaatgaatgaaccaacaagacaggcctatgaaacatctcagcctttcaaacacagtccctatgctatcattccctaaatatgtcagtgtgtgggggttatccgaaggaagaggttccaataccaatttccacgccctcacgcgtacaccctctgttatccctacaatacccaagcgagaaaatgagtaacggtgacagccagaaaatgaatcctgaaccgtgcaatgacaagtccgaaggagaaagcagttgcgatgagatgaaagaaggtagcgggactcaaaacagaaacactgtcccgggggtggtggcaaggagagggaaaggccccagtggccacaaccatagagtcctgctctcttttgacagctaaggaaactaacgcccagagaggaaagcgactcccccgaggtcacacagcaagtgagccacggcgagaacccacagcatcccgcgtccgcgcgccgccccagctccctcgcgtttggggtggtgtcctccgcgcagagcccccaccagcgcacgtgctccgaggtccccggacgcccgcccgcccacggctcggggccggctccccatctcggtccaacgctggggtcgacggcagtgcgctgcgcccgcctcctgcgcccctctcagccagcccgggagcccgccaggggccggcggctggcagcgctcaccgcgaaggtgggcccgggccgcccgctctgcgcccgccgcttacctggcagggtcccgcgggaacctgaagaaggccaagtcggactgcgtgctcttccgcgtgcagttgggggcagcgcagaagttcggcatcgtcgcccgcccgccggccggcccagccctcccctccccgcctcctcagggcagtccgcccgcccgtcggggccggggaggggagccaggccggccggccggctcggcagggccgacgcgcgggggaggggcgggcgggctagaagccgcgagggccaggaggggtgccgcggtccgaggccgggctggggacgcggctccacagtgctgtgagcggccgggaggatttaccgccgccgccgccgctggtgcacctcccgcccgcccgagacgctgccgcctccttcccacaatgcaccctgacgcccgggggtgccctctcttccctcagccttcctcccccgcccctcctttccgccttctcagcaggcgggcacgcgcaaggaagcgcgcctgccggggtgtggcgaggcggaggcgggacctggcgcgcgccgccgcagtgcgactgcgcacagtctaatccgcggggagagagaattgcgcatgcgcgcctgtctcccgggacgctagagcaggcggttcctgggctgctccggtaggtttggcgtgcgcgggtttctgcagatctagggcgagcttgcacgttacatcaccgatgcatctcttcttgcttgcttaatttgccaccacttaggcctttcttgcagaattcgccatatactccttaagggcc

SEQ ID NO: 7945 - DNA, 2300 bp, Homo sapien
ataccagcatgctactaccttctgtaccatacctcaggccctgactgcaaagcaggctgaaactgtaagccttcttttggggtcctcccagaaaagcatgcttccctgggcacagagatacagattccaggagatcctgttcctctcttctcactggcatgatcctctgaggcagaaggttgagaacaaaggaacaggacagccacaacaagctaaggtctgggcagagaagaaatccaaacttgttgagcaaaagaaatcaagaacaagcaaataccagaagggaacagccaaaagtttttcaaagttatggagaacagcaaggaaaatggtccaagagtccagcaaagagtaatgaggagggccatggcacatagggaggagtggtgaagactgaaaaatacgtgagcagccaaagaaggtgcctaacagtgaggcagcatcctagttctggttcagctaactcacattcctctcaccatggggtgaaccaattctcagctaccctggggggaaggcttgttgaagatgacgcctgcagaagctgactggcagagtagtggactctgggatgggataccggcaggggcatttccccaccagcttcaccctggagataactccatgtttcagaacctgttacctttttcctcaaacatgagctatttttcctagtttcctttgaaagatcggaccgaaagtcaagttttcgtggtttaggctcacccttcaaaacacccgaaataacttttgcagaaatcttcctcatgttcaagttttctttcaaaatgagcctaacagtttctttgtctaaatttaactcttcagccatcatcctcacggttaactgcctgtttgaacaaaccaagtccttgaccttctggatattgtcatctgttcggtgggtgactggacgcccacttcgggcatcatctcgaacatcttcccgtccttctttaaaccttttgtgccagtcaaaaactctggcccttgacatgacttcatccccataagcttcttttaaaagatggtgggtctcacttgcagacttgttcaatttcacgcaaaatttgatactaatcctttgttctaaatagcggtcactcattctggcactgaacaacacaggaacgtttaacaggccacgactgtaagggaaagacggacagatcaatctttatagggctgcaggtgtaatcatatcgctcttcttgctcttctagaagcctcgccgggaaagagtaattgcttttatgaatttttgtccctcagcttccagtcgaggctggggagatccgttctgggaagccaacagtcgctgcaaagctgggaaaaattaaatcgcctacaaccacgtctgcatcaaaccagtgcacgcacatctgccgagagtttgccagtcaccaaggtcgctccgattccgcggcccttaaggagtatatggcgaattctgcaagaaaggcctaagtggtggcaaattaagcaagcaagaagagatgcatcggtgatgtaacgtgcaagctcgccctagatctgcagaaacccgcgcacgccaaacctaccggagcagcccaggaaccgcctgctctagcgtcccgggagacaggcgcgcatgcgcaattctctctccccgcggattagactgtgcgcagtcgcactgcggcggcgcgcgccaggtcccgcctccgcctcgccacaccccggcaggcgcgcttccttgcgcgtgcccgcctgctgagaaggcggaaaggaggggcgggggaggaaggctgagggaagagagggcacccccgggcgtcagggtgcattgtgggaaggaggcggcagcgtctcgggcgggcgggaggtgcaccagcggcggcggcggcggtaaatcctcccggccgctcacagcactgtggagccgcgtccccagcccggcctcggaccgcggcacccctcctggccctcgcggcttctagcccgcccgcccctcccccgcgcgtcggccctgccgagccggccggccggcctggctcccctccccggccccgacgggcgggcggactgccctgaggaggcggggaggggagggctgggccggccggcgggcgggcgacgatgccgaacttctgcgctgcccccaactgcacgcggaagagcacgcagtccgacttggccttcttcaggttcccgcgggaccctgccaggtaagcggcgggcgcagagcgggcggcccgggcccaccttcgcggtgagcgctgccagccgccggcccctggcgggctcccgggctggctgagaggggcgcaggaggcggg

SEQ ID NO: 7946 - DNA, 2300 bp, Homo sapien
tcttggctcactgcaacctccacctccctggttcaagcaattctcctgtctcagcctcccgagtagctgggattacaggcacatgccaccatgcccagctaatttttgtatttttagtagaggtgggctttcaccatgttggccaggctggtcttgaactcctgacctcaaatgatccacttgcctcagcctcccaaagtgctgggtttacaggcgtgagccaccatttacttatgtgtgactttaggcaagctattttgcttctttcctagactttagttgcctcctttgtaattagagataataaaagtttccacctcataaagttgttctaaggactgaattactatgtaaaatgcttagaccagtatgtggcacttagtaagcacaaggattgactataataattcatcactcatatgctacttcttaaggtcagagtcagttttataagccccttgtctttcgatttgtactccattgtagaggagtagacattcattgtcattttgacattcactgtagaggaaaggacatttggaggtcagaagacctgggattacaaagcctagctctcttccaattcctagctccgtgaaatttggtgagtccttggtacatctatgtttttctcattcatagtatgaaagaccttaatcgtacctgtcacactgaaatgttgcgaggctcaaatcaaataatatatgttaaagtacaaaaatcctctatgaagatttcacttactatctttccaagagttcttaagcaactggatgcataggaaggtcagggagacagcggagggagggcctggtgattaatatgttccactttacgattttctgaaggtgtaggttgggtttcaacaacagtgactttcctagacctcggagggtatttttagctaatgggcaaatagtagtaggaaacttaaatgctgttatttaccttctcttcctaacctacagttccactcaagaacatgaagagtctcatacgtttgtatagtggttcacaacttacaacgtttacgtggtgcatcacaagatccctatagggtagtattaacccaatttttcaagaaggaaactatgtctggaaattgtagaatgcacattaaaaactctttctgacgagcgtttctaccggatccgatgttacccaaagtacaaaatttaaagagggaagtcaatcacaagatttcattgaatcttcagtatcaggcaactggcttctattttatggccgcaaataactatatattgggccccttttctcacctgtaaaataggaacgaaaagaccttctccacaaataagatgaaataagaacaaaggctgagggtgaacctaccacgtcgtagggcctcaaataaattccttctccttcttgcccttgacagagatagcacgagatatcactaccattcccacttcacacgtggaggaaatccaacgcgagaacgctcggatttccccttctttacttgcaacaactccgtaacccgcaaatcggctacggacaactgcgatgtccactatgttagttctcgtagcgtggattctctctcctcaagatgccatctggggggctagaggccactaataattgccctcacgatcgaagaaactcgatcctaatcctcgacggcacttcaggaacaaagctgctctcccatcgtccctaacctcactaccgtaaaggtcgcagcagagcccctgctccaaccgctagcgccatcttggccgctacgtgtgacgccacacgtagcagagagcgcagccgattggctgggagacggcagcccaggagaggcgcgcgaagccagagacaggagggtatgcaggagaaaccaagggaactacaatcccggccttccttgcgcgtacgacagcaaacctggagcgaaagaggttggagtttggattcggaccacaactcccagcaccctccgcgatgtctgtccttttctttcataacgcggaggaaaagaaggacaagatgaatggaggccttttggtgtttgttctccgaaaggcgggaaaagcgaactacacctcccgactggccgcgcgcggctgcgcctgcgccctgttacctgtcgccatcttgccccttcagaggcaccgcaaacaaacccaattcctggtgtcccctagtcttggcggaggagccttttagatgagccccgaaaggccgggcaggtgggtgactctcaggcagggtcctgggaagagctggcaggccagccaggctagaggagcgccgggccaagcattcggagcccggcttggggctcc

SEQ ID NO: 7947 - DNA, 2300 bp, Homo sapien
aatcctttctcaccaccacactttccaacttttgagaaatcaagaattaagtcatttgaactatcacagtggaaagaacacaggctttagagccagacacctctaggtttctagtcccaacttttcaacttactggttaagcctaagctttacacatctataaaacagaggtaataccacccagtttgttacgcgtattaaagaacactatatataaagttctttcatagtggctggcatttcatttaataaacaggtggtactaccaacctggggcaagttgactcctgtcagcttcctcatttatgaattacatgagataaaatttgtaaagctcctagcaagttaaagaaacttaataaataactcctcgtgctcgcttcagcaacacatatactaaaattggaacgatacatacatatatatatatacacatatatatatacatatatatatacacacacacacatatatatatactctctcaagtcttaatggaatatgaattttgatcctgtagttattaaacagccatttaccaacagttgagctgccaggaacttacttagaactgggaatttcctagtgtaaaagacaaaaagacacggctctgggggcacgcgcaatacctgcttagcacagagtagagccgctctaagtatttgttaaatgggtaagtgaatggttgacgcgactgagcaaaacgaatggatgaatgaatgaatgaacgagctcactgtctagcctagaagtcagacaccgaaccgaaataactgctatatcccgttccaggcgctggggctgctaactccaactctgtgtcccgaggtgagcccccctccccctacttcccatagtcctctcagctcagaacaaacccaaggcaagaagaactggactgcgcgccccagccggcagtatgacataaagaaaaggggtggggaggaggaagaaggggcagagccaaaggaatcctctccctccacaagccagtccccgcctcccgacaggatcttggaggcggccggcgactgctcgaaccgagcaccacgtcacggcatcccggcgcgtcctagccaggggaccccagagcggggccgcaacgcatcggaaacccgggcagtagtttccggagcccgctcggggaaccaggatcttgtaggatccttccccactcaagtgtcaaggagacaagcccgccccgccccctctccaaacacgcactccctagcagcaccacaacaagagcagccagcccaggctcctcacccggacctctcggcgccggtcccaatgtcaagtccacgacccaagcccctctgggccagtagctgttgtcaggggtcccggccggcacccgcgcctcactccctccccagcggagaggacaaccgagagagagtaagccagcggatacccagccagacgacctggactcaccgggagtctcccagagctaaacccccagagtcccagcaccaggccagccagagtccccctgagtccaccccggggagccccacgatcccgttaggaaacaacggaggatggggctgggagccccaagccgggctccgaatgcttggcccggcgctcctctagcctggctggcctgccagctcttcccaggaccctgcctgagagtcacccacctgcccggcctttcggggctcatctaaaaggctcctccgccaagactaggggacaccaggaattgggtttgtttgcggtgcctctgaaggggcaagatggcgacaggtaacagggcgcaggcgcagccgcgcgcggccagtcgggaggtgtagttcgcttttcccgcctttcggagaacaaacaccaaaaggcctccattcatcttgtccttcttttcctccgcgttatgaaagaaaaggacagacatcgcggagggtgctgggagttgtggtccgaatccaaactccaacctctttcgctccaggtttgctgtcgtacgcgcaaggaaggccgggattgtagttcccttggtttctcctgcataccctcctgtctctggcttcgcgcgcctctcctgggctgccgtctcccagccaatcggctgcgctctctgctacgtgtggcgtcacacgtagcggccaagatggcgctagcggttggagcaggggctctgctgcgacctttacggtagtgaggttagggacgatgggagagcagctttgttcctgaagtgccgtcgaggattaggatcgagtttcttcgatcgtgagggcaattattagtggcctctagccccccagatggcatcttgaggagagagaatccac

SEQ ID NO: 7948 - DNA, 2300 bp, Homo sapien
aaaaattagttgaaatactagttttcattagtgatagcagatttaagttaatgaaaccaaggccgatatttatttagaaggcataggaagatttcttgtagtttcagttatgttcatgataagattcagattatagaataaactgtgtaagaacctaagtgtgtgacattccttgaattataattattcataattttgatcttgcttgcttaaaataaagcctctcctattcactcagggcactttttataatttaaaaagttatatatgtttgagcatatatgtttgatttgtttttagtgattgaaaacccttgtagcagcgctttcttttttgtttagtatgtctggacctaatagctcttcagaatggtccattgaaggtcgtcgattggtaccactgatgccccggctcgttccccaaaccgcctttactgtaacagctaatgctgttgctaatgcagctatccagcataatgcatctcttccagtgcctgcagaaacaggaagcaaggaaggtgagtagaaaaatatgcctgtgttagagattacttttcttagaatcttcaagaaaatttcaagaaaagttgtcttatttttcatctacttttattctagtgtttaaaggttatgaaacatagtaggaaactctaattctgaaattagactgccaggtttttagccttagacaaaatttagtctcccttttgtcgaaggtgtgaattatgttaatcatcaaaattgcaaaaacctcggaatagatttttgatatcagtgtgtcttgttaaaaatgaatagaaggccttaatggatgacattagaaaataaataaggtaacagaagtcatttagctactaaaaaatgattctgaactgatagctttagaaaataaagctgttttcattttctggaatcagtgatatatgctacttctttgttctggttaatgaatgtgctgaatccattccctggcagaagggttttatcattatttatctagtaattgacacatgctttaaaaatcctccaatgctctagaggccaccaagagtaatattaaatttgagagagcatatttggattgactcaagtagtttagtttgatgttgcatgacaatgaccctaaaaacaatgcatttgtcaggttactctggggaattgtctttgcttacctagcaatggccatggaacagagtaagacactttttttatgcatgacaggctctgttttagggtgagaaaaggtatatttggaggaagacagtgtataaacttggcctccatcgagttcttccatctactgacgctcaggtagagtggaaagaatacagagtttccactagtcaaatccatgtttgaatcttaatttgtcatttcctagctgtatgacctccagcaagtttgagcttctgtgagccttgggttcctcatctttaaaatgagaatgtgatgttgtgagaattagtgaagatgtatggaaaggatttagtgtgtggtactcaataaatggtgcctataacctattcttactgttgtttagctgtatcccttcgttgaatgataggttgaaatatgatgttgtcattattttagttgagttgttgtgctgcttggatggcaatgactagcgagttgatttatagaaaagaacgtttccttgattgttccctagtggccacattggaaattgctaaggttagggaaaaattatccacccatatcattggtgctgctattagtattaaaagggaatacaagtaagtgcctgttgtcccactcctgccatgagtgaaaattattttcattttttctcagtataattttaaactttatttctttgtaactgtgtttttctccgtcagcaatgtcacctgtagacaagctgttaaatacttgggaaaaatctatttaagtgataattttcaggaaaggttattaatgccttttaatctgtggacctaatacctagtactggcctctgacttctgatcacatgaaaatgttaaaattggcctgcaataaaaataatttttttgtatgcctggacagttttggtgaaagttaacagcaaacttttttatcgttccttcagtagtggtttgctattcctacacaagtaccacgtcaaccccaacctctacccctgttccaagtggcagcatagcaacggttaagtctccaagacctgccagtcctgcctccaatgtagttgtcttgccaagtggaagtactgtttatgtcaaaagtaagtgatattctcagtgttatcagggccttcttggctaaatgctgcagtctagg

SEQ ID NO: 7949 - DNA, 2300 bp, Homo sapien
acttcactagaacatggattgctatacttcacttaaatagatctcataaaagcttcattggtaggggtccagcattagattttttcaatgtgtgggaaaacagattgctcctagcctgaatttacatagtaagccaaaagtaaagccaggattagaattcagattttcagaaccctttgtaatatggtttgcaatttcaaagaacttgatatgtaagaggggatgctttgtattctaggccctgtggtcacaaagatccaagagtcatgtatgattcatagctgttagatatctctgataacaaccgtttgacacaggcagctctagtaaaacaagcaaatcaacgtataagaccgttttctgggctgggtgtggaggcttatgcctgtaatcccagcaatttgggaaggcaaggcaggtggatcacttgagcccaagagtttgagaccagcctgagcaacatggtgaaactccgtatctacaaaattacaaaaattagcgtgaaggtgtgcacctatagtcccagctacttgggaggctgaggtggaggatcacttgagcctgggaggcagaggttgcagtgagctgagatcttgccactgtactccagcctgggtgacagagcaagactctgccactgccacccccgccaaagaccacataggcacaatcacctctactcaccacttgctcacctatgcatgcccacaacacacatcagaagagcttttttgaaaaacaggctgctagttggttttgtttggcttgaatgggtcatacttggccagggtccattgagctatttaatagataggtgtggtcacttgcaaactagtggctcttggcaaatgaactagagctctttccagagatggtgctgggaagagtatgcatgtgttgaaataagtaataacaccattggcagatgcttcatgtttcccttaagtaattacagcagatagttaaaattgtgatttttgtaattatatttagctctgaattcacaatgattgctttttagccagctcacgtgggtgctttgtttttactggctgctaagtttagataggcacacgtttagatgatgctggctaaaaattaagaaaaactgatgaggtgaaaattctcaaatcttttcatttccatcttaagtttatggattttaattttaaaaattttaataatttagtaaagtcactgtatttgaacttaatttagttaagttcatgtaaaaagatgttgatttcatgagtgaccagaaaatggtacttaagaataaagtagatgaaagtatagaaaatgatgaaaagttaatggatataagctatctagttaatagactaaaaggatattagtaatatatgaatagtaaaacataggaagcactctgagttttcccttcctttttttctatatgtaaccttatatattattaacaatatataacattctttcctcatggcatatgttcatcaaatttttcctatatataaccttagaaagaatgttaatacctctgctgattttgcttgcccatactttttcatgtagacattctactatatatccttataatttcatatatgtagaacttaggggatgtattttatgtgtgtgcatttagctactggtatattgcacagtaattttctaattacacaaatacttatttcagataaattagaaaataaatatgtatgtgggggttaagacttataatcccaattcttagagacaagcattagcagtgtactataccttcttccagaattttctgactattataatatatgtattccattaatgggatagtgtaataagtatttttgcatgtggtaattttttaaaattcgctcatcagagaataattaattccttctttgggtagaaagttggtcagatgactttctatatcatttcaaccaagtctacgatttttgatttcctggaaacattatactttgttacataatctacagcccttttttcatcatcctggtaaaaccttactgatttttcagtgagaggactttatcatttatatgcatataaatctcttatataatcattgacttcaatttagggagaaaagactattcagacagtgccaacaggagcaaagccagctatccttactgctacaagacccatcaccaaaatgattgtaacgcagccaaaaggaataggttctacagttcaaccagcagctaaaatcatcccaacaaaaattgtttatgggcagcaagggaaaacgcaggtatgctataagatatgatgatttttcttggctcttaaatatt

SEQ ID NO: 7950 - DNA, 2300 bp, Homo sapien
ccatttcacttcttaataaaaaaatgcttaatgtaataattatgaagattaatatgggtggtagaagtgttccatataatttgataatttcatctgaaatgtattttttattttcacatgtcattcatttctgatgctttcatttaaaaaatattaatttgcttaattttaatattattataatttgttttttctactcagtcatattgtaaattacttcagtcattgttgttttagtgtaaaccttgactatctttttttcgattatgttgagcacatatggaagattttattaactcacgtaatttaacatgtgcatacaaagcatactgtgaaatattgtaagatactacagaacatttataaaagaatactggtgatgctgcctataatctcaaatcacatgtagatatatgtatagcaacaatagaaacactgcatttgtgaatatagatagaatgtgtcataaaaaataaagcctatttatatttcactggatagttttaaagctagtccttataatacataaatggcatttttacattgatttccatagtgatcatcttactcttgaacaccccactatgacttttctaaacaggaagtcagtgctatttgaaattatagatcagggtatatgaacattagaatcatgggttattgagaaagtttcaataatcccaaaagccttagctaatttacagatatattgtatttttatctgtttctaattcaaagggttagtttcccagtaatcatatgcatttttaaagctctgtggactgtgtaaaaagttgaagttgaggccaagtgtggtggctcatgcctgtaatcccagcactttgggaggccgaggtgggtggatcacttgaggtcaggatttcaagaccagcttggccatcatggcaaaaccctgactctactaaaaaatgcaaaaattagcctggcgtggtggtgcacacatgtaatcccagctattcaggaggctgaggcatgagagtaacttgaacctgggagtcggaagttgcagtgaacagagattgtgccattgcactccagcctgggtaacagagcaagactgagtctccaaaataaataaacaaatgaataaaaagttgaagctggtaaaatttgatagattggttacttcatgggacctttgtagcaatagaataagaagcagggatgtttcctatactgcaatcttacccatttgtgccaggtgagctaaatttgagatgatagaacagatttttctattattttgttaactctttatatttgtttagtactttatagtttaaggacaatttttcagtctgttacttcatttggtcctcttctaggtagaaacagcaagcctttattatcccattaaaataaaatcaatcaaacaaaacaaaacctcttaagttttagaggctaatagaggatgagtgacctcttcaaattcacttggctgtttgatggtagaacaggacaggatccaagcgtgattcttgattcagtttattttctgcattatcacccagacctttagatttttaggaactgtaaggttgtgagacagaatcacttaatacaaaggagtgaatgctactaatgtttttattgcatgtcgaactgagaccaagagattaaagaatgtgtattgccttactttccttaaagatattattttgggattacagaaattgattactgctttgttaccttaatgggatgaaagtcattggagaaagtgagtacagctcatgggaggatgcaactttaaggggtttgttcctcctttgtgataagagttttcacagtgcttccgtatacatttctcatctcatccttataatagctctgttattcccattttgcagatgaggaaacagtctcagagaagataagagactttcttagagtcacacagctcatagatgggcagactgtggtcttctgcctcctagttcacaatactacactttctttctgtgatacaagctcacagacatttgtttaaaatgactactggttacagatgctgtggtgatttctggagaaatatcatcacctcctctattttcagtcagccatcgctcccagccccaacagccttcccagccccagcggaccctgctccagcatgtggctcagtcacagaccgcaacacagacttcggtggtggtgaagtccatcccagcatcttcccctggagcaatcacccacattatgcagcaggttgtatctcttctttttcttcctatcttctgcaactgcccatgcttgaaataagattcagtgtcatcttg

SEQ ID NO: 7951 - DNA, 2300 bp, Homo sapien
gaaataacatttggcttgtttagctgtttgctgctgggtttgtagtttgtttttcgttttttgtttttttttttttttgcttttataatgaatcctcatagtaacattatgactaaggaggaaaataaatatttgatttttttaactatacatggtcaattacagaggaagagatgcaacagaaagttgagaatataaatctaatgtaaaacaggacatctggtattaagggtaatggggaaaaggaaaaatatgttaataggttgattttgtgtcggatactgtgctttgagctttaagtaaattgtttgattcatactatgatcttgcaaggtgggtgtgttatccctcttttacaagtgaggaaacttttatgctcacttcagtaagaaagtaagaaacttgctccaggtggcagagccaggatttaaacccaaagtgaactgcctctgttaaatagttatatcatggatatcagattaaagcatgacttatcattagtagtcacataagtcaccatcactcacatgatgatgaatctaactgtaggcaaactactggaaagaaaggcaacggagaatgttgaattgaaagcctgtatgtgcaaagtcattatggtatagggaagagtcacaattgaatctcaaaattttatagtttaggatttaagtgtagcatatgataaggcagtagggaggatggggatagggtggatcttgctgtgtcattgagggaagccaactggctggaggttttgttgggcggcaggtctcagcctggagtccggccctcagctggcagctcctgacattgacctttctccggacacctagaaaggtctgacaggctggccctaaccgtgtcactcaagatgatgcctcctcacaacacttatcactgacactgggcactttgcctttctactgacaggaatgctgttgtcccctcctcagtctccttccgtcctgggagccagggctctgggatctgagcaaaggggcgaggaatgctagtcgagaggtgcttcatgcagaccttggtgaagcctgaagaatgatcttcatccatgcagggggctctctgtggggactggtacaggcacaggtctcagacaatctccctgaccttccagatagcactggacctacacatagccatggtgggcttctctgaaccttggcttttctcgggacctcatggcttggttaccgcttttagagaggttaacatcatgaataggccagacggctgtttcctgagccagggagcctttctcttctttttccgtgtttggttgtgcttgcagggccatcttattcttctaatctgtaagttctggaccctctaagacttttcttatagtagtaagtagaccagttttcgaagcacttacgtctgagagttgaaattgcaagttgcagtagaaagctccttgaggtttcttggcctttctaggttcttctgaaaatttttgagtgaatctcgtaagtctttttcagttaagaggaaaatgtagcaatgtagatgtttttcttatttcattcttactttgtgccttttttacttaggcattaagcagtcacactgcttttaccaaacacagcgaggaacttggaactgaggagggcgaggttgaagagatggacactttagaccctcagacaggtctgttttaccgatctgccctgactcagtcacagtcagctaaacagcagaaacttagccagcccccgctggaacagactcagctgcaagtgaaaactctgcagtgcttccagactaaacagaagcagaccatccacctgcaggcagaccagctccagcacaaactcccgcaaatgccccagctttccatcaggcatcaaaaactcacccctctccagcaagaacaagcacagcccaagccagatgtacagcacacacagcatcccatggtggccaaagacaggcagcttcctaccttaatggcacagcccccgcaaactgtagtacaggtgcttgcagtgaaaaccacgcagcagctccctaaactgcagcaggctccgaaccaaccaaaaatctacgtgcaaccccaaaccccccagagccaaatgtcgctcccagcttcttcagagaaacagacggcaagccaggtaacggaatattgatagcatgcaaagttaaacttctctgttcacggaaaaaaaaatgagaacatcacgaccctatcatgatatcagtgctttctcctggcaagaggaaacccaaaagcctcattacgctggtattactttgccccatcagaaggttgacattaggga

SEQ ID NO: 7952 - DNA, 2300 bp, Homo sapien
catttttaggaatttgacctagagcctcccacagaccccaccaaccaggcctcctcccaccttccagctgcatgggccgggccagatccaccgcatctccccagcccaaccctcagcccagggcctgacacacaggtgggtccaggctcttgctcattaactgctgagtaaactaaggagatgtggagcctgtgttgaacctgagcaccctgggtaattggaggggcccacaggaggtggattagcaggggtggccctggtcagccccaacacagtgaggtaaccgggtggaaaaacccctcacctttgctcttgttgtaaaagtcaactcgggtcataatttccactgtgcccccaacagggagggcatctggttcaccctcccacgcacccagggtttgggggttttcaggtgaagtggaactaggtgtttgtgtttctgcacctttgcaggatcgctcagcaacaaaggagccagaaaaggcaaggtgtacacaccgtgtgcagcatgggcgagctgcaggcatgcaggtaagagtgtgtgcatgcaggtgtgtgcacacgagtttgcatgtgctgatgcagatggctatgatgcgtggtggtgatatatacatgtggatgcttatggatctgtgccaaccattattaagcacatatgtatacccgtgtgtgtatatgcatgcatgtgtttgtgtgagttgcaatgtgtatacaactttacacaataagtgaattgagtacatgtacctgtttatccacggaagtgtatgatgactggacatatgtaaatatgtgtatttgcatgtgtttatactttgtgcatagatgcatgtttgtgtatttatgctgatccatttaagcgtatgggatgtgtgtggatgtttgtgtaacatctgtacatactccataggtgcatcttaatacaggaatatgggtgcgatgtgtatgtgtgtgtgtgtgcctgtgtgaacaggtgcggctggaggtctatgagtgtgtggataggtatatttgcctgtgcgcatgtgcgattcacgtggtgtgagtgcacatggtcgcaggcaaatgtctgtgtgggcacacacatgccctgttgcccttttctgtcttttcctgttgggaaattacagaacttctgagtcctaaccatggctggtggctcttccaggaacatggtttcctggacccaaaaggtaagcttgtcagggacccacgtgaatgaggaagtgggtgggcctgagtctggggctcctctgagaactgctgtggaccagggaaatcttgctgccacctctggtctttagtccacctctcagtagtagctttcaaagcttgatttttttggaggcgtctccacggagcatagtcctaagctcctagcctacattgtccctgttcctgggcctgtttggttgacattctcttacagtttaaaaaagacatccacatccgtactcttagctaatccttgtgacctttcttctagtctgtttggagaggctgggagcagagtggttaaaagagccaggcctggttccatttctgacccctcttctagctgagcaacttccgcctcttccagcctccctcacgggaatcacagatcacgtgagatgacacccatgaagggcttgactggcatctggcacatggtgaggactgcaaaaatgtgggctattgtttttactattatccccattttatagatgaggaaactgaggcttggagaggctctctgcctttgtcaacctggagatgctgggaaggaagtgaggcccatcccacctcagatgcctgtcctctgtcgtcaggagcattctcttgttcttccgggcttggccaagcggtggtaaaccccacatgtggttctgtggttgcccacacagtcctaaaaatagccaacaggaacccaggggctcccccttggtgagtggcagcaggcccagtcctcaggcagccaccaacctgctcactccccacaggcaagcaggtcctgtctaggaaggggctgggtggcctgggtcccatgcatgatgagccagaggctgtgccaagcttatagcaaatattattttatttcattatgttttcttacatctgtgatgtggaggccatagctccactggactcatgaggagactgaggctcagagcaatgaagtgacctgctcaaagttaaggagcttcagtttggacccaatttgttctgatcctaaggtcactatccttaatccctctccctgtggggtcttccctatcttgagcctgtggacagctgtgcagtggcaagaaaaaggc

SEQ ID NO: 7953 - DNA, 2300 bp, Homo sapien
acactctctgagggcttgtctcaactccacaagcttctgagtcctggaagacaggggccattcactcagaaaaccttttctgagctggctttagtctgtgttggctcacaggccctggggacagataggactccaggtaggacctccccccaggacctcctggcctggtgggtgggtcaggcagacacccaatgctgagggcagcccagacctgtgggcagctggaggagagaaatccagacagtctccccagagaaggtgatggaggtgatacaggcgagggtggtgaaggagattgtgcaggtgggtgggggggtgagctggttccggcagaggaggcgggagaggtgcaggaggcagtgctgcctaatggttaagactgctggctccagagtgggacagcctgggttcaagtctcatcgctggagctcagttctctaaaatgaggatggtaacagtagaaatctcttcaacggctgtcagaattaaacatgacaatccacatccagtgctcagcatgggcccgcccggaagtgctcaacaatggccatctctgagcatgttgtgagaggtggcgggagagagatgggcctcatgggctcagtgaactgcctgaaggacaggggcacagaacacagacggtgggtcccagatcctggaggatgtggccagcctgtgggtctgagagggtgagttgctggcgcgtcccgggacccgttcctggtggagtgccacgccagcgcatggaaccccaggagttgggccctgcacctcaggctgactgtgacctgggagtggcagggcctcccctctccctgcaagctaagagctcgggaagctggatgttctgatgacctagttggctgctgtgtccacgtttggctgaaaacaggaatttctgcctcaccgggggtcttggccaggtgagcaaactccctgtttgtcaggaaaaggggtcaggggcctgctgggctccctgctggagcagaggcccgcagaccctaggcgagctcagcccaagctcctgctttccccttaggccttcacggagcacctatcgtgtgccagggggtggggctctctcctttctcccccagccctaccccatgaaataggtgtttagaatttccctttgcagactgggagccaggagcaggaatggggaggtgagagggcacggaccagagaaacggaagaatctccaggaggcagagctgccaacgctgggcccaggggctgcagggccaaggggaggggtccaggctgactcggggtgggcaggagaagcatcactgagcaggagcttgggggagaggcagtcagggaagggaagggcaaaggcgcagtgccaggctgctgacagggcgaaatggaaggtgtgagggccagaggaataagcaccccctgctctgcatgctctgccctggcctgtcacgcctctcagtgctcccctacccaggtgaggctgcttctgtcccacacccgacactcaccctccaactccaagccaggaaccaggtgtggttttcttccaagttcaaccttgatctgcagcctggctgatcactgaattctccagtccctggggacctttagccctctacctgggaaggcctctgggtagcagaattggactttcaggagaggtggggctggagacagagatgtgggccatcagagcaatggggtgtttacagcaatgaggccatagtgttcccaagggaaaagggcttaggatggagccctggccatcaccacttaaagctggctcaaggaagatgagcaaagagtggcctgaaaaggagtggcctgggagggaggagatggcttcctgtgtgggatcacagctgtggggagagcatgcccagcaggggtatgggtggggggcctgctgcacagggcctagggagaggaggtctgaaaagcgtgctgagtttggcaaaggatacccttgacgctgttagcaagggcagcatggagctgggaggggctgaaggcagctccaggcgggttgagaacgggaggggcgggaagggaagtgactttaccaagaacctggcctgtgaagagtgggaggacgaaggggaaagtggctgaggggcttctcactatttttaagacggacaagacttgagtccagctgaagtctgagaggaagacgtaaacagggagaggctggaggcagaagagagcatgacggggtaagggagagaggacggggctggggaccccaaggaggaggggcagtgcagcctctgagatagggcacagagggctgagcacagagaaggggagggggc

SEQ ID NO: 7954 - DNA, 2300 bp, Homo sapien
ggaatcccgcttctgagcccagccttaccctgatttgccacaaggccctgggtggtcactttcatgcatgtaaaatggggcaccctgccccactctcagggctggtgacgatcagggaagagaaacactgtggaagaggccccttctacacttggaaccaggacctggaggacagccagggcccctctcttctagggacccgcatactagagtccacaggcagcaaggcagggtacctgtgatttggtagggtcaaggcatctagaagagaggtggctttgggaaagatctgcttcaacctccaatctaaatgacaataccgccaccccatatttgcacagtactttaaaaattcgggcaagataatgcccaaactgaatcagacttagctttatgaacagattgggctcaaatcactgattcttattagctgtgttgactttggacacgccatttaaccttttctgagcctcaggttccccagctataaatagggaccttactagtctcagacaattggttttcatgtgtacacactgcccccacccctagcctcagcttctccatccgaaaacaggactttgatggtgccgtttcacaggctgttgaagggtcccgcagatgatggaggagtacgggtccagacactagagcacaatccggagaggaaaagtgacctgccaggacccaccagagtggacggcttggtgcggggaaccccctccgcggccgccccagggccagcgaagggtcatttccttccgcattcagccccgccgtcacctcgcctgtttgcccccgcgttaagtgcggcggcgccagcagctgggaaatcggggccaggccggatttcctctgtggacctgcggctcctagagccaccgcgcccccctccggaccccgcggggccgcgaactgcacgtgcggcggccgctgggatgggcctcgctcccacggcgcttcctctgcaacccctctccctcccgccctctcatccccccacactgggcccccgccccttcccggccgaggtcccagggtggtgaagatgcttcgccgccccaccccactccgcccccgccggctccggataaaccgaggcacggggccaggcgctaggaccccacggcctcgccagaggggggcgtggcggggcgggccggcgggagaggtatttaaattgcagccggagcgcgggggctccggtggggcagctgagcggcctgctcctcctcgggccgtgaccccggggtctggcgcggggtgggacccgggggcgggtttgcgcaaaatgtgccgagactgcccgggagaggagctgcggccgcgctgagccaggtaggagccgccgggcaggcgaggctggccggccctcggggggcgcactgtcgcgcgcctctagcgagcgcaaggcgggggctggtcccaagggacgccccccaaacactcccctcccgccatccccactgcgcgcgtggagccggggctgaccctccctcggtccctgggagttccccagcgctcctgtcttggcggatctttcccgcaaaggggtgaggccggccttcccatttgacagctgggaaaacaatggcctgaagaccgtgacttgcccaggaacacacagctaggcaagggcaaaccggaatttgaattcaggtttcctgcaacgctccgatcccagccaggcgtggggctgcccatcccacagcactagatggcctgcccatttctcgtagtggggtagggggcacccaccgctctccaaggggctctgaacccagccttcttcatgggtggtaagatgtgaggggcccccacccccacgccgagctgcctgaaattccgccatcacagccacattcctttgggttaaggtctaattcccccgtgggatgcacatgtctccagaacgaggcttgcccttagtgattcactgcttgacaggaacgtccgcagcagctctcccaggaccccactctgccagtaagtcagctgaggccgagaggagggagagaggacctcagaggccagactgtgagctagtctgccctgctcctgcgtgtgaggggtcgttggcagggcttagggaaggagaccttgatttggtatagtgggaacatttgctttggagacagatgaactggattctgatcgtgaccctgctattttctccttgtgtgactttgggtaagtcacttctctgagcctccttttcttcatgggcaaaaaaaagacagttctattgggggcagtcggctcagcatgtgctggagaaaacacagtattcaggtcatgta

SEQ ID NO: 7955 - DNA, 2300 bp, Homo sapien
gcctcaaatgtgggggagccccatccgggcactgagtaaggtggaaccccacgagctgactaaccacaaccacagcctctgggggcgggggagtgggaggtggggcactcacccccagcccaccatagccccagccccgccctcctgggccctagcagaagctctgccatggcccagtgatttctgcttggtagcagctccgggaagggtgaggcagtgctcagcgagcctgggtctggatggctgggagctggtctgatacacaaggccaggaactgcccgaatgatccagtcactctgctcatactgcagggcagcttcaaagcactttcctgaacatttggccccttggacagggacctggaaaaggaagcccacaggatataggagtatccaccaactgccacaataaaggcagtgagaagttgcctaacaaccactgggtgcaggctccagctggatccattgcacttagttctagcaccaactccaagtagtagctactatctttcccactttacagataggggcactgaggttccatttgaccaaatggagcactagagaccagagagggggctggatggaccagctaggaccctgtggacatagatctgaggccttgggtggctgggagggaagggaaagaggtttggatacccttcgcaggccctgctgagagattccttacctgcacctcctgcccatcccctcactgcagctcaggcctcctccttagggaagccttccctgatttcctcttctaagactaggtcaggcccctatggcacctgctatcatggcttgtcctctctgggttgaccccatctccccagatccatctccacagtggactgaacaggggtaagaaaaggcagtaactgtagagacttcagggaatcccgcttctgagcccagccttaccctgatttgccacaaggccctgggtggtcactttcatgcatgtaaaatggggcaccctgccccactctcagggctggtgacgatcagggaagagaaacactgtggaagaggccccttctacacttggaaccaggacctggaggacagccagggcccctctcttctagggacccgcatactagagtccacaggcagcaaggcagggtacctgtgatttggtagggtcaaggcatctagaagagaggtggctttgggaaagatctgcttcaacctccaatctaaatgacaataccgccaccccatatttgcacagtactttaaaaattcgggcaagataatgcccaaactgaatcagacttagctttatgaacagattgggctcaaatcactgattcttattagctgtgttgactttggacacgccatttaaccttttctgagcctcaggttccccagctataaatagggaccttactagtctcagacaattggttttcatgtgtacacactgcccccacccctagcctcagcttctccatccgaaaacaggactttgatggtgccgtttcacaggctgttgaagggtcccgcagatgatggaggagtacgggtccagacactagagcacaatccggagaggaaaagtgacctgccaggacccaccagagtggacggcttggtgcggggaaccccctccgcggccgccccagggccagcgaagggtcatttccttccgcattcagccccgccgtcacctcgcctgtttgcccccgcgttaagtgcggcggcgccagcagctgggaaatcggggccaggccggatttcctctgtggacctgcggctcctagagccaccgcgcccccctccggaccccgcggggccgcgaactgcacgtgcggcggccgctgggatgggcctcgctcccacggcgcttcctctgcaacccctctccctcccgccctctcatccccccacactgggcccccgccccttcccggccgaggtcccagggtggtgaagatgcttcgccgccccaccccactccgcccccgccggctccggataaaccgaggcacggggccaggcgctaggaccccacggcctcgccagaggggggcgtggcggggcgggccggcgggagaggtatttaaattgcagccggagcgcgggggctccggtggggcagctgagcggcctgctcctcctcgggccgtgaccccggggtctggcgcggggtgggacccgggggcgggtttgcgcaaaatgtgccgagactgcccgggagaggagctgcggccgcgctgagccaggtaggagccgccgggcaggcgaggctggccggccctcggggggcgcactgtcgcgcgcctctagcg

SEQ ID NO: 7956 - DNA, 2300 bp, Homo sapien
aagagactatgtctttgttctggtatgtccagcaagagctcatggcctgggacagggttaagtgtcaataaggcataaaaatgaaaccatatgcagtcacacactcaacaaaccatttccttgaaaagaacagaatgatgtgtagggagtacacacttttgttatatagattccggttaatgcaatgttttaatatttagaatcaggatgtccctgggaaacctgggcagtctggttgccgtgggctttcttgtcacaagggaacccagtgataggctaattcatactatagcatgaagagctaaatatacctgcatttcacaggaagagccccgaaaaggcaatgttttccatagtggaatggtgtatacatatggtggcatttcaggcatagtggcttcttagagagcactttccttcttaggatggatgccgtctatatgcacttgagtggttctctagaattcagatgagcagtgggtgctctcccagaaggagggccctgtaaggaattaagttgtattttatttaacaagaagcgtaataggcagaaaatgaccttggatttcctgaatgtggccttccttacaacgttgctgcagggcaggcccccacagtcctaggagagtgaggggtcactggaggaacaggggtgggtcagggttctcgagaaagcagaccccagaagcaacctgcatcttggactctggggttgcctgggaatgaaaaacgagaatggggtccccctaatagctgcaacaccatatgcttaggctgtcagggtacaaggggttggtaaggggtgaggttgctgctggaggatttgtattcttctcagctcgtgggaaacacagccaccctttgaacggggtgggcagggaagcatggagaaaagccatgcctgggtggggacagcagtgtgggcagggaatgggagtgtaattagagtgtaattaaagtattttgtgggctgaaaaggaaaagctgccaggcccctgagccaacccagaggagaagagggaacagaagtcttatcattgagagaatggtggcgccagcctccacccagccaggaccacccacggccaggggccacgcaggcagagctgccaggcaaagagaccaggtgcacccttatctgagcttggcatggaggtagtgggatgatccctcaggggaccacgatggcctggcagagggccctgctgcagctggcaggaccaagtttccatgcggtgctgctggtggctgggaggagtgatggccgcaagggttccttggacacaggtgctggctcactggctgggaaggttgaactaagtccctttcccactgtgtgggggacaattcagggggtctctccccaagagagataagattggagatctgagcaaattttaattttaatttagaaaaaaaaaataaagcacaatggccctaaagaattaagtcagctacatttgaccacatatcaattaagaactttttttgtaataagagacagaatagtgttaagacgtaaatgacaaatcaagagaaatatttgccccgtgtataagaagagatcaatgtctgggcaatagaaacagctcctgtaaatcaataagaaaagacagacaaaatagaaaactgggcaaagtgtttgaataggaaagtcgaaaaggaaataaaaaggatgtatacatgcaaagatgccctccttactggtcatcagggaaatggaagtttaaaaggaacatgagcagggcgtggtggctcatgcctgtaatcccagcattttggaaggccaaggtgggaggattgcttgagcccaagagtttgagatcagcctgagcaacatagggagacttcatctctatcaaacaaataaatagataaataaataaatgaataaataaaaggaacataaatcagaaattcgtttttgcctataacattgacacattttgaaaaatattgatgatagtaaatgttgataagagttgctggccatgtaaattggcgtagcctttttggaggccatctgatagactctattacaagtttgtccaccctgtggcccacgggccgcatgtggcccaggacggctttgaatgaagcccaacacaaattcataaactttcttaaaacatttttgtgaatttttttttacctcatcagttatcgtattagtgtattttttttttttttttttttgaggcagagtcttgctctgtcgccaaggcttgagtgcagtggcgggatctcggctcacggctcactgcaacctctgcctcccaggttcaagcaattctcctgcc

SEQ ID NO: 7957 - DNA, 2300 bp, Homo sapien
tgggagttagcttccctgagttcccgggcagttgggtattttcatctccagttctcagatgctgaacttgagactcgctaaacaattccacatggaggagaggatggaaatcgttagtctagggcaaggggaggggggcgccattccttcaaaagaatgtccctatgggaggggaggaagcaggaggaatataagctagacaagccagggagtccagaggtcattcccgggcaccctcccctcccaagcctgctgggctttccagtctctaccccagtccctgacggaagacatttagcaaccacacaaaggagcttcctgtgagccagactaatgctttacctaaattaccttgtttattcctcacaatagcctcttctacagttgcagacactgagtctcagagaggttaggtaacttgcctaaagttacccagagctggtaagtggcagggctggaacctgaatcctgaccaagcttggccctcacccgatgctgattgcaggtctctctcccatctaggccaggagcctttagagaggggagggaatgggagggtgggaaatgggaggggcccgactcctctctatgggtcccaggggttgtggagttgaatccctgcagcccttttaagcccaacagtgaggaagacactggataccaaagggcccatggtgccatcccaaagactgataaggagtgtgagctggatgatcacagaaggactcctagttctgaaagctgggattctaatcaggagaggacaatgaatggagaggagagacgggagttctccctgcttccacacatatgagaccaggctcctagccttttctctgcacattcctaactggcagggtccacaggtgtcaacccaagtgcatccccaagaccacacaatggctctgagtgcagaaaggacctgcaagaccagtttgttttctgggcagcagatgattttgctggcctgaggcctggggcagtggtctccactcctacctcaccacctctctagtgtcttccttcttccccaagtagaccggcatgcatgcacacacaggcccaagcaactcctttttttttttttttttttaatgaataagaaaaagtaataaggaaagaagcagcaagcagactgggtgtgttaacaagtctgggccactgcaggaggtacattgcccaatttctgcaccccgaggccctccaaagtctaggagaagctcctgggaggtccagggcccaagaccaaagcctctatcaactctcccacctgtgaactgcccctctcccaaggtaggcattgtcggggtgtgtagactgggagccacccacacacctgactctcccctcctaggaaatgcgtccaccaggtcatttctcctgcaaaccctcattttaaagtgtcttggatgctttcctgccctttttttttttttttaacataaagaggggtgagagcccaagagctacagcagggggaatagactgaaactgctgcctactcacacgccagtttcccttcttagaactctaaccagaagccaatggtttcctcctaaaagaaaaactcaatctgttgactttctctctcctctcctgccagcttttctgcccgagccgggctctctcttctctgtgggttcgtctttcagccagtctttctctgcttcagattcttggtttcttgctcccggtagtccctgaacctctttcactctttaaaaaaaaatggggaggggcggtgaacaagcaaagaggaagccctcacccacccaccaaatctctttcttactagcaactaattccctctctctttccacacacacagtcatacacacacatacacatacacaggcacgtactccggcgacctccagatgttcccgacagtgcggccatctgcttagattgctggggcgcgcagggggagggggcagggatccgggatgcaggaagctgtgagcgaggccaactagagggggcgggagcagcgcacttttgagacgctccctagagtggaacccgggctcggctcaggctccgcgggcggggcgcgcgccgagagaggctggcactttggcgacactccctgagccgccccgcggccggcccgagccgccacccggcgcccggcaggggggagcctggctgcgggcggggaccggggggcgggccgcgccgcgcggagaaaagcgctggccggagggcccgcggccgggccgccggggtgagcgtgccgaggcggctgtggcgcaggcttccaggtgagtgcagttccccgggcggggcgagagtccgcg

SEQ ID NO: 7958 - DNA, 2300 bp, Homo sapien
tgttttataatctggtcaatcagtggatatcttgtatctgcaggtcaagatttggaaaaaaatgttgaatcttgactgaaagatccctttctccctcagccttctttggtggctaccagtcttcatttctctttttcctgggggtagagtacgggtcccagagggaggcagtgtgaatactgttacacagataagaaaaccaaggcccaaagaaaacagggaaggtcacacagatagtggcacacctgggactagagccccagtctcctgggtccaaagctggtgttagtgatcttgttataagttggtcttctgttctcattgctggtctgtaagccccatgaggacagggaccctagtatctatcccatcaccacccaccccccgccccccactccctcctggcctagcccagtgctttgtatatacttagtagaaatttaggatatgcttttgttaaactttaaaatcctgaaactctggagttggattatctaaactgaacctcttactgtgaagctggagaaactgaggcacagaagggggaagagacttgttcagagatgagatgaggacagtccatggcagagcaggcactgagacctagggctcctgaccatcctgcaggacttctcttgtcaccaggcacagttgccctgtcacctccctgtcagtgccccagagtgtggggagggaagtagtcggtgactgtgtctcagggggcttcatctaccattggctgcacatttgtcagcgtcctggtgctgtgctgggtgtttcacacgaacgatctctagcccttgcggcaactccttgaggaagggagtgttaactccattttaactccccatgacttctgatatggtttggctgtgccccacccaaatctgaacttgaattgtatctcccagaattcccatgtgttgtgggagggacccagtgggaggtaattgaatgcaggaagcttttgcttcctcctcattgtatcttgccactgccatgtaagaagtgcgttttgccctccgccatgattgtgagaccttccccggccacgtggaattgttaagttcaattaagccactttcttttatatgttgcccagtctcaggtttgtctttatcagcagcatgaaaaaggactaatacagtaaattggtaccagtagagtgggggcattgctgaaaagatacccaaaaacatggaagcaactttggacctgggtaacaagcagaggttggaacagtttggagggttcagaagaagacaggaaaatgtgggaaagtttggaacttcctagagacttattgaatggctttgcccaaaatcctgatggcaatatggacaataaagtacaggctgaggtggtctcagatggaaatgaggaacttgttgggaactggagcaaaggtgactgttgttatgttttagcaaagagatggcagcaatttgctcctgccctagagatttgtggaactttgaacttgagagcaatgatttagggtatctggcagaagaaatttctaagcaggaaagcattcaagaggtgacctgggtgctgttaaaggcattccgttttataagggaagcagagcatagaagtttggaaaatttgtagcttgacaatgcattagaaaagaaaagaaaatgccattttctgaggagacatttaagccggctgcagaaatttgcataacttgcagctgaatgttaactcccaagacaatggggaaaatgtctccagggcatgtcagagttcttcaaggcagcccttctcatcacaggcctggaggcgtaggaggaaaaaaatggtttctcaggccaggcccaggatctccatgctgtgtgcagcctagggacttggtgtcctgtgtcccagacactccagccatgactaaaaggggccaaggtacaactcagccatggcttcagagggtgcaagccccaagacttcgcaggttccagaaccaccatcattcactgaccttgggcaggtgacccaatctctctgagcatccacagaaggggataattgttcattttacaaaacccaaaccaaagctcaacaccacttggcagcttccatgtggtgttgagcctgtgggtacacagaagtcaagaattgaggtttgggaacctctgcctagatttcagaagatgtatggaaacacctggatgcccaggcaaaagtttgctgcaggggtgggaccctcatggagaacctctgctagggcagtgcagaaaggaaatgtggggttggagtagagtccctactggggcaccgcctagtggagctgtgagaag

SEQ ID NO: 7959 - DNA, 2300 bp, Homo sapien
ggggagtaaggtgacgtgaaggagggagttcctgcaccctgttcacctctcatctcccgtggccctaccccactgttcctgccaccccagctccagccatagccatgagcatgcaggcccttgcacacctgttctcttgctcaggcgttactgtgggaccttgcccttgccctcacccctgtctctcaacctccttcctatccagtagacctagttcttgcccgcccgcagaagcttccttggccccttccacctccctcctctgaactgcaacagtattttgttcttccttggtgcttcagctgctatggtaccccagctcctgtttgcacacttccactgacagagatcacacttggagctcatctgggtggctctgctgtcaccaagttcttccttctaactggccagtctacagggaatgtctaccatcatcaccaatgacaggtttttcctgatccctactctgtgcccagaacattcaggccatatgcactggtgggagcttgcccatcttgtaatcaggcctccccagggagaagtatcagcttgaggccctgggtccgaggctggcacccagcggtcaaggtaggaaagagctgaggcttggcgccgggcggtgtggaggagagggaggtcagggtgagaccccgggcccccacagtcctcctgtttgttctccacttcccctacatttcctgggacaggagaggattcagatggaggtagggatcacggtactttcacccaatgggtccgggtcttcccaagtccccgcttgtggaaggagtccttgcgggagggccatggaacaaaaaggccttaaagacagggccaaagcgtgcggagggcagcgaagggaaggagggggcttctgcggcaatcagttctggagcaggtcacctccgcccgagctgcagcttcctcctctgcaaaacggggcagggtgaaggcccagtgagagcatgggcgcggatgccatcacgctgggcgggctcgtccttcccgtggggaacctgccctgcaccccgcagccctggcctcctgccagccataaggagagcggaagccccggcgggcctcgccgacccgggagtccgcgcggcccctccctgcccgtgcggaggctcccggcccgcagcgccacctcgtgctcacgcatggccagacaccccagatcccagcggggccaagagccaggaccggggcggctggaggccaaagtgggctgcgctgtttgctttatgcggccagtcccttcccgcccaccagactaccctcgccctgccggactccgccctccaggaaccctggcgcccagggcgagggcttcgaatcttacacaatcaggaaaattcgtgcaaagaatccgttttggaattcacagaaaagggttgaaatcttggggtcatcactaaccaattgtgtgatttttggccaggtcactttacttctctgagcctggaaaatagggatgaaaatatctccctcaaggccgggcacgatggctcctgcctgtaatcccagcactttgggaggctgaggcaggaggatcgcttgagctcaggaattcaagactaagaccagcctgggcaacataatttaaaaatctaaaaattaaccgggcatggtgacgcctgtagtcccagctacttgggaggctgaagtgggaggatagcttgagcctgggaggttggatgacagagttagaccctgtttaaaaaaaaaaaaaaaaaaagcaaagagagaaaaataaaaataaaagaaagacaaaaaagaaagagaaacaaacaaagaaagagaaaatacctccctgagcctgggaggttgaggctgccgtgagccgagattctaccactgcactccagcctgagtgacagagctagaccctggaaaaaaaaaagaacgaaggaagggagggagggagagagaaaggaagaaaagaaagaaagagcaaaaaaggaagaaggaaagaaggaaagaaggaagggagggagggagggagggagggagggaaaatatctccctccacaggactgtgtgtagaagaaatgaagtaacatttgtagagaaccaagtacggtgcctggcacaaaatggcagcctctaagtgctctttcccgccctcatccaaccatggagttatgaagtagattacagagccatgtagtctgagtctgttttttataactcgcactcagaactgaagaattttgtaaagttctgggactgtagaatcacagaacgacacccggtaatccacagggtcatggagtaggtactcaccgtcagctgtggcc

SEQ ID NO: 7960 - DNA, 2300 bp, Homo sapien
aaatctcgtctctattaaaaatacaaaaattagccaggtgtggtggcagcctcctgtaatcccagctatggggatgagggggtactgaggcacgattcccggaaggcagaagttgcagcgagccaagatggcaccactgcactccagcctgggcgacagatcgagattctgtctcaaaaaagaaaaatttcagagaggctactattcgtattaaaatacactgcttccggccgggtgcgatggctcacgcctgtaatcccagcactttgggaggccgaggcgggtgaatcacgaggtcaagagatcgaggccagcctggccaacaaggtgaaaccctgtctctactaaaaatacaaaaattagctgggcgtggtggtgcacacctgtagtcccagctactctggaggctgagacaggagaatcgcttaaacccagggggcggaagttgcggtgagctgagatcatgccagtgcattccagcctggccgacagagcaagactgtctcaaaaaaaaaaaaaaaaaaaaaaaaagatacactgcttccctaggttttgcacctagcaaataaaagttctgcatctatttcctgctaattggctatggttattttgtagaaaggctgtgggctcttcatctctccttgtcctctcttttacctttgacttgcaccacatctgacttatttatttagaaaatagcagttgtatcatccttcatttttactcttcatttcttactgtgtattcaggcagagtcctaatactaagaccataaagaagggaaagcaaggtctctgatcaggatgtagcacagtaggatgtgaacaaagggcaaggaagctctagggtgtaaacatctgggatggcttcagagagctggattttaaaagaagagtggggagttggtcaaacggagaagagagttaggctgtcccagttgaactgtgggagcaaaggcaggtgacccagcgcattctaggagaggggaaagtttgagtttggtgtagctgaacactaggggcaagggtggttgcatctgttttaggaagagctctctggcagacctgtggagtactagactttttatttatttatttatttatttatttatttatttatttagagacagggtctcgctctgttctcccaggctggattggcacagtctcagctcactgcatgcaatctccaccgcgggggctcaagtgatcctcccacctcagcttctcaagtagctgggaccacacgtctgagccaccgcgcccagctaatttttgtatttttcgtagacacggggttttgccgtctacgatactcccagacgggggctgggagtattagacttgaagttggaagtaggggtaggctgttggttgcctgaagagcagggcacaattatagttagaacgtggaaacctctgtgcttggaggcccaaacgaagcagggaaactttgctttagtgctctagctagcagcattctttttttttaggatctcagaacctactttttttttttcggtcctgggttgttcaccctttccctttgtaccgaagagacacttacacctttatcagaaaatcacggtttatttcctgagaatcacggggattggttgggggtactctgttttggggctccatttgaggcctgtggctcaatggaagacatagaggcgcttcgccgcacaggtttaatcaagcaagggcttgatagaagtattcatcccacccccgccccgattaaatcaaaccacacgcacacaaatagaggctctggcacatcctgacagaatatagcctctgggatgtcaggaacccccaacctacggccattggcgtgtctgcaccggccaggaagcccaggcccccggctccttcctggatcacgcccctgccccgcccaagggtgaagaggggcggggccagccggcgccctccgagtgggccttacaccaggtcgggcctggcccggccccgcggcccagcggcgccggtgggcggggcctccgtcagggcagtgtcagtaacggcgccaggccccgcccctcggggaggcagggccgggcggggcgcgagcgagcgcgcgggctgggccggagccggcctggtcgccagcctaacccggcacagtgagcggagcgcctgggcggcggcggcggcggcgtgatggctccggccgcggaccgagagggctactggggccccacgacctccacgctggactggtgcgaggagaactactccgtgacctggtacatcgccgagttctgtgagtgtggcctgaggaggggagtgggg

SEQ ID NO: 7961 - DNA, 2300 bp, Homo sapien
catattttaaaataaatataataaataggctgggtgtgggggctcacacctgtaatcccaacactttgggaggctgaggtgggtggatcacctgaggtcatgagattgagactggcctggccaacatggagaaaccccatctctgctaaaaatacaaaaatattagctgggtgtggtggtacatgcttgtaatcccagctactcaggaggctgaggcaggagaatggcttgaacccaggaggcggaagttgcagtgagccaagatcaagccactgcactccagcctgggtgacagagcaagactccgtctcaaataaataaataaataaatatacatacatacatatatatatatatatatatatatatatatatatatatacacatacatacatacatatatatatatacatacatacatacatatatatatatacatacatacatacatatatatatatatggcaagctgaatatatgctatattttccacaatttgatttaattggaaattcaagattcctaatttatatactaaagaagttgtgtaacaaaaagattaaaaacagcactgattggtttttgcgcctctacaacataggttctaacttaacatttgtgaaaatgtactaattgtcaaaaattcatgaacttaatattgggggtcaaaatataattatacctggggatcccactaatttacacactctgaccctataatcttgagagggtaacgacatataacagtttttaaatgcgtatgcctcaatttaagtgtagccttgcctaaatttcccatgctcatatacccactgctataaaatgttttctattggacatagatgctttgacaaaataaataataaattagattgggcatggtggctcatgcctgtaatcccagcacttagggagaccaaggcaggaagatctcttgagcccaggagttcaagaccaaccggggcaaaatggcaaaaccccatctcaacaaaaaatacaaaaattaaccatgtgtgatgatgtgtgcctatagtcccagctactcgggaggctaagatgggaggatcacctgagcccaggagactgaggctgcagtgagccctgatagtgcccctgcactccagcctgggagacacagtaagaccctgtttcaatattaataataataataaattaaagtgtctctttgtcattggcttgataaaatgggaccccatgagcccccattttatagttaatatggcccaatgtaagtagaagcaggcccttcaaggattaaaactcattataaaaaaccttagttttaaaaagggtgattatcccctactacttctccatttagcagcccaattttgcctatgctcaaatctggaaatatatatatatatatttatgtatatacattttaatatagatttatatttttgaatatatttatatattttaatatataaatgtaatatagattttatctctattttaaatatataaatgtgtatatatggtaccctgtgatggatcactacaacttaacattgtgatcccatccattagggccccatacctaatattaaaattaaactgattttattcaatcaacaacaataaatactttactcttacagatgcggccaacctgttatttctgtgcctatttccacagcccttcaggcagtttgcctctgcctctgaaggcacacaatacacttttccaggcaacttgcagggggcctccacatgagggccgtcatcacacactgtctttacagacaagatgcaccttctccaggagcacaggtacgatactgcacctggattccagtgattctcctgcctcagcctcccgagtagctgggattacaggcacccaccaccatgctcagctaatttttatatttttagtagagaatctcctccaaggatattcactggacccacactctaaggacatttgagcttaaagaggaagcaggcagtcactggtggctaaggaagcctgtagctgccctccccctcttcaccttacccctaaggaggaggggtgatgtcatggattggtcagattcaagagaactgaaccacaggcctgcgtggaacctcagtgtgtgaagtaaagggattaaaggctagtctcaggctggggatggctcctgtctatttcttctctctcagagactgcaggtaagctgggggcctgggcttcttcctattgggaaggaggtacatttttccttcttcgcattcccctctaatcagagtgccaagcaagaaacagggggaggccaaggggagaggaatga

SEQ ID NO: 7962 - DNA, 2300 bp, Homo sapien
gcaggggaaaccttggccccaccagcaactctgagagacgcagcctgagaagggccataggtgaggggtggatgctgagcaagggagctttgggatgctgcagcacagggaggaaggaagagtccttcagacggccacagatcagcacgggcatggtttcaggtggggagagtagagcccctgaagtgacttttgaagggctggtgaagctgctgctcccagtacagggcatggaataaggttaggggagatgggggagtcagatggggtgcagtcttagaacactcttctatgggtggcgggtctcagctgcatatgtgaaagtcttctttggttggataggaggctcctgagggggctggggctactcttaagggagaagcatctgggtggcctgggacagaggcagggaggttggggagaagctagagaagtccaggtgactgagagtgaggtgaggcagagactcctcttagtggaaataaaggaaaatcatgagtcttttcagggggaatttcaggcagctagctagctttgagaagtaaatgagcaccttgacaagcaagaaggtaattgaagcttcaaacaagggccacccaaataagttagagccacaagatgtctggttccctatagaaactaaagataacatcttgacctatgtccctgaattgtttttcacagctgtcacttaggcctcagataaggggaaactgagggctgttctttaaatttcttcccaagggttctgtaaagagtcacacccataagccaatgcttaactctcctatctgtggaccccaggtttttagacagtcttgcttcctaagccaattgcaaatcacagaatctctgaatccacctatgaccctgcctcaaaatgtctcacctttttgggccaagccaatgtatagctccagagtatttatttatgactttgcctataacctctgtctccccacctttaaaaagccttacatgtaaaccattggggagtacgggtcttaagcattagccgacctattctccttgcttggcaccctgcaataaatgcctccctttctgccgctgcaaatcctggtgtcagtgtttggctttgctgcactgggtgggcggacccaagtttgtttcggtaacacaagaggttgacgaaatcattaactgagacttcgaaacaaattggaggcggagaatgaacgggcctgagacgctccaccagcgagtgggccgatgggctcatcagatcagatgggcgtctgtcctgctgcctcagggcggggggtggtggcacccctgagctcctactgtaggcaagaactagtcactcctaaaccttctctatcggattccccaagcggcctggggtgggtagagattatagtccccgttttacagatcaggaaatgcaggctccgtgccatcccagggcattccggtagccagtcacggacagagagtcaaacatgagcccgagcccgggagcccatggcagcacgggattaagtcctcaacacgggccggggtcagttttcccatctgacagaggccctctgctgctcacaggggcctgggctcccacttctccatccgaacacttgggatggatgtgaaggtggagcccggaaagggaggggcgccgcccaccaagtcctggttctggcaggcaccctggcccttgcgggtcctcggtactacacgccggccccaagtcagccgcggccccggcccgccctgtgggggctgaaccccagccccggcccgatccctcacggtgcagccagcccttgggaggctgcccatggggatgcgcaccaaccgcagacagataggctgggaaggagagagaacgagggcccgaccgagccggtagaggcggtgggtgccgctaggggccccaagtccgcgttcaacacaggggctggaatgagaccgctcctctgagcggccgcccaccgcaccagtgcgcatgggcgcacccggccaccgggccgcccaccccgccccacgggagaccacgcctccggctcgcaacgggcaaatgggcggaggccgcgggcggggcggggcggagccgggcccagctggccgaacccggggaatgcgagcgccagcccccgccgcaggccagtcccagctggatctccggccagagcccgaggctgctgcgccgggcggctgcagcctccgctccagcgcccgcgccgtgccctgcatcccgggagcccggctggacccgcggcggctcggccggtaggaggcgggcggagggaggcgtgtgcttctgtgtgtgtgtgtgtgtg

SEQ ID NO: 7963 - DNA, 2300 bp, Homo sapien
gttcctgccattttccagcccattctaccccaagaactgctgtgtcccaggctttactgtgtccatgtggctaacgtcctgccctctcgctttgcccttttacccttgtcttagttctccatctcctttctatcagccttcaccttcagccgcctcagtcacctgctgccatgccacagcccgggcccggaactgctctccctggaggtcttcagccaaaggcccagtctctctgacctcaccttccagccatcttgctcacttcattttggccctggccagtacctgtgtactgtctccccacctgcccaccttcctcttggccttgggcttgtgtcccgtggtccatcacatcacctgtcccttgtcagtgtcattcactcattcatccgttcattcattcattcattcgatcattcgttcattcattcaacaagcatttctgaggcctctgtgtggcaggccccgttctggttgctggcctagagtaatgacaagacacacttcctaccctctcaggactgtgtgtcacaggcaaaaactgagcaactcaacaaataaaaagcagaatgtggtgctgggaaggttagaaacagctcccccatgtggaggaaagggaagcctcccatggtagttccttagccaagttgttcccctctcccctgcccctccagctacaaagcaaaaggttctgtgaggatcaggcagtttgacatctagctgtatggttctctcaaatacccttgggggaatttctgccaatgacccccagaactgaccccagggcttgcagtgtggttttaacaggaccgggtattctgtctcccttggtgcccctctgctgttcaggtagcccaggatcccactgattgattagccaccatctcacaattgaccgtgcttgtggtccactagacccttcagattgttttccgttgtgataccttggccttgactctgtcctcttttctgtgtgtggcgtgttgtggcgacggccgctccccaactcccatccccactctctccccaactccggctccactcacactccagttctttcatttccccagtataaaggctgagcttctggttccgccccgggccctggggatataaacatttgccagattcttcctcggcccctgggggaaactgaggattaattcaggtggagtaagtggtgggatttgggtagaagtgaagccttgtcctgttgtggccatggtgcagggctgcggcacagccagccatcagtgtcatccgggtcagtaatgctcaaggcacagtccctggcccagcagcatgtcacctgggaggtggttaggaatgcagattctcaggcccacagagccctgataaaccaggagttctgggagggggtccagcaatctgtgtgttaagtcctgagagtgagtctgatgctcactcaagtcttgagaaccacgggtctgggtgagagatacggtagctgggctgagatcctgtcaatgggactggaggggaagggtcccggggtgtttgggaagcagaatcgacaggctttggtgattgggtgtggaggagtgagagggaggcgggcgtcaggggtagctccaaggtttaacttaggtgacttcagatctccaatcaccaagccctctctggtcctgccttctccacctgctcctgcgggtcttgcatcttctcctgtgtacctccagtgaggagtggtccccaccaccctccccatcagtgcacttacgaagtgctctcatcttcacaaacaagccagcacccagcccagccctggtagtcagggcggttgccacagcaattgacatcagcgacctggtccccaaggaacctgccaccttccgcctgcctgcagggcctgcattatcgcttctgcggggactggagtggaggcagatggggactcccacccctgacacacaccccattttgagaactgagtggggctgggaagagccagtggcaaagggaggggaagagggaagggcagaaagtaggtggggcccccctttggtggcctcttctctccacggccccaggctccagcccacttgggtccttggcgttggtggcagcagcacttgggccatggcggaggacaggccgcagcagccgcagctggacatgccgctggtcctggaccagggcctgaccaggcagatgcggctacgcgtggagagcctgaagcagcgcggggagaagcgccaggatggggagaagctgctgcagccagcggagtctgtgtaccgcctcaacttcacccagcagcagcggctacagttcgagcg

SEQ ID NO: 7964 - DNA, 2300 bp, Homo sapien
atgtgggctaggctcagtgtcacccttcagcagaacctgatatggaaactcagtcccttcctggaggggtattggcatcctgtgtgtgctggattctgtcagggcccccaggcagactgggggcagatggcagtggtcctggcacccaatgatgaacccttctgcaggtgtcaggtcagctgctgcaggaggccacccaggccactttgccagtcttgctcaggagtcagcagataaaaacacggcagagctccttgcctttagaaagagtttcttccaaaggcctttctcttacatgttcacggttaattcactgccccctgcccccaccagctccctggaggcgttcacagtgtgcagtgaccatagcaacaccctggccaccgcagcaggctcaccatggggttcccaccatccacttactcaggcctctcaacagccatggaagatcctggatgcagatgtgctttataaactgtacagggcagcagacagtagttattaacaccattcacaatagtaacagccagcgtttgccagtgcgtgctctgtcagccgaaagttgcactgcctgctttgattgcattacctaattccttcactagctctgagatgggcacctgctgttagattcagcctcattttacaggtgaggaaacaggtcaaaagagaggttaagggtctgtgcaatgccatgcctgtgcccttgtgtgggcttagctcccctctcaaagccagctgtgttctctcacctctgggccatatggacatattaggttgttgggctggggggccaagagcctggggaggtgtgggggaggtaccctgctcagcccctccccacatccaggatgaccttcgaggacgtgtgccggtacttcacggacatcatcaagtgccgcgtgatcaacacatcccacctgagcatccacaagacgtgggaggaggcccggctgcatggcgcctggacgctgcatgaggacccgcgacagaaccgcggtggcggctgcatcaaccacaaggacaccttcttccagaacccacaggtgggcgttctcaggaacccccaccctgccctgtagcagctgcggggtgccttgccactgtcctgccagggactcctgcatgaccttgggtaatccctgtccttccttgggcctcagcaaacctgtctgtacagtgggggttagatgggcacatccgtcccatctgggggtcatgaagcccccagcctcacaatctaacctgcagatggtaaaaatgaggaaaccgcggctctgagggacatttgggtgtcttgttctgagctacagggacacttagaggctgagccagggactcagccccttgtttccacaacagcacaattctgtcccttctgggaacttggctgggctgggcttccccacggggcctctccccacagcctcctcagtctgacccgtggcgctgcttagccctggtgcttggtgtgcctctgttgagcaccacctgtgtgccaggctctgtgcagagtggccaccctggcattgagtttccccagccttcatgcagggtagccattgcaggcattggtaggcccacctcacagcagagggaccaaggcgcagagaggtgctgtgactggtccaggctctggagtctgagcttccgggagccagccagcccatgcctggtgtggtctcattgcagtgtctctctctctccttggccacacctgcagtacatcttcgaagtcaagaagccagaagatgaagtcctgatctgcatccagcagcggccaaagcggtctacgcgccgggagggcaagggtgagaacctggccattggctttgacatctacaaggtgaggccagccgggtcccctgccgtgggtggggagagggagggagctggagtttggactgcccatgcctgaggaagaacgctctagaacaccttggtcactgccgctgccctggctgccgtggcagacattgtgaggatgccgtggcatgggccccacttgaatattcacagagggcccagcctgcccagccttggcttctgtgggagctctcagcctgatttctttctgcctaagacccacaggcctgggatgtttggtggatgaggaaggggaagattactggtggttggggccgggccctgggaggctctgggcatctactgggcccccactgctcctccctcaggcctcagggccccttgcagccccttagccttcctgcattggaggccttgctgggcaccaggaggaggcatccttgagcatagccaggtggggtcacctatggccg

SEQ ID NO: 7965 - DNA, 2300 bp, Homo sapien
tgtgtccctctgtccccctggggggaagggacaatggaggaatattccccaggcctgggcgactgtccgctggtcagagggaaggccccgctgcctgcccggtgcacctgtgagctgagattgtggggatcattcagtcattcctttattcagtagatctgtacggggctggctttgtgccaaggcctgccccgggcacctgggatgtggggaaccaggcatagcaatccctgctctgggacagtctacaaacgagcagcgagaacaaagacatactctggtcatgacagacactaccccgcacattactgatggggcagtgtgggcctgctgggttagagacggcctactccctgatctgtgcatgaagggctgggaagaggagatgggccttcggggcacaggaaggtgtggggggaccagagcggaggctgctgagggcagatgcaggcatctagggccaggaagctggtgtggtggtggggagaagcagggttgggatgactgaaagcagagtggacgactcaatgaaaaacgacttgggagacggggtgagtgcagtgtgagggcaaagtgaaccgagatgcctcgctttcttcatgggactgagaaatgggtattgcaaatcgtgtgatctgcttagcatagtgcctggttcatagcatggctgaacacaatgtagctgtcatcctggtgtttggaggccgccctgtcccccataacctgcccacctctctgccccattcccacagctcactgcattttgtccctgctgccagtcgtgtgccatgggctctcctgtgctcccccggggtctcatttccccatccgtgtagggctgacgccactggccccgcccagcctgggaggatggagaggggggacttgaggagtggccagtactgggtttcggcagcaggtgcaaatcccaggtggggactgtgttccagggactcctggactcctgttaggccagcaggctaaggggcagacggcatcctggggtcttcctgggacagggtcgtcgggtctgaggggacccaggccctagcagaagctgactcctgtcacggtcacttcccagcggtgctcagcccgcctgacggaagcagctgggcagtggggcctgtgaccagcaggcggcgctggcgagctatagcgcccctttgggcccccaccccaccttctgggcagcttccctgcagacaccccagttatgggggctagggacccaaaagagacatccttctgccacccagagctgccctggcgaggtgcactatggggccgccgacagctgcgtggctgccgagggcggaaaggagaaactgtcatgtcccgatagggccgcgcgaggtctccatcctcgacaacgctaataacaaagacgtgtgctcctctttgcttggttccccccactcctttaaatcacagatttcacttcagtttatctgtgtcgctgtcacacgtggggtggctcccagtcagctggtttggcaaagtttctggatgattacggaataacatgtgtccccaacccgcagagcaggttgtgggggcaatgttgcattgaccagcgtcagagaacacacatcagaggcaagggtgggtgtgcaggagggagaaggcgcagaaggcagggctttagctcagcactctccctcctgccatgctctgcctgaccgttccctctctgagtcccaaacagccaggtagaggaggaagaaatggggctgagaccccagcacatcagtgattaagtcaggatcaggtgcggtttcctgctcaggtgctgagacagcaggcggtgtcctgcaaacaacaggaggcacctgaagctagcctggggggcccacgcccaggtgcggtgcattcagcagcacagccagagacagaccccaatgaccccgcctccctgtcggcagccagtgctctgcacagagccctgagcagcctctggacattagtcccagccccagcacggcccgtcccccacgctgatgtcaccgcacccagaccttggaggccccctccggctccgcctcctgggagaaggctctggagtgaggaggggagggcagcagtgctggctggacagctgctctgggcaggagagagagggagagacaagagacacacacagagagacggcgaggaagggaaagacccagagggacgcctagaacgagacttggagccagacagaggaagaggggacgtgtgtttgcagactggctgggcccgtgacccagcttcctgagtcctccgtgcaggtggcagctgtaccaggctggcaggtc

SEQ ID NO: 7966 - DNA, 2300 bp, Homo sapien
gaatgtgggggatggaagcaaagagacgagttggggggttgctgcaggaatttgagagcaatgctggtggctgggaccaggctgacggtggaggaagtggtgaggggtcaggttctggagatattttgaaagtagagcctgtaggatttgcggatatattagatgtgacagaagaggcactgaggacagttgctagatgtttggctggagcaacgggaaggtgggcaatttctgtgaacccatggatgtcactaggaaccagttcaacagcacttcagtagatcaaagtgttgactgttacttgtgtcatgtaggccctggccatgcagcaataaagaggcagacgcatcctgtcctcatggggctcccagcccagcagggaggacgggcagaaagcagtcgttttattgtgatgaccaagaccaaagaagggtgtgcgtgcgcgtgtgtgtacacgcggtggtatgcgtgtgctcctagtggcgtgtgtatgtgcatgctgaggttgtgtgtgtgttgtgtgtgtgtgtgtgtgcatgcgtatgcgtgtactcatgtcaggggccctaatgcaggctgggtacagcccaacttggacagctcccctccagtgaccggggtcacccggtgctgctgctggatcaaattgaggacaacgccaggggccacagatctgaccaccaccctaccgcattgcaaatactccccagcttctctgggcaaagtcctagaatatattccaaatacaatgcagttggaaagcattgcagatttcagaatcgcaggcactggctctttctcggaaggcctcatcacagtctggtggcatagtacctaaattgagtatgagcacaacacctttgtccccccaaatacctcacatatctacatctacacccctggtttttgatgctacaggatatcagatgaaatgatgactctaaaaatataaaaatcttgcaatattaatcaaatgaagtcaagtaaaataagaaattctcaaccaaatgaaaattgccaggaaaacactaatcaagatgctttggaacaaaacctaagctctgtgtccagttcccatcagtcctgccatttggcttcctgtttgtttgcggctcagggcttcccccacctcatttcacagtattctcagaggggaccccagtagggcagggaggcgcagggggctcgctggctgccaggatcgcccaggtgtggctggtggagcacagaacccctggctgcgtcggagccacagtgcggggggttaggaggaggctgcttgtgtgccttcttaggaggattagccaggcctgccccgcccccagcctgctgctgccggctaagcctgggaggggagaggtcaccggcagctcccgcccctcctcctcgcgcttgcccacaggtttccagaaggcggcaccacctttctaggttgctgtttactgaaatatgccctgacctctgacccttgtcacagcctggtcagatggatagatggcatcacctccacttaggaaactgaggctctgcaacatttagtgacctgcccaagggcacacagctaggaagtggtgggccagggcttgaatctaggttcgtctaacccctgtctctagagatgacctcagtgtcctgaggtgaccaagtccgattactcctttatacagggaagggagggatgagactcaggggctgccccttgctcagagttatccagcgcaccaggtgcaggggcaggcttgagactcccagtgcggagatcttcctgtagggttcacttccccctcgcccagaggtggtaactttggaagtcctgggaggcttcctggaggaggtatctggagtccaggctccagctcagaaggtggggagaggcagtttgcaggaaaacttcaaataccgccctgtccctcaaaccctgaccccgctgacctcccctcccgcttcctactgggcggctcctgggacactggatggggcaggcacagcccctcccatcgctgccgtccgtccccccagggcgccgagaccaggaagcgctcgcccacacttagcagccagttcaagcggtcactggagctgctgatgcgcacgctgggtgcctgccagcccttctttgtgcgatgcatcaagcccaatgagttcaagaagcccatggtgagtggccctggcctggggttggcgggtggcggctagggtgacgtggaggagctaggtcaagaataaggtagggtgggagtgaaggatgtgagactttgtccctttggggaatggggggcaccccgggagcttacaaaaca

SEQ ID NO: 7967 - DNA, 2300 bp, Homo sapien
gcgtgatgccagcacagaggcgggagaaagctggcctgtccagggaactgcgaacagcttggtttggctgggaacaggcacagtgagggaggagaggcgaggtggaaggagtctgggaggcccgctcacaacaggcccaggagtgtggggcttcctcccaagggcaatgaggagccgtggaaggcttttgagcaggagagtagcccactctggtgatggtctctgtatggagagttgtgacaaggtggaggcagagtggcaagtgggcagacatgagtgataacacctcagttcttctgtgggaagatgttccaactcagcctgtctctgcccccatggtcccactcacctctgctctacagcaggcgaggagtcaggcttcctcagctttgccaagggagacctcatcatcctggaccatgacacgggcgagcaggtcatgaactcgggctgggccaacggcatcaatgagaggaccaagcagcgtggggacttccccaccgacagtgtgtacgtcatgcccactgtcaccatgccaccgcgggagattgtggtatgtggcctgggggtggcagatgggtgggaggtgccattagacccctctttgtccacttcccacagctgtacaataggttaacggtctagtgcatctgtgaagatgatcttgggatcttatgggacacacatttaaagttggggcagtgctcaaacctgtgccaggtggggaggggcctagaaatggcatcagatgaggaactgccaaggggtggggccgggggtggggattggagagaggtgtatcacccgcactgtctgaacaggcagtgggggcacagctgggaagggggccctgcttcttctggagcccccttgagagcagctctgaggactcacagcccagcttccctagtggctcctgagccaggctcagtggacgaggcagctctcataccatgtcccgctgccttgtccaggctttctgactgacccaacctgatcagacacctggggaagggccctgagctcagcacaaaggaggcagcagggacctcagagaccccaaggaggaacggggctcccagggtcagaatggggcatggggtccatacccctgaagagtctcccagagtccagaaggcttcagggtataccatgttgatcctggtggccacaggtagagagctgacctgagccccctgtctcttggtccctaggccctggtcaccatgactcccgatcagaggcaggacgttgtccggctcttgcagctgcgaacggcggagcccgaggtgcgtgccaagccctacacgctggaggagttttcctatgactacttcaggtgatgcctcctggggaaggatgggagccacagggctaggagctgcaggcttccgctactgtctggtcgtgtgctggggctgctttgtgaagcccccacctgtgagcagggcctgggtcagagggagctggagggctgtttctgtctgccaggatgacccgtcctatgtgtctcatcttatcttccttccttcaagagatgtcactgcacccaccccaggctgggcattcgagactgagtcctggtggggatgcgggctggaagcaggcagctgggattcggcgtgcccagcactgtgatgaggatgcttctggggcggggggtggggggcagtgagaagcttcctgatggaggcgttgtgcactgagctctacagggggcgcagggtggtgggggaggctggggcacagcccgtggtgttctcgccgctggggtttcacagctgagaaagaaaggcccagtgactgccagtgactcgcctcgggtcacatgcagggcagggaagagcagggcctggtgcccactctcagcctctggacacagggatgggtgggggtgggggtctcacaacctgggggtttctccccggggctgccagcgatggggcgttgctgacggtccctgtgctgcggcaggcccccacccaagcacacgctgagccgtgtcatggtgtccaaggcccgaggcaaggaccggctgtggagccacacgcgggaaccgctcaagcaggcgctgctcaagaagctcctgggcagtgaggagctctcgcaggaggcctgcctggccttcattgatatccgtgccactgggctgtgcccaggggagccagggaccgggcagggccttcgtctgcacactgccttcctcctgagggcctgctgcgacccgggcacacatggggagggttgatggagtaccccctcccttgcaccttttgatatgcaaggggctgcctcgccca

SEQ ID NO: 7968 - DNA, 2300 bp, Homo sapien
accttaaatgattccccccaccccctgcctcggcctcccagagtgctgggattacaggcataagccactatggccagccggcctgccttctctctctctttctctctctgtctctttccgtcttccctccttttcccctcccctcccctcttttttgagatggagtattgctctgtcacctaggctggagtgcagtggtgcgatcttggctcactgcaacctccgccttccaggttcaagtgattctcctgcctcagcctcccaagtacttgggattacagatgtgcactaccaagcccagctaatttttgtattttttattagagacgagttttcatcatgttggccaagctggtctcgaactcctgacctcaaatgatccatccaccttggcctcccaaagtgctgggtgtgagccacagtgcccagccaggcttccttccttccacttttccttctctttctttctctctcccgcttccctcccctcccctcccctccttctgtttctttcaccttactgggttatttcaaatgacttgtcttcaggttctgaactaatatctccttattgaattatctcattcggattttgaattgtttttctgatttctttgtattatttatctgtgttctcttgtatctcattgagtatatttaatattgttattttaaattatttgtaggcatttcacacatttcttttacattggaatctcttgctggataattatcacattacttcgaagttgtcatgtttccttgctttttcatgttttttgtgtccttatgttgatatctgcacatctgctgtaacagttgccttttctaattttttgggttggctttcataggggaagatttttttttcttgtagatgtatctgtagagttggttgggtggggcactttagtttttattctgggttcatgcagtagtatagtctccctgggatttctttggctgtaatcaatatcagtggtgtctatgattttgtcagtggtttaggctctggttgttagcacaggctgtggtgagactttgctgggaatggggaaatcaggcaggccaatcctcaggccccagtggtggtggtggcaggccgattgttcctgtccttggacccctggccagtgtacacaggcactggtgttagcaggtcgaggtgggccaatttttaggtctctaggtggcttgcttgggtactggcagtgttagcagtgtgcagggcaggtgggtgggacctggagccctgggcagcatgtgtggtatcagcgatggcagtagtgttagggggccaatctttggtctcccaggtaacatgcactggtgctagcagtgacagcaataggatgggtgggtcagtctataggtccccagctggcatgtgtgggtaggcattggtggtggtagtagtgccaggtgatgttggcctgtcctcaggctccttgatgatgtacacaggtgcaggttgtggtaggtgcctgtgttcttagtgccattgtgaagccacatgctacatattttgttctatctctgaaatattttttgttggcaaaggaaaaataaacttgtcacatttcagccattgttgttttgaagattccatcattcataattgaagctaaccctaactgattccatatgggagaggagagaaagggaaggagcagccagctgtgtgtctgagtcacttattagtcaacgatggtattttcatgtacctcacccgtgcctttaacgtctcaagttatttcaacagcatattgcaatttgagaagcacgtttgcatatattatctaatttgattctttcagcatttattagttggtgaggacagggaatattgtcccactttagaggtgagaaaactaaacctagagtgatgcagtgatcacagtaaacactcaacaagttagtgggagggaaaggtaggaagaaactctattcttctgccccaaatccagtatattacctttgattataaacagttttttaaaaatccatctgtctttgataaaattttctgtagaatggtgggataaggtacattaaggggagcgacactagatcctgattattttatttgtctttccagctaaagggtgaatcatgtttaagaaggtcaacaggattgagcacaagaggaataagacagaaaaaccaaaaaagcttaatccatggattccacgcatcttcaaccacaaatgctttgtcaccttccttactggctgctatagttgcctctggaaattcagacaatgggaaaaaactaaagttggattttgttgctgcacttg

SEQ ID NO: 7969 - DNA, 2300 bp, Homo sapien
actgcctcatagtgctggtggaaagtgagctcctcattcctgcatgtatttcagaaaagcctggaagaccatctataagaggatgctgcatggggtgggaagtcgagtaagataagttgctatgattattgcttattagtttgaaaagctgtgtctaaggcagaggactgcttctggctctcattcaccctgtgtaaattgggatgaaggacatggtgtggggttaaaaaaaagtcttaaaatgactttgaagctgaatcctcagactacagcaattctccgggtgtctattattgaccaattctttctttctttcttttcttccttccttccttccttttctttcctttttttcctttttctttttttgagatggagtttcgctcttgttgcccaggctggagtccagtggtgcgatctcagctcactgcaacttccgcctcctgggttcaagggattctcctgcctcagcctcccgagtagctgggattacaggtgcctgccaccatccagctaattttttgtgtttttagtagagacggggtttcaccatgttggccaggctggccttgaactcctgagcatttaccagatgtgtggtcttggagaagtcactgacttctttcaccatcgtattctgttttccaccaagttctgctgctgcttcttccaagctgtgtctttagaaaataggcttgcttctttttacattatcttacaatatgttagtctaaatcattactattttctgttgcctgaacctctgagagaagttattaacttatttccactcctaccccctttctccactgaacagccagtgatcttttaaaaaatgtaagttagagtttgtcattctgctttcaaacctttcaaagccttcccactgctaaaacttggaacaaaagcctaactcctaattatgacccgaaagagacaccgcataatctgacttctgtcatgtctcttaagagcagggtttgggagggggaagagtgaggtaatactacctcctagggagcatttgcaaatgtgtgaaggtgtgttttattgtttcagtaattgggaggcactactagaggcactactagtctgggccgtgttggtaaatgttctataatgtgttgttcagctcaggttccatcacaatgcctgatgcacaatagttggttaaaaaatacttattgtatgagccctggacattttccctggacctccgttttgacgtatgtgaattggtatagtgcctacttcataaggttgttttgagagagacataacatttataaagtacctagtacataatagttcttaataaatggtagcagtggctaggtgtggtggctcatgcctgtaatccacagtttgggaggccaagggaagaggattgcttgagaacaggatttgagaccagcctgggcaacatggcagaccccatctgtacaaaaaatataaaaataactgggtgtggtggcaggtacctgtagtcccagctacttgggaggctgaggtgggaggattacttgagcccaggaaggtcaaggctgcagtgagtcaagatccaaccactgcactccagcctgggcacacagcaagactcttgtctcaaaataataataataataatgtagcagctgctgagctttgtttgcttagaggcagctataggggcccacctagcattcttcctggagcattagaattagaacctggcacgtttggggaggggggaggtgtatctctttctctgaggcctaatctgaatcgtaggtctgacctgaggaatcttagaagggactcctctatactcatctgtagaaactaaggcacagaggagctctggttgtctttcttgactctggagctcacacaggactctgacaagccctggaaaacctggccctggagagaaattacctcctgctggagactgggtggggagaatagctgagagggtgggaagatagctgtctccccgccctcagctctgctttgcagaaaaggagaagcgcgcggcttcctcccgcctccttccctcctttcttcccccgccccttctgtttcgccaaccccgacgcggcgccttcgctgccgccctgcgagagcgcgagcgtgctgcacctcgggagctggcggctgagctgccaggagcccagcccagctgaatcgagcggagccggtggagcaggggccttgtgggtacccggttgggcagggagaggtgcggctctgcgacggaaacaatcgccagagatgccggggctagccttccccaccaggtaatgccggccctgcctggg

SEQ ID NO: 7970 - DNA, 2300 bp, Homo sapien
acgcccggctaatttttgtattttagtagagatggggtttcgccatattggccaggctggtctcaaacttctgacctcaggtgatctggctgccttggcctcccaagtgctgggattacaggcgtgagccaccgcgcctggccttattaaatatattttaacaacatattgatacttaggtatatgtcaagcactgttttaggtgctgaggatatggaaaggaatatgacttggaactcaagaaattagatacacaaatgcagttacttccataaaaggcatagaaatactatagaattacagttttgttaaggcttagggaaactttagaaatattagtcaaatgaatatgaatatgaatatgaatgacatttgagctcagctttgtacaatgaataggtgttggccagtcagctaagtagggaagagcttgaagacatgaagaaatgtgtattcaaataacgttaatatttcagtgtgcttggagcaaaaaataaatgatgtgagacaaagctagaaaggctagtgtaagcagtcaggtaataaagtgccaagttcaggagtttgaactttatcctgaaagcaataaaatcctttcggtgtttaaacgggaggacatcatcagatttgtgcttttataaggctactcaggtaactagtgagaaaaatagattgagtttgaagagactaaaggttgctccagttgttcaggtggtggtagtagaagacgacacaggcaaggacttgaaaaatatttaggagaagctacaagacttggtgtccaacttgatatggatgttgagagaggaagaacggggagctattagtatgtctaggttcctggcttaggggattgttgaatgggtggcccattcattgagaacggaaaggaacgtaagaagcaattttgggggggaaataataataatagccaacattctaaagggcttgttactattaccatggtaaaactgaggcttaggaagacctagttaaggtactacttattattacagaaaaattacggcttagaaatgtcaaggtcctatcactaatatttgaatagctaggatttcaagcaaggcaacctgattccggactcttagcctttctaatgctgtctcagtttcgcacatgttgaatctgaggtacgaagagtatgcaggtaatgctgctcgggaggtattgggaaatacacaatctgagctcaggagaaagaaagctttgggtcgaaagtaccctccacggtaggggaaaaaacgtgaaaggaagcccattcttttcgtatgtcagttcacattagttcaaacatctccgttataatttctttgtcttcctcccacccctgccccctctcccacagaaagaaaacataatacatgtctggctgtgagatcacacgacatcggatagttttcaaattcagcccttgacaacgagctcatagatgcggtggtgctttgttaacctgaaaaggaccctcagcgccggaagttagccgtctttctccatcctgactactacagtagccctcccagaaatcgtcccaaaattgtctgatagaaaggctgcacggaaacaacccgccacggacagcggaccgagaacagtgacgcgacgcgatgacgtcacgcagcaagcgggtgattccccagcctctggcgtcacgcgccgatgacgtaatcccaggcgttcgccctcatgcgggccagggtttggcctcgctcccacgggtcggtcaggccctccccgccccctctcacctgcgggaggcggggcgggcacggctccaccggagccgcagccgccgccgccgcgccggggagggggagtgggggagggggagggggagaaggggaaagggcagaggggaggaggaggcgggaggaggaggagtaggggagccagtgaactaggcggtcaggcctgccgggcggcgtacaatagcgcggctgtgggcgggggaggctgccctcccgcggctgcagccggagccgaaggtggtggctgcacagtagacgccccctcacggcttcccccacacgctcccgccccctcgctcgcccatcgcgcttccctcacaggctctgcagtcctcccccacagacgccttcccccttggactctcattcccttttccacggagccccgcgctttcgtgagccccctcgaggaacctggtctccgcatccagttaccacctcctgcctcagaggccatctgagcccttcgcacctcgcccctcagtccccccttccccccccgcccgcgtcgcctcgctccctcccgcccccccatca

SEQ ID NO: 7971 - DNA, 2300 bp, Homo sapien
ctctgtctggtgccctatcctgctgtggctgagcaggtatccaagctgcaagacaaagtcctctttactctcccttctctcctcaggtagagggaaggagtctctcccagagctgtgaactgcactgcctgaggttgggagagggatgatgcaagcactgccttggcctccctggctccatgtacatgttacatgtacctgagtacgagtaccctggctccaagcccagcacagcaccaggacttgcccagcaattgcaatccttagggcctagactgcctttcaagtttacttaggaccccagagccctttaccaaatggtggtggcttgccagaggtcaagttctgaccactgggatgggtaatatgcctctggctagggctgatgcaaatgctccctccttggcctccagctgagttctgccttgtgttgttttctgctgtgacagggcagcactgagctctaatgcaaagtcccataatcactgcactctccctcccacaagtgcacagactctctgtgctatgcagccacagctaggcgatcagagaagggtgctgtagacaatttgagactatttttcctgccctcttcagtgcctctttccttaatgtgatgttaaaaccaggtactatgattactcacctgatttttggttgtaatgaaggtgttttttgtgtgaatagttgttcgatttggtgttcctgcagggaggacaatttctggaggcctctacttggccatattgctccctagtctgtactccttttgcattgagttttacaggatccacccatttccaaagttacttaggtcagcaattttctcccatttccttcattgagttttgttcataatacagttagattattttgtcacgttctttatttcatcttgggatcatctatctgagctcctaaatgatttttttaaatttgcatactttaggttctaagggttctgacaaatgcaaggtgtcatgtatcatgtcactatcattatggtattacacaaaataatgtcaccatcctaaaatgtcctgtgatttacctattcaatcctccttactgaattcctaccaacttgtttttcatctctgtagttttacctttcataatgtatataagtagaatcacggccaggcacggtggctcacacctgcaatactagcactttcggaggctgaggcgggtggatcacgaggtcaagagatcgagacaatactggctaacatggtgaaacgccgtctctgctaaaaatacaaaagttagccaggcatggtggcaggcccctgtagtcccagctactcgggagcctgaggcaggagaaccgctcgaacccaggaggtggaggttgcagtgagccgagatcatgccactgcactccagcctggcaacagagccagactccgtctcaaaaaaaaaaaaaaaaaaagaattatatagtaaaaagccatcagacttgcttctttgacttactgatatacattcaacatttatccatgtctttgctttgcttgatagctcatttctttaaaaaaaaaaaaaaaactgtggtaaaataaacataacaatttccattttaaccattttcttttcttttttttttttttgaggcggagtcttcctctgttgccaggctggagtgtagtggcacagtctcggctcactgcaacctccacctcccaggttcaagcaattcccctgcctcagccccccaagtagctgggactacaggagggtgccaccgcgcctggctaacttatgtatttttagtagagacagagtttcaccatgttggccaggctggtctcaatctcctgacttcgtgatccacccaccttagcctcccaaagtgctgagattgaggcagaaatttaaaaataaatatgcattcattcactccaagaaaagtaacaggcaaggcaagggttaaaaagaaaagaacaagttttcctcggcctagcaagctcacttcaaggacagttataagataatgctgtttgagaagccaaggccaaaggaatgggctgcagacatccctcccctccagaacaaggttgaaggaaaaaaaaaaagagaaagacaaattcctttactgttacttctttccctggcttcttaagcatgattatgttttacaaatgtctgtatttagccagttcttgattttcttttgacacagctccaaggccaccagctatgcaaggccacaagttatgcactatatgattaactgcttttgttttacttttgtaagtccacttataaaaaccctgctctgtctttgtttaatgctc

SEQ ID NO: 7972 - DNA, 2300 bp, Homo sapien
caacttctttaaacagcagtgacttaaaagtaattctaattgccgggcgcggtggctcacgcctgtaatcccagcactttgggaggccgaggcgggcagatcacaaggtcaggagatcaagatcatcctggctaacacagtgaaacgccatctctgctaaaaaatacaaaaaaaaaaaaaaaaaaaaaaaaaaaaaaaaaaaaaaagccaggtgtggtggcaggcgcctgtagtcccagctactcgggaggctgaggcaggagaatggcgtgaacccgggagcagaagttgcagtgagctgagatcacgccattacactccagtctgggagacagagcgagactctgtcttaaaaaaataataataataaataattctaatttaaattctttctggccaggcaatcaacacaggaaagagaaaaggtcttgattttctactagtttgtgtcttgtgaaagaattttttttttttttagacgaagtctcactctgttgctcaaactggagtgcagtggcactgtcttggctcactgcaacctccacctcccgggttcaagggattctcttgcctcagcctcccgagtagctgggactacatgtgcgcaccaccatgcccagctaatttttgtatttctagtagagacggggtttcactatgttggccaggctggtcttgaactcctgacctcgttatccgcctgcctcggactcccaaagtgctgcacctacaatgggccaccccaggggacaagctgttgggactggaatgcggtggcaagagccgtgcactctggctgctgaaacctgctgtttccactgtaagctaccacttagtgaatattttctacgtattgggaactgtactaagtggctttcatgttttgttttttgtttgtttgactggtttgttgttgttgttgttgttgttgttgttgtttttgagacggagtttcgctcttgttgcccaggctggagtacaatggcgcgatctaggctcaccacaacctctgcctcccgggttcaagcgattctcctgcatcatcctcccgagtagctgggatgacaggcatgcgccaccatgcccggctaattttgtatttttagtagagacgggggtttctcatgttggtcaggctagtctcgaactcccgacctccggtgatccgcccgcctcggcctcccaaagtgctgggattataggcgtgagccaccgcgcccagccgcgcccggtttttgttgttgtttttgtttctaaaaacagcgtctcgctctgtggcccaggcaggggtgcagtggcgcgatctcagctcactgcagcctggaactcctggggtcaagcggtcttcccacctaagcctctccgtgctgggactccggacgcgctccacctcacgcagccgtattcctgctttcaaagcagatggaagaggtgcgccaggacccccagttcttggaaacagacctctccagttacctgttgtttcctcttcacgaagagtgcatgtaacagtaagacacaactgtttcatattatacgtaaagagttcatgccaaaggttatagacagtcacatgctaaaactaggctacactttgaagaatcaccgctcaagttctggaaaaaagaggtgactgttgaacaacactgtgagggtaatcgatgccactgaaatatacacttaaattgattaaagtggcgaattttatctggcatatattaccaccatttttagaaatgttttttggcaggtgaagaaaagcaaggctccaggaggccctgcgcaccggtctacgcccactaactcacccgccccctgcgccgcgtctcccctctcaatttcagtcgcccattgataaaaacgaggtggctatgtgagatggccttcagcggtctttccagctccacggttttacagtgtggagcggggaaagaaaaactctaaggtcctcgctgcaaagcaaccatcagagctccgccgcgccgtgccgctcctctccgccccgtggtccgggtgtcaccgcccgcaggggcgcaagggccgcagcacgcgtgcgcagtgggcaccaagagcgctgcgtcgaccgcgccgcgccggccctccgccgccgcgcccgcctacaaggccctgagggagactgcggagggtgagtgcgcggtgggctcggctgaccgttggccctgcggccggcgccctaggctacctcccttcgcctccccgcgcctccccgcgcctccccgcctccccgcctccccgcctcctcggctctggttccaacaccccagcgccaagccggggag

SEQ ID NO: 7973 - DNA, 2300 bp, Homo sapien
atcagaacatcataaccgagttgggagacttctgagctccagatgagtggtctctatgtcctatgcatcctttggcaagggactccatgtattagtctttctctctttgtttttttttttttttttttttttttttgagacagtgtttcgctcttgttgcccaggctggagtgcaatggcgtgatctcggctcaccgcaacctccgcctcccgggttcaagcaattctcctgcctcagcctcccgagtagctaggattacaggcatgcgccaccacgccaggctaattgtgcatttttagtagagacggggtttctccatgttggtcaggctggtctcgaattcccgacgtcaggtgatccgtccgcctcggcctccaaaatgctgggattacaggcgtgagccattgccaccggtgtattactctttctctattgcaattcccctgtcttgataaataggctctgtctaagcagcaggcacggtgatcccattgggcagttacaacagggttgtatgtaactgggttacagggttgtaacagggttgctgctgtaatggcccaatgggttcaccttgcctgttgcctagacagagctgatttatcaagatggaaattgtaacagaaaaacagtaattcacgcagagctgctgtgcaggagactagagtttgttgttgttgttttgagacggagtctctctctgtcgcccaggctggagtgccaaggcgcgacctcggctcactgcaagctccgcctctcgggttcacgccattctcccgcttcaacctcccgagtagctgggactacaggcacctgccaccacgcccggctaattttgtttttgtatttttagtcgagacggggtttcaccgtgttagccaggctggtctcgatctcctgtcctcgtgatctgcccgcctcggcctcccaaagtgctgggattacaagcatgagccactgcacccggcctagagttttatttttactcaaatcagtttcccagagcattcagggatcaaagtttttttgttttttgttttttgttgttttttttttttttttgagacggggtctcgctctgtcgcccaggctggagtgcagtggcgctatctcggctcactgcaagctctgcctcccgggttcacgccattctcctgcctcagcctccccagtagctgggaccacaggcgcctgccaccacacccggctaatttttttgtatttttagtagagacggggtttcaccatgttagccagaatggtcttgatctcctgacctcgtgatccgcccgcctcggcctcccaaagtgctgggattacaggcgtgagccaccgcgcccagccagggatccaagtttttaaggataatttggcaggttggggaaggccagtgagtcaagagtgctgattggttgggtgggagatgaagtcacagggagttgaagctgtcctcttgcgctgagtcagttcctgggttggtggggagggggcacaagatcacatagccagtttatccatctggtggtgccagctgatccatcaagtgcagggtctgcaacatatctcaagcaccgatcttaggtgcagtttagggagggtcagaatcttgtagcttgcagctgtaatttctaatctaaaccataatttctaatcttgtggctgatttgttagtcctacaaaggcagtccagtccccaggcaagaaggaagtttgttttgggaaaaggctgtcatcatctttgttttaaacttcaaactgtaaactaagttcctcccaaagttagttcagcctatatccagcaatgaacaaggacagtttggaggttagaaacaacatggatttgggtaggtcagatcgctttcagtgtctcagttataattttgcagtggtggtttcactgtgacaatcctgagggacttcccacagaaccctcagttattgaagcccaaagcctcagaaatggcgaggaagaaggggaagggtgttgcgcggtcaaactccacacgttcttagccgacctccgccgcttttcctagaatgtctcatctctatggtcgacggcgttcagattccggggcagactaagttgttcttccggggtgactgcctcttccagggcgggcggtgtggtgcacgcattgctgtgctccaactccctcagggcctgtgttgccgcactctgctgctatgagcttcctcaaaagtttcccgccgcctgggccagcggaggggctcctgcggcagcagccagacactgaggctgtgctgaacgggaagggcctcggcactggtacccttt

SEQ ID NO: 7974 - DNA, 2300 bp, Homo sapien
ggacaacagcacagccagtgcaagcctagcctccaatgggacaagtggtgggcaggaggcaggagcaccagaagaggaggaagatgagcttttgagagtgactgaccttgttgattatgtctgtaacagtgaacagttataagactttttttccatttttgtgctaatttattccacggtagctctcacaccagcgggccagttattaaaagctgtttaatttttcctagaaaactccactacagaatgacttttagaagaaaaatttcaacaaatcctgaagtctttctgtgaagtgaccagttctgaactttgaagataaataattgctgtaaattccttttgattttctttttccaggttcatggtccttggtaatttcattcatggaaaaaaatcttattataataacaacaaagatttgtatatttttgactttatatttcctgagctctcctgactttgtgaaaaagggtggatgaaaatgcattccgaatctgtgagggcccaaaacagaatttaggggtgggtgaaagcacttgtgctttagctttttcatattaaatatatattatatttaaacattcatggcatagatgatgatttacagacaatttaaaagttcaagtctgtactgttacagtttgagaattgtagataacatcatacataagtcatttagtaacagcctttgtgaaatgaacttgtttactattggagataaccacacttaataaagaagagacagtgaaagtaccatcataattaacctaaatttttgttatagcagagtttcttgtttaaaaaaaaataaaatcatctgaaaagcatttgtacagtaaaatgtataatgaagctttgccaaccagactgtgctagcaacaaatttttttaaataagctttatgcagtggtaataaggtggcctcaaatatattgtgtctgatggagagttattagtgaaatgaatgtggtctttcttaaggcctgggtggactgtaaactttgccaatagtataactcttgtcttctggccacttgatgtttaaatatctgaaatatcattttgaaaaaaatacatctatatataacatacatgaagagatgctaagctgacagtgatattttagcacatttgaagactgggaagagattttcaggtgaattttaactggtctattcttgcccttagtatctacttcaaattgaagtctacaaacaaagcagttcctttgggaggtttttagtttgagttttagcgtgtgtgtgtgtttgtgtgtgtgcgtgtgcgtgtgtgtgtgtgttggaatttcctatctgcctggatatattagcagagtttgaatgtagttttggcctttggccattagacttctattaaaattcattaatagtcatacaaccaacatagagttgaatgagaactgccgatgtaattaataggcatgacatccatttcaaacatctcaacactttaaagaaaagccctttgtttcaagaaaaaagggtttgtaactaactaaatacctaacatgtaattgacactaaaatatgaactttgtcttatttagtttctgttatagctgtaaaatttcaggcagagccataacattgtacagagtgtagcacttgtgattaaacctagcctgttaaatcctgaaaccttcaaccattacttctgtgaatactttagccctgggatttgggtttttctgttccggtgttgtgtctgttgccggcaatggacacaccatatctgctgctggcccaaggaacgtcattaatttttctttccaaattaagtattatgtgctagtcagtgtatagtaaagcacttctcttttttattactaaaaagctggcattagatttgcattataaatacctctctaggaactttatactccttttccttcttcaacaggtattgcccttaaatcttatcttttggccttgaaagtttatagctattgtttttcagttgttcgttgttttgttttgtttcactttagttctgtagtacctgcccattaatatttttgctttgattctagcaatgtgtatgtatctgtataaaaaataaaataatgaaagcaacctaaaaataggatgcaccaatagcatgtggttccaagtaagttgtgatttttattttgagacagtgttccactggaagggagggaagggcttacattcacagacagtaaagcagggctgtgtaaggagctacatttacttaacagtctcctttccagctaggtttgttttatttatttgcaagtcagctaagaattaaccttt

SEQ ID NO: 7975 - DNA, 2300 bp, Homo sapien
tgacaaagtatctttcttcctctgtctgagataccttttcagactttatactcttacttatactctatactcttgtcatcttttaacttttttaagaaattaaaagtagtataggaatatattctccttgtaaactattcaaataatatccaacctgtagaattatagaatgagaattccccattgccactattaacagtttggggataattgccactattaacagtgtggggtatagtatctttgcagtcttttttttttttttttttttttttttttgtgagacagtcttgctctgtcgccaggctggagtgcaatggcactatctcggctcactgcaacctctgcctccctggttcaagcgattctcttgcctcagtctcccaagtagctgggactacaggagcgtgccaccacacccagctaatttttgtatttttaatagaggtgggttttcgccatgttggccaggatgatctcgatctcttgacctggtgatccgtccacctcggcctcccaaagtgctgggattacaggcgtgagccaccgtgcctggccctccagtcctttttcatgcatttatgtggatgttcataaatatttacttatttaaaaaagaaattggatcaaatatgttcatttttctgtgagtttttcacttaaagtgtctctgaactcttcatgtccgtagatatagtatcccttttgcttgttaatggccacacagtactccatagtgtggatatacctcagtttatttaaccactcacttactgattgacatttaggttgtttccaatttttcactattacaggcaatgctgcattgaagatccttttggacatgagtgagtatttctttagaatagactcctagaattggaattgctgggtcaagggacatgtatattttaagttttgatagctacttccacattgccctccaaaaaggctccattaatatagcatcttattaccagtgtatgacagtgcctgttttccccattttactcattaatgttggtattactcatcataactatgaccctgttattttaagcaaaatattttacaagtcttttgctagtctatgggaatttatcataatcaaaagtgctacttttctttttaatgtatttaaacgatcagatcattcttcattgtaagtgatcctgtgttccctgagatactgaatttttaatgttttcttcttttgttgttagacttattttgttctttgctgacgacctatagtgtaggaataaactaaaacacaagttaaaagagtataaaactacgcaataaaaagctgttagtcacattataaatttgctctctgaatgtatatatttttacatttgtcaggatttttatatgcagttctggcttatttaaaatttaaaatttatctctaatacaggattttaaatttttacatgaaaatatgtgagaatatagtcatcattctcttacaaagcatttaaaatgtgcatgacctttgacccagaatcctcttcaaggaatttatcctaaccacagagatgtgtgtaaaaatatttgtaaagatacagtacattgttgacgaaagtgaaaaacatgggaaacaactacctaaatgtctagtagaggattagataaaaacagttatgtaatggcatttatagtaatgttaggagaatgtgactaggaaaaatataagaccaaatgttcattataattcggttttaagaaaaaagtaaacaaaaatgtagaaaaaatagtggaaatatataccaaaatttaaccatagctatatctgatgatgagactataataattttctcctctttttttggtatattggctgaatattattatacaatggacatgtaatcaggagatttttaaaagacattcttatatcaaattatcccaattttttttattttatacaaggtaaaacccaaaggcaaagttcgatggactggttctcggacacgtggcagatggaaatattccagcaatgatgaaagtgaagggtctggcagtgaaaaatcatctgcagcttcagaagaggaggaagaaaaggaaagtgaagaagccatcctagcagatgatgatgaaccatgcaaaaaatgtggccttccaaaccatcctgagctagtatgtacctgatgtaaatgaagaatactcatattacagacatggtgaggttgcctggagcagcctaactcttctgggttttatcattatttgaatttcttaatgataacttgtatgctacagagtaacctttatttctgtttctcatataacctaat

SEQ ID NO: 7976 - DNA, 2300 bp, Homo sapien
tcatctctgtttttttcttaccttatttatgctgtaggacttttatattttgaatttttgaaatttttttttactctcatctcttgaaatattttagcagcattccctatggcactgactttgtaaagaaggaagaaatactgattacagttgcttaactctcagacactgaatggttctaaatggttcttggcttttttatttgcaacatcattgtacataaaagaaatggtggttaaattttcatttcaaaaaacatatcctgctttatcttctcacttttttccatcccattattcccatgaagtatatcctaactggtttatcaacttgacgagaatcatttcaaaattttaggaaaaaaatttatgtctcagtaaaactttgtttagaattaggtttttcagtagcaaggataaggtgaagggattaaaaatgtacgtaaaattagtagtcaatgaattctggaatgcagtctgtataatcctattcagagattatgctatttactgaatatagctttggttgtgtttaaatctgcactagtattaggtgctccttaaaagttgaaaatatatagccaataaggtataaagaagaattgacagataaatctaaacagtttctttgtatagtactaacttctgaaatgttcagtggtggcatttgataaagtaagttgtaatatgatcacattgaggaatgttatataattattaaactcaatttttataaaaggcatcattttataaaagtatcataagaaagtgccaatgtttcaatgaataaattgaggcaacatgataccaacttagtgaaaaatatacaagaccagaaggaagtaacctaaaatattactagtgattgcctctgggtaataggatatgggctttttgtctttctatatttttcattttcccactgccgtgttcctggtacctcagtgaaatgaagtgctcagttcttttaacagttgtcagtttttaaaacaaatatagtcttctggaaatgttttaggtagcattttcaattttatgtttttaagccatctcttgaatttgaataaattatttgaactgcataaatatttgcaatccattgagaacaccaaaacaaaaagtaaaaagcagaaacctaaatttttctaaattttttttaatatctagaagttgtatctcaaagtttttgtaattttcttcattgtcagattttattttttactgtcaaatatccaatgacagaggccacctcttttaaaatagaaactttaaatggaaatatacattatactaagtcttatattttatagccttgaaagtttctattcatgtaattaagctttttctgatttttagaggaacagaaagaaagtgaaaagatgaaaagtgaggagcagcctatggatttagaaaaccgttctacagccaatgttctagaagagactactgtgaaaaaagaaaaagaagatgaaaaggaacttgtgaaactgccagtcatagtgaagctagaaaaacctttgccagaaaatgaagaaaaaaagattatcaaagaagaaagtgattccttcaaggaaaatgtcaaacccattaaagttgaggtgaaggaatgtagagcagatcctaaagataccaaaagtagcatggagaagccagtggcacaggagcctgaaaggatcgaatttggtggcaatattaaatcttctcacgaaattactgagaaatctactgaagaaactgagaaacttaaaaatgaccagcaggccaagataccactaaaaaaacgagaaattaaactgagtgatgattttgacagtccagtcaagggacctttgtgtaaatcagttactccaacaaaagagtttttgaaagatgaaataaaacaagaggaagagacttgtaaaaggatctctacaatcactgctttgggtcatgaagggaaacagctggtaaatggagaagttagtgatgaaagggtagctccaaattttaagacagaaccaatagagacaaagttttatgagacaaaggaagagagctatagcccctctaaggacagaaatatcatcacggagggaaatggaacagagtccttaaattctgtcataacaagtatgaaaacaggtgagcttgagaaagaaacagcccctttgaggaaagatgcagatagttcaatatcagtcttagagatccatagtcaaaaagcacaaatagaggaacccgatcctccagaaatggaaacttctcttgattcttctgagatggcaaaagatctctcttcaaaaactgctttatcttccaccg

SEQ ID NO: 7977 - DNA, 2300 bp, Homo sapien
aggctgggtgcagtggctcacgcttgtaatcccaacagtttgggaggccaaggcaggcagatcacttgaggtcaggagttcgagactagcctgaccaacatggtgaaacctcatctctactaaaattacaaaagaaattagccaggcgtggtgatgggtgcctgtaatcccagctactcgggagtctgaggcaggaaaatcgcttgaacccaggaggaggaggttgcagtgagccaagatcctgccattgcactccagcctgggtgacaagagtgaaactccatctcaaaaaaaaaaaaaaaaaaaagtagtggaagtaattgaaatagattttcctagcaatattagctctcttacgttttgaagctttttaaaattgttatggtgcataacttcagtatactcttcagttcccaccatgactttcagaaataaatagatcgagccattcgttgcatatggaattctctttttcctttttttaacatatggaattctcaatggaatatgagtagtaataaagcatagatccttaagttagaagcaggttgtaatgaaattaggggactggatctttgccaaaaataaataaagtctctgagtcttaattttccttcctgtaaaatggaggcaggaccagacaagactttgagaaaacatctagtcttaccttttgatattagataattaaaattctagactggttattatatatgctcatatgatatgtatgaacatgtatgttttattctcatgtataattgattgtcattttaatttctgatttttatcagtggcaattttactgctttatttagaagaccaatttagtaatactcaagagaatctgttcttttattttataaataagaaagctgaggcctaatgaggatatacaacttgtccaggggctctttggaatgcagagttcctactctaaagcagtagaatctagctggcatggaattggaaagggaaaggagggtaggagccatatgtgacatgacagataagaaaacgagtcatttcatcttaacagttttcactttgaatcaggggtatttacatcgcacattgagaacacagatgggaggatcttggtgctaattaataatctagtggcatatctagaactcagtttcccaactcttagtccagggcctgctttttatcttcagcattatgcactgtctgacagcatttcttgcttgtctgagcaagaaaaatatccaagtgagttttctcagttgtaagtggcatttaaattaaccataccacacctttgtttttgctagtaaaaatataggattttatttgccagatacagggatatacaactgtagtcctagctacttgggaggctgaggtaggagggtcttgagcctgggaatttgaggttaccgtgagccgtgatcaggtcactgcattccagcctggatgacaaagtgagaccatgtctcttttttaagtagaatttataggttagacttttatttatttggaattttctggtattgtggaatcagttataaaccattattaacaaaataaaatcagctaccaaaattttttatgtttttaaattgtgttattggaactgatgttttgctgtaatcagaaagttctggatcttaattttgtagcagtgtcaaatgctattatctctgaaggtagaaaagaattatttccaaatgaatcaagaacaaaacaaaaaaatacttttgcaatcaagttttacattgatttcatctccttagagattacatactatttttaaagttatcaaacgttgatttttgtgtaattttgttcctacttttcttttcaacccaagagatattcattgtcattccaatcagtagagaggaaaatctaatattcttctctgaagaacagtatattttaatgtgtttttcttagtgcttttaaaattcagggttaattagggctagctgtaccagtgtttttgatgttcttaatgtatttttctttttttattttaatttctattggtattattcagaaagttctctagaacaggaaaaaggtttttatgctgtcttatttttttccttgtttagaaatcgaaacgagttggctgagactcttgcactcctgaaagcacaaattgatcctgtactattgaaaaactctagccaacaagacaactcttctcgggaaagtcccagcttagaggatgaggagactaaaaaagaggaagaaacacctaaacaaggtttttttttgtgtgttttgttttgctttgttttgtaatctcttccatattcttccactcctct

SEQ ID NO: 7978 - DNA, 2300 bp, Homo sapien
acagattctttataggtaatattctgaagaacttcatacttggcgcttcctagcaatgcaaataaattcagttaacagaaacttcttcatttacatagagaatagaagagcgaccctgctttcttggaaaggaaacagctatctgtcttgtacaataaccaatccactttggccagctaatatggacaaaaaaagagacctatttggaaaacgtttcttctccagccaagggctgtttccagataaaggcaatgctcagagtataacaaaaaagccttctctgaggaaagaaaagtgccagaaaaggagaggcagggatcgggaataaatgggggtgagtataagcactcagtgtgaaggctggaggcagcaggcgcagcgctgagatgctccagcaaaagaaccagcagcagcagcaggaagtttcaatggggccgggcagagcatgcgccctgcacccgcgcggtggccttatgtggaaggagcaccacttgcgaacaccaataatagaccagcggcaccagagagagaaacatgagcaacaagcaccttcttcaactgtttccccctccgtcagagcccctcctccagcttacatactaaccaccccaccctaccgtgcaaatgggagggagacgacttcttcgcctaagcccggctgccaagatgaagggggaagggattggaaaagtggggagatgctcgcctattattttgggggaggtggggagaggaaggagaactatggaggaggaattaaccctctcctctccacagtggagctgaaccgacttcgcccccctaccgagaatggagaagaaccccctcccgtgggggaggagcagacctccccacttcaaggaaggagttttaggggttaaagcagccctcgaggggaagggaaaagggacaaatctctcaggggagttcccaacagagggagggagagttgagtgtccgctggcccccgcccacccaggtgaagggagataaggaggtgtccggagcagccgagcccagccttccccgagatggtcgggaagactggtgggaggaggggagggagtaagggtggggaggaggagaaaagcgcaaagctggccggaacctgcgctccccttcccccgccgccaagggggagacggggtggggggccgccctccgccgcggagaagcagtccccggggctgccgaccggcacaatgacccctccccgcctccagcccacacctagcccgcaacgcctccacctcagctccccgcccggccgagtggccctagggggcctccgccccgcctccccactgcccaagaccccgggggctgggcggagaagaccagcccggcggagttgcgtcccagggggaagacagagccgcggaggcccgagccgcgaagaaccggggcgcctgtgaagagcggagagtagcagagcgccagggccgcttcccgccgggcgttcgggcccctcgcttaccttctccgttgccgacgtccggcggcggcgcctgcagcacccgctccagctcagggaacggcaactcaggcaggtctagcagcggcccgtagcgctccaagaaggagcagactacggcgaagttggggcacgaacccgggcagcccggaggagccatcaccgccgccgctgccgccgccgtcgccattttgaactggaggatggaggaggaggcgatgggggggcgggggaagttgtggtgccgagggatggcaaggcaaccttacagacgacaggaggcgctctcaagtgggctcctctgcggatcccagcgtctcagggacggctccgcgatcccacaatacatcggcggcccggagcagtcgagaaccgagtcagacgggagacagagcggccctcggcgcctttcactttccgccctctttccgcccccttctctcctccccttcgggcttgccactgcctcgtgtgacagggggaatgaaaacaagggaagcggggcggggaggcgggctggaagcgggaggggcgggacttctcgagaacaatggccaatggacgcagagggggcggggcctcgggcgctgttcaactgcagggcgtattcccggagggcagttggggagcgcagatcccgaagcagcgctgggagcgtaagtgcgggcagagcactgcgccgtttgggaacgcaactttgaggagacagtgcggtgggtgagtttgcgggggaatcctgaaactgggccacgagatggtggagaggttgaggagaattaataaacagaaaaagggaatagggcgggggaaagcacagttgtgggag

SEQ ID NO: 7979 - DNA, 2300 bp, Homo sapien
tgctgggattacaggcgtgagccacagcgcccggcggattttaatttcttaaaagcttttttattgtcgtaaaatacatgtaacataaaatatgccattttaaccactttaagtgtatacttcagtggcattaagtacatttacagtgttctttagactttgatttcttacatcagtatttcttacagtgaaattttcaaaagtatttgccaagtttcaaaagaacttttttcctttaaaaacggtttgtataccactcaagactatgaatcactattcaaggcaataaattcttcttacaatatagaatttttctcttgataaattgagtattctttctttagataatgggaataatacacacccttatggtttttcccctttttaaaacctggaaatgaagaaaaaaattcggtgtttgtgtgaccattttccctgttactcatataattatttgcccatctatttcttatctttctataattacagatttctcttttttacatggtttgtgttgtaccttgcttcaaattctttttttttttttttttttttgaggtggagtcttgctctgtcgctcaggctggagtgcagtggcgcgacctcgactcactgcaaccttcgcctccccggttcaaggggttctcctgcatcagcctcccaaggattcccggctaattttcgttatttttactagagacggggtttcaccatgttgcccaggctggtctggaactgcagagctcaggtgatgcacccacctcggtttcccaaagtgttgggattacaggcatgagccaccgcgcccggccaaattctttttaggaattaggtactacattgagttttaaatgcactcagaaaattctcaaagtaataaattatagactaaataaatatagcggaattcagtctaaattataggaactccttttttgataactaatatttttaaagtactcactatgtgctacggcactgtgctaatcactttactgtgatttatctagtaataccgtatgatgtaggtactattatcaccccactctaaggagttcaaagaaataaagaaacctccacagtgtcatgaagtagccccgctaggactcaggcctggctgaatccaaagctcaggcttctaagcataacgtgtactgctgcttctcaggctgcacattctattttacattattggtagtttctctctggcgttctttgtgggaatgttcactgcccccgccccgccccgaagtggaaccctgtcttctaacaaacttttcgctgctccaccgtctcctgtcatgttccgcctctcaatggagtcccagcccacactccgattctggtccctgaacagagccccttcccctcacaccatggccccctagcagagcctggtctcctcagatcctcttctcccagcagggccccaactcctcactccgacgattcccccagagttccgttccctcagatcctgcttttccagcaaagctgcgattcctgtaccccagcagagagcaataccccgtcggcaaacttccacagagacatcttaccgaggtcccagcccagcccctaattaagggcacacctctacctttccccttcccaaccttctcccacaactgtgctttcccccgccctattccctttttctgtttattaattctcctcaacctctccaccatctcgtggcccagtttcaggattcccccgcaaactcacccaccgcactgtctcctcaaagttgcgttcccaaacggcgcagtgctctgcccgcacttacgctcccagcgctgcttcgggatctgcgctccccaactgccctccgggaatacgccctgcagttgaacagcgcccgaggccccgccccctctgcgtccattggccattgttctcgagaagtcccgcccctcccgcttccagcccgcctccccgccccgcttcccttgttttcattccccctgtcacacgaggcagtggcaagcccgaaggggaggagagaagggggcggaaagagggcggaaagtgaaaggcgccgagggccgctctgtctcccgtctgactcggttctcgactgctccgggccgccgatgtattgtgggatcgcggagccgtccctgagacgctgggatccgcagaggagcccacttgagagcgcctcctgtcgtctgtaaggttgccttgccatccctcggcaccacaacttcccccgcccccccatcgcctcctcctccatcctccagttcaaaatggcgacggcggcggcagcggcggcggtgatggctcctccgggc

SEQ ID NO: 7980 - DNA, 2300 bp, Homo sapien
ctggccatgatatcctcttcaagggggagaaacctggcctcctgagggaagtataaattataacaccatcttacacctagacctcttttgtagaaaagaaggaagagtgaagtgccatatgtacaaactttcttttcattaagagacaactcgcaattatgtaaaaagtgtgatttatgccctacaggaagccctcgagtctacctccctactccggtgtccccccaactgcttccccaactaataaggacaccccttcaacctaaacgatccaaaaggagatagacaaaggggtaaacaatgaaccaaagagtgccaatattccccaattatgccctctccaagtggtgggaggaggagaatttggcccagccagagtacacgtacctttttctctctcagacttgaagcaaattaaaatagacctaggtaaattctcagataaccctgatggctatattgatgttttacaagggttaggacaatcctctgatctgacatggagatataatgttactgctaaatcagacactaacgccaaatgagagaagtgccatcataactgcagcccgagagtttggcgatctctggtatctcaggtcaatgataggatgacaacagaggaatgagaacgattccccacaggccagcaggcagttcccagtgtagaccctcactgggacacagaatcagaacatacagattggtgccgcaaacatttgctaccttgcgtgctagaaggactaaggaaaactaggaagaagcttatgaattattcaattatgtccactataacacagggaaaggaagaaaatcctaccgcctttctggagagactaagggaggcattgagaaagcacacctctctgtcacctgactgtactgaaggccgactaatcttaaaggataggtttatcactcagtcagctgcagacattagaaaaaacttcaaaaaacttagaaaccctgttgaacttggcaaccttggttttttgtaatagagatcaggaggagcaggcagaacgggacaaatgggataaaaaaaaggccaccgctttagtcatggccttcaggcaagcggactttggaggctctggaacacggaaaggctagggaaattgaatgcctaatagggcttgcttccagtgcggtctacaaggacactttaaaaaagattgtccacatagaaataagccgccccctcgtccatgcccgttatgtcaagggaatcactggaaggcccactgccccaggggacgaaggtcctctgagtcagaagccattaaccaaatgatccagcagcaggactgagggtgcccagggcaagtgccagctcatgccatcaccctcacagagccccgggtatacttgaccattgagggccaggaggttaactgtctcttggacactggcgcggccttctcagtcttactctcctgtcctggacaactgtcctccagatctgtcactatccaaggggtcctaggacagccagtcactacatacttctctctcagccactaagttgtgactggggaactttactcttttcacatgcttttctaattatgcctgaaagccccactcccttgttagggagagacattctagcaaaagcaggggccattatacacctgaacataggagaaagaacacccatttgttgtcccctgcttgaggaaggaattaatcctgaagtctgggcaacagaaggacaatatggacgagcaaaaaatgcccatactgttcaaattaaattaaaggattctgcctcctttccgtaccaaaggcaatacccgcttagacccaaggcccaacaaggactcaagaaaattgttaagaacctaaaagcccacggcctagtaaaaccatgcaatagcccctgcaatactccaattttaggggtatagaaacccaacagacagtgaacgttagtgcaagatctcaggattatcagtgaggctgttgtccctttatacccagctgtacctaaccgttgtactctgctttcccaaataccagaggaagtagagtggtttacagtcctggaccttaaggatgcctttttctgcatccctgtacatcctgactctcaattcttgtttgcctttgaagatccttcaaacccaatgtctcaattcacctggactgttttaccccaagggttcagggacagcccccatctatttggccaggcattagcccaagacttgagccagttctcacacctggacactcttgtccttcagtacatggatgatttacttttagctgccctttcagaaaccttgtgccatcaa

SEQ ID NO: 7981 - DNA, 2300 bp, Homo sapien
gtagattaccagagaaccttcacttaccctgtaatattttaatttttctaacaattatatataaactaaaaaaaatcttttttaaaaaacagtatagatgccatcacaagcacctttgttttttcagctataactggcacatagtagggattaaacatttgttaaatgaatatatgaatatcttttttttttttatataaagatggagtcttgctctgttgcccaggctggagtgcagtggtgtgatttcggcccactgcaacctccacctcccaggttctaaagattctcctgcctcagcctcccgagtagctgggactactggtgcatgccaccatgcccggctaattttatgtatttttagtagagacagggtttcaccatgttagccaggatgctcttgatctcctgacctcgtgatctgcccaccttggcctcccaaagtgctgggattacaggtgtgagccaccacacccggccacatatgaatatctttaagattaaatgattctttgactttatgaggtcactatcaagatacgtgaagaaataaaatattttatttttcaggatgttatttctgacctagtatgtttctgtgtttaagcattcatatttatatctctatggcacttttttttttttgacacaggagctggactgagcatcaaacatgtctgtgagctggcaatgagtcacctaagtacttttttgtatcaaatctatgatgccatcattcttaagatgcacctttattttatgaaatagtaagaaacaaaaaacactatgggacaccatcaaaatatctgatttcagagaagttacaataataaaaaatgtgtatcttggaatcaatgaaatgtggcaattccagttatctgaaagtcttacagatataattacactgagctcttattacgtatcaagtaccatgctaagtgtttttacatgtattatctcatttattcttcatagaaatgccatgaggtagatgctgtcttcattttcattttgtacagggaaacaaggtacagaaaggttcataaccaaacaactagtaagtagaaaagacaagatttgaacaaagtagtctgacttcccagtacatcctcttaatttatccttattgcctgagaaaaagcttattagtcccttcagaacagaaaaagtggtccctggcactaaattcttaaggaaatctatcaagtaggaggatacagagtgtccttattgccagataaagtccagtgttgtgctatatgtaatggagagtcaccagagggtttttagcaagggagagacacaattggatttccaagggtctaatctgatccaacaacagaatttgtaatatctgaaaaaaatgaatagatcacacattccttagctagtctttcctaaatttcatttcacttatcattaactttcgtgtgatgtctgaatgcatttgaagtatctttgaaaggaacatgccacatattttggccaaccccacatcttaccctcgtgtagttcgtgctgttactataagttgcaaagctttggcctgcagcctcatgtgatgtataatcaccacctgcttattctccacaccactgtacatgaattccattttgtaggtctcttccataatctataaaggaaagataattaacaatcaataaaaatatcatagtcttacttgagagcagcatagaattctactgttaaatgaccttaggtgaaactcttaactgagattttacatccttatgcttttaagtgttgaaagaaattagtatagtatgccttgtaaaaagagaataaattattttgcctacttaaaaagaagactgacctggtaataaaatcatcttagttgatgatgtgaagataagaaagtttaatcactaagcaaactgcaaagcactgaaagcactgcttcttaccctaaatgaagcccactctgctgtgggaacaaattaatatatattatgtatggaaacccaatccccacaaagtcctcaagaattaagcatcaggaactattaaccatatgttagttatcctgacagactgttccatgggcctggtctgagggagtttgggacagaaataagtgcaagaaaacatttgtctatgaccccagatcaagtccccgatcttgctcggttctatccaaataagcgattttcatcaaaatgatgcttctcttttccttctgtgcttgcctcccagtgaacactctagggtcacggaaatgactccagactctcttacaattggcaataagacaagttaaattacatgagtgtctcaat

SEQ ID NO: 7982 - DNA, 2300 bp, Homo sapien
catagaaatgccatgaggtagatgctgtcttcattttcattttgtacagggaaacaaggtacagaaaggttcataaccaaacaactagtaagtagaaaagacaagatttgaacaaagtagtctgacttcccagtacatcctcttaatttatccttattgcctgagaaaaagcttattagtcccttcagaacagaaaaagtggtccctggcactaaattcttaaggaaatctatcaagtaggaggatacagagtgtccttattgccagataaagtccagtgttgtgctatatgtaatggagagtcaccagagggtttttagcaagggagagacacaattggatttccaagggtctaatctgatccaacaacagaatttgtaatatctgaaaaaaatgaatagatcacacattccttagctagtctttcctaaatttcatttcacttatcattaactttcgtgtgatgtctgaatgcatttgaagtatctttgaaaggaacatgccacatattttggccaaccccacatcttaccctcgtgtagttcgtgctgttactataagttgcaaagctttggcctgcagcctcatgtgatgtataatcaccacctgcttattctccacaccactgtacatgaattccattttgtaggtctcttccataatctataaaggaaagataattaacaatcaataaaaatatcatagtcttacttgagagcagcatagaattctactgttaaatgaccttaggtgaaactcttaactgagattttacatccttatgcttttaagtgttgaaagaaattagtatagtatgccttgtaaaaagagaataaattattttgcctacttaaaaagaagactgacctggtaataaaatcatcttagttgatgatgtgaagataagaaagtttaatcactaagcaaactgcaaagcactgaaagcactgcttcttaccctaaatgaagcccactctgctgtgggaacaaattaatatatattatgtatggaaacccaatccccacaaagtcctcaagaattaagcatcaggaactattaaccatatgttagttatcctgacagactgttccatgggcctggtctgagggagtttgggacagaaataagtgcaagaaaacatttgtctatgaccccagatcaagtccccgatcttgctcggttctatccaaataagcgattttcatcaaaatgatgcttctcttttccttctgtgcttgcctcccagtgaacactctagggtcacggaaatgactccagactctcttacaattggcaataagacaagttaaattacatgagtgtctcaatccctttctgtaaacagggaagaaacagtaccaatatcatgaagtttcaagtatcaaatggagcatgcaatgtgtttatcacagtatctggtatacagcaatggtaattcctttcctcttttccttccaaattattgctccctggtcccatccttccaatgtggctcaattatcgggttctagtcattaaattctactcttctacaataagccacataccaggtctgagaaagagtctggatcagacaagagttcagcactgtagtagaaaacagattctgggtatcagaggatctggtctcaagtcctgactgtattacctatagctctatgaatttaaccttgctgagccttaactgcctcatctctaaaacagacttaatacttattcctatctaatgggattattatgagggttaattaagctaatagacttgaaatcatttagtgaactgtaatgtaacaataacagtcaccatcattagcttcctcctgggtcatttacagactccctatctggaagacttgacctgcaagagatcaccaagtctcaatactcaggtgcaaaggggaatgactcaaagctaaaaagaaataaactagagacaaataaaattaaagcctacttaatgaactacccaggaccttttaacgttgaagagatggtacaggctaaagatataaacaaccttaactgagttgggctacattttcagatgaaagattcatgatagtagagacagcgtttcaccatgttggccaggccggtctcaaactcctaaccttaagtgatgtgcccatctcagcctcccaaagtgctgggattacaggtgtgagccaccgcgcccggcccaactgccacattttatagaagagaaaaaatccagggaatttaagtaacttgctcaatatcactcagcaaatcagaggaagacctgggactaggacccaggtcccctgagtccaaagtg

SEQ ID NO: 7983 - DNA, 2300 bp, Homo sapien
tagctgttacaagtatagaaataaattaattagatttcctctttctcctatatagtgttttgttttgttactttttttttttgagacggagtctcgctctgtcactctgactagaatgcagtggcgtgatctcagctcactgcaacttctgcctcctgggttcaagcgattctcctgcctcagcctctcgagtaactgggattataggttgcatgccaccataccccaactaatttttgtttttttttttagtagagatggggttttaccatgttggttaggctggtcttgaactcctgacctcaggtgatccccctgccccggcctcccaaagtgctgggattacaggcatgagccactgtgcctggccttattattttttattcattaagttctggtttagaaggtgcactaaattggctgggtgcagtggctcacgcctataatcccagcactttgggaggctggggcgggtggatcacctgaggtcaggagttcaagaccaccctggccaacatggtgaaacctcatctctactaaaaatgcaaaaatctgccgggcctagtggcacacgcctgtaatcccagatacttgggaggcgaaggcaggagaattgcttgaaccctggaagcagaggttgcagtgagccgagattgtgccactgcatgccagcctgggcagcagagcaagactcagtctcaaaaaaaaaaaaaaaaccataaacaataataaaaatatataattaccttgcttttatagttccttatagtttataaagggccctcatgtagttataatagctaacattgagttcttactatgtgacagacactttgctaagtactttatgttagttatttaatgcgtatagcaactctatgaagtaatgacttttaatctcattttgtagatgaaaaaatttacttgcataaggctacttagtttcagacagatctgtgatttcaggacttcacccaggatatcaatcagaatgtttttgcccacaaataaaaaagacaatctgattaaaaatatcttagccaataagtctgttttttcataacaagtggtcagaaggttggtttcaggattcgtcattcaacaggttaccagggctctctttggtttctctgcagttctcttggctttttttttttttttttttttgagacagagtctctctttatcgccagggtggagtgcattggcataatattggctcactgaacctccgccttccaggttcaagtgattctcctgcctcagcctcccgagtagctgggactacaggcccgtgccaccatgcccagctaatttttgtatttttagcagagatggggtttcaccatgttggccaggatggtcttgatctcttgacctcctgatccagccacttcggcctcgcaaagtgttgggattataggcgtgagccaccacacccggccggctttcttctcatagttgtaagatggctgcctcataagataatatctcaagacagaaaggaagggtcattccctttcatgcattgctcttttgatttgcaaaaacatccctgagaagctccccagccagcatactctcgtgctccattgtctagaactggcttacttgcccaccagcaaaccagtcactggaaaatgggaatgggattgccatgatgggtttagaccaatagtggttcagctcttgggctggacctgccttttccgagcactttgctgcctgcctgatacctgagtaaaatcagggctctctcaggaagaaagatgggggaaatggctcttggttaaataaccagttcttttatctttataataaccagtttttttagatgaattaaccgagttccagaataactgggtgacttatctgaagtcatagagttagcaaaagtatatggttgagaatttccaattccagttcaggttttctgattccagttcctagtacttttcaaaggactaactttactaatttgttgatgtgcattcttatttgtttgtttcaggtgcttgaagtttctgggaagtcggcatccaaccctggtgcttcccttggtgccagagcttctgagcacccacccattttttgacacagctgaaccagacatggatgatccagcttgtatcctctgtgcttaggatgggccctgatgtgttggcaggcagctttggcatctccttctgcagtatagctagggtagtctgaattttcttttctttgcttttctttcttttttttttttttttttgaagacagagtctcattctgtcacccaggctggagtgcagtggcct

SEQ ID NO: 7984 - DNA, 2300 bp, Homo sapien
gtgtggtgtaatggataaaattctaggaggaagagccagcacttaacatgtttgggtttatctctagcttgccttataattagcaatttcatgtttaaattatattattgtgaagtgaagaaaattgttctcttctgataaaaaggaggaattcataactaccaagaaaaacctgaatcatctgtctttaatgtagtaactctacttttaacatgtctataaaacctttctttatacaaagaggaaattgtgtttgtgagttttaaccacaactttaggtactttttgttttattttgttttggaatagtccattttgttacagaagcatatgggaatcactagaaaaaaacaaccatgtatagaagtcttatgagcattttctgtgtcttactcatttctcatctttgtatcctagcccttagtactgcacctagcatataatacgtgttcaggacccacttattagtgaatcaagaaagggcttcctcggatcagtggctttattgtttacatgttctgagcatgccaaggggtggaaaacatgcctctgttttcagggtactttacagaacccaaacctataccctaggtgatacttactgagcccttaaaatatgccaggcagggtccctatgtggtttacctgtattatctcatttagtcctaacaactctgtaaggaaatgagtattatctccacttaccaggcgagaaatttgaggtgccaggaagttgagttacttattcaagatcaccctccaacttagtggagggatcattcactacagtttgctctgagacctctatcattccaagcgtgtatccttaactactatatgattttagcctacaatcaacagacctgagtattggtcctattcctgccctcattcactttgaggcaagtgaatccacattgctgaatcttacctctaaaattcgaacaatgatatttagtctactttaatcttaatgataacattatttactaactgactttttaaaaagtactgtggtcagaatactgagataagtaagacaatttaattttcaagaagttaatgtagacagacatgtgacttcatcacatatatgtggtgtcagatttaagccatagtccttgtgatactaaagtccatgttcttagatcgacgttaaggtgggtggtatgtgaaactgtgggcatagagatctcccagggagagtttatagaatgagaggagtagagaatagaagacagcctgaaggagaaggaatccatcttggacttatcccatggctcttaatttgatatgagttactttatatatatatataaaatatggggcttcagtgtgttgctcaggccagccttgaactcctgagctcaaatgatcctcccacctcagcttcctgagtagctgggactttggtgtatggcactgcacctggctgatgtgcagtttttgtttttttgtttttggagttttttttttttttgagacaggggcccactctgtcaccaggatggagtgtagtggcacgatcatggctcactgcaggctcaaactcctgggcacaagtgatcttcctgcctcagcctcccaagtagatgggactataggcgtgtgccaccacacttggctaatttgttttttgtgtgttttgttttgagatagggtctcattctgtcaccaggctggagtgcagtggcatgaccttggctaactgtaatttctgcctcccaggttcaagtgatcctcccttctcagcctcccaagtagctgagacaacaggcgcacgctaccacacccagctaattttttaatatttttggtagaaacagagttttaccacattgcataggcgggctcaagtgatctgcctcccttggcctcccaaagtgctgggattacaggcgtgagccactgtgcccagcctgatgtgcaatttcatttgttcttttttctagaggttcgtattgctgctgtggaggccctctgcatgttggcccagtcttcaccctcttttgctgagaagtgccttgatttcctagttgacatgttcaacgatgaaattgaggaagtacgtctgcagtctatacataccatgagaaaaatctctaacaacatcaccctccgagaagatcagcttgacactgtcctggctgtgctagaggtgagtgtttctaatttgttactcatttcttcatccctcacccccccctgttaaaatcaggtattgtgctaggcattggtgacagaacactatatcagggagcacagttctgttttctcaccataccccttccctaagatgg

SEQ ID NO: 7985 - DNA, 2300 bp, Homo sapien
ttgattgtgcattattgttgcctggttgacagaagctagaagtatttagtttattgcttgaaaatcaaagtgtttgtaacagaggtgcaatcaacagtttagtcatgagaaatgatgtttttatactaaatataaatagttcatttgttttgtttttgaattttagggggcgcggtttgagacagtcttgctctgttgctcaggctggagtgcagtggcgtgatcttggctcactgaaacctccgcttcctgggttcaagcaattctctggcctcagcctcccgagtagctgggattacaggtgtgtgccaccacacctggctataaattttttttttaaagaaatggggcctcgctgtgttgtccaagctggccaagtcccattcacttttctccgcactagtgactcactttgagaatcattatccattagtgggtaatgtgaccaatttcatgagacgtaatttttttttttgaaaaaaaataaaatacaagtaccagagtaaatcacaagctataaggtaaatattgttttgttaaacttgctgtatgtctgtttttatgtactgtcttgcaatattatgtgtttcttactttgggtgctagtcaaaagaagtttgaaatccagagttttgtaccatttttattacctcatttcttcaaagtatttttaatttatgttgctatgttatgcaaatagcttgttttagtagcattggactagggtaatgcaggaggaaaactgataatttattaaaattcgtggtgagaggtgctaaaataaaaaatattgatagtactaaatgtcaacaaggatgtggcacatctagaacacttatgcagcactggtggaagtgtaaattagtacagccattatggaaaactatttggcaatatcttcttttttggaggcagtatctcactctgtcatccaggttggagtgcagtggcatgatcatggctcactgcagcctccacctccgaggctcaaaggatcctcctacctcagccttctgggtagctgggactataggtgtgtgccaccacatgcctatagtcccatttgcccaggacagtcttgaactcctgggctcaagtgatcctcctgccttggcctcccaaagtgctgggattataggcatgagctactgtgcccaactggcagtatcttcttaagctgaagcatgtcttgttacctatcaattctacttctacatatatatccaacaaaaatgtgaacatgtacaccaaaagccacatacaagaataatcacagtagcattattcgaaatagccaaagactggaaataacttaaatattcatcaacggaaaggctaaatagattttcatgtatttacaaatgaatactatataagtaacaagaataaatgaaccattgctatctgccataccttgcataaatcttacaaacataataagccacagaagccagatgctatttgatttcataaagtacaaaaataaacaaatgaacctgtgtgttagaagtcaggatagtagctatttttggtggtgatgtggtgaggttgttgctgggaggaggaatgagggatatttctggagtgttggttatatactatttaatctgggtgcttgttatatatgtgtatttgtgaaaatttattgagctgtacacttaagattttgcatatttctatggatattaaaagttttaaaaatttatacatttttgtctggttttaaaatttgaaagcaaataaaacgcaatcagggacgaattttaaagtacctactctgtacaaggcaaagtgcctttgtattcccaaagctattgggaatacaaagatgaaaaactaggacttttattttctaaggactcattttttttgagaagacccgtactcaagtaacatgatgctagacagactgtcctaagaatataggtcttgaaatcacccctaaggttgctgcaatgcttttgtttctggtcttgtctgtgtttgttaagatatcttaatcatgtcctttttttctttttctttttttctttttttttttttttttaatagcatctgacagatacgtctcatggtgtaagaaataagtgcctgcagttacttggcaatcttggctctttggagaaaagtgtcacaaaagatgcagaaggcctagctgccagagatgtccagaagattataggggattacttcagtgaccaagacccacgtgtcagaacagcagctataaaagccatggtaaatgtgattatggaaactagttggggctagtgttcatttttgttttttaagtttatagc

SEQ ID NO: 7986 - DNA, 2300 bp, Homo sapien
ttgtatatcttatctcggcggtctgggatgcctttgtttctggaaaaactcattcttttaaagctgcattagaaatagtttcctttttttttcttttttttttcttgagacagagtctcgctctgttgctcaggctggagtacagaggcccgatctcggcgcactgcagccgctgccacctgggttcaaacgattctcctgcttcagcctcccgtgtagctaggattacagtcacccaccccgacgcccggctagtttttgtatttttaggagagacggggtttcaccatgttggccaggctggtctcgaactcccgacctcaggtgatccgcctgcctcggcctcccaaagtgttgggattataggggtgagccaccgcgcccagccttttttttttttttttttttttttggagacagggtctcactccgttgcccaggctggagtgcagtggctggatctcggctcactgcaacctccacatcccaggcccaagcgattttcccgcctcagcctccagagtagctgggacttcaggcgtgggccaccatcatgcccagctaaattttgtatttttaaagtagatttcgccatgttgcccaggctggtctcaaaacttctgaactaggtgatctgcccgcctcggcctctcaaagtgctgggattataggcgtgagccaccactcccagtttcctctaattttaggaaagccttccctgaggcactctgaagaaattaggtctgtttgaaccacattcattcccgttacccagcacatttcagttgcactgtcaccatcagtttgggtgtctgtcttctcagattgtaggaccttgaggataaatactatcttttgtttatttttgggtcctctgtatccacctcagcctcctgcttttttttttttaaactatcccacattaattctttttttttttttttgataacggagtctcgctcagtcgcccaggctggagtgcagtggcgcgatctcggctcactgcaacctccgcttcccatgttcaagtgattcttctgcctcaacctcccaagaaactgggattacaggcgtgtgccaccatgccccgactaatttttgtatttttagtagagacggggtttccccatgttggccaggctggtctcgaactcctgacctcaagtgatccatccgcctcggcctgccaaagtattgggattacaggcatgagccaccgcgcctggcccacattcttttgaaagaccaaaataatgaacagctagtttcatgtaggttgtaaaacttgaccttggatttactgacactaacatgtgcactacaccttacagtccgtaaaatgttcctgcattatttcactccattgtcacatctttgtcaggttagttattataaatgcatttgtagttgagccatttgctcaagaaccagagctgtagtctgtagctttgttgctttatccttggtctcagaagtcttctactgtactatagctatcagagcagggattgatgccttaaaggatggcagcttttgcaaaactggaataaggaagtatggaaaggcaccccaaaacaagagaggtggcgcacagcttgaacaaaggcagtgctcaggaaacctacaaacagcatcgtgtacagcaaaggatgatgggaaagtcagccgagcctctgagttttttcacgagtcgtaaaccccttacagagctccgggttttgcctctagctctggagcaccccgcctctgccctttaacctgtacttcctccctccctcccttcgcgccgcgccgcgctagtctcttagccactccgaggccaccaaccagcctcccaaagctcccattgggttgcccaccctttcagtctcagctcctcccgccagaggccccgcctcccacaagcgaagctcttatttccgttcttccggcgtaggccgccaaatcagtccgtacagtggcgaggcagtcgagcaacaggaagcggtcgctctttccccaaatcccactgccttgtgggatctcggcaagtcatccacccaccccccgcgcctacgcaagttttccggatccgtccacccccgcctccctcctagtgtacggaagctgagagggcccgcgggtaggcatggcggcgcaccttaagaagcgggtttatgaggaattcacgaaagtggttcaggtaagctctggcgggaaagatccagaaccgatccggaccagggtagattatccaaatcccaggcactttgccggaacagaagaggctccatacgcccgtgttaagtgctgacttgttg

SEQ ID NO: 7987 - DNA, 2300 bp, Homo sapien
ggcagaaaaatgtgaaaagagagactggcctagcctcccagcctacatctttttcccgtgctggatgcttcctgccttcaaacatcagactccaagttcttcatttttggaactcggactggctctccttgcttctcagcctgccaatggcctgttatgggaccttgtgattgtgtgagttaatacttaataaactcccctttatatatatatatatatatatatatatatatatatatacacacacacacacacacacacacacacacacacgtgtgtatatatgtgtgtgtgtatatatacacacatatgtatatatataacggggagttaaaaaagtaatggaatatatatatacaaatatatgtgtatgtatatataccattagttttattttattattattgttttttgagatgggattacactcttgttgcccaggctggagtgcaatggcttgatctcagctcactgcaacctccgtctcctaggttcaagcgattcttctgcctcagcctcccaagtagctgggattacaggtgcccaccaccacgcccagctaattttttgtattttgtagagatggggtttcgccatgttagtcaggctggtctcgaactcctaacctcaggtgatccacctgccatggcctcccaaagtgctgagattacaggcgtgagcaaccgtgtccaaccctattccgttagttctgtccctctgtagaaccctgactaatagagtcatttctggtaaatgctaatgttagacagaaacgaaacttaacattagccaaccacaagcagccaactaacatacaattaagtagctgtggacttttcaacaaaggaaaccaaaaaaggagattttttaactgtaaccaattttatatatatatatgtatatatatatatatgtgtgtgtgtgtgtgtgtgtgtgtgtgtgtgtgtatatatatatatattttttttttttttttttgagagggaatctttgttgcccaggctggagttcagtggtgcaatcttagctcactacaatctctgcctcccgggttccagcgattctcctgcctcagcgtccacagtatctgggattacaggcacatgccatcacacccagctaatttttgtattttcagtagagacggggtttcaccattttggtcaggctggtctcgaacttctgacctcaaatgatctgtccgctttggcctcccaaagtgctaggattacaggcgtgagccaccatgcctgtccccaacaaaatatcttgcttccatattctccccataaatatttgcctctgatgcattgtcatgggaacactcaacctctttccatctggtgttccccgattcaagaattgcctgttactcaagtatactcttaaaaaagttttgttgatcctcagactttacattttaacaccaccctacctcctagagcgccagttttctgatctgtaaaatgggtgttgcggatctttcactccctaggactgtagggaatagaaagtctctggttgtcaatgtcagtcaatgtcaattccttctgcctcccccatttcactactgggaactccgaggcccagagaggggcattaactaatgtcaactttaataacgggattcaagcaatatgtttaagtaatttatttaagcgtaaaagaaaatataggaagaggcaagttgccgtggctcaggcctgtaatcccaccactttgggaggctgaggtgggaggatcacttgagcccaggaggttgaggttgcagtgagcctgatccgccactgcacttcagcctgagcgatagagtgagaccctgtctctgaaaaaaaaaaaagaaagaaagaaagaaaaggaaggaaattaatctatatcaaaaggtcagtccttaaggggtctgctccatttctcggtctccaaagtcagcccttctcagggcctaacaacttttagaagccccaaatagacagactgtccatttctttctgcacttggcccagtctcactgcaagccacgcctggctcagccccgtcccgccttgagcctcggtgttcccacctaggggcgggcagccaggggcacttccgctggcccaagtgatctgcatgtggcagggctgcgcagtggagcggccagtgggcaggatgacgagccagacccctctgccccagtccccccggcccaggcggccaacggtaagtgcgaggctagctgcgtccccgcgcctctgtcctccgcctcttccctccgcctcttccctcccttccagtttctcctgcccgtccctcccagacgc

SEQ ID NO: 7988 - DNA, 2300 bp, Homo sapien
gctgagacctcagatatgtgccatcacacccagctgattttttaaaattaattttttgtagagatagggtctcatatgttgcccatgctggtctcaaactactgggttcaaatgatcctcctgcctcagccttccaaagtactgggattacaggcatgagccaccatgccgggctgggaggcggaattttgttcagtctaaagataagctttttcatagctctggctgtagtgggagggagcagaggagtgaatgattgtcagttgggagggtgcagagtgggctcctgccctagggtggaggtgagggtggcttaggtgagacaacacagaggccctgttcagccccacgtcccctccctgtgctccctcctcctctctcctctcctgcaggcgtgggaggtatcatcattcagcagatttcaccagaggcagtggaggaggcaggtacctgagccagaattcagaatgtcttattctccacttgactctgccactaacttgttgtgcaactttgggcctttccccaggccttcattttcttttcttttctttttctttttttttttttgaggcggagtctcgctatgttgcccaggctggagtgcagtggtgcagcatcatctcggctcactgcaagctccaccttctgagttcacgccattctactgcctcagcctcccgagtagccgggactgcaggcgcccaccaccacgcccggcttattttttgtatttttagtagagacagggtttcaccacgttagccaagatggtctcgatctcctgacctcgtgatccacccgcctgggcttcccaaagtgctgggattacaggcgtgagccactgcgcccggccattttcttaaatatctaataaaaaatatatagcaaatgcagtttgtaaactatgacaatatgaccacgcaaaagattattatcttccaagactgctggtccaaggaaaggtcagtaataaagtggaagcattgtagcttatggaatgactggttagatttgggagaagccttagcaataatctagaatctgcatagataatacatctgaggattgggctttgtggtttacaaagcattttttttcctcttttgatcccagccgcttgtctggactgatacaaagcatttttattagtttgtcttattcaatcctcacaccacctcaaatttacagaggatatggatctggttaacttgtatgactatgtaacctcatgtcagtccacagcactgcctggaggtgggtagaggtggtcctgggctggaatcccagccccagtgggaccttgagcaagttactttagctgtctgcacctaaatttcctcactggcaaaacaggaatactggtggttcacacctgcaattccagcactttgggaggctgaggtgggaggattgcttgagtccagaagttcaaaaccagactgggcaacatagcaagaccatctctacaaaaattaaataaataaaacatttacaagggttgtggtgaagattaaatgagatcactcacgaaaaagctcagcagaccctgatgtgcagtaggtgctcaataaatgttagccagcaaaaaacaaacaaaaaaaaactcagctaggaaattgcagtactgggcttctgactccaacctcagtgttccttgccccacatcaagctgtttcacttcaaatcctctccatttcacaatggagtcaccccaggttgaaggagtgaactgtgctttggagggctgccctaagcaggcagcaaagagacagcttggtctccagtgacctgaaagaattatttattgccctgaagtccagtataccagttgccaaagggaaaagcttccttccaactggctcagcaagctgacagaggaagagtcgggttcttgctggggcagtcatgcagagctgggatgacaagtagaaggctggcagatctgtctctgggcagatggatcacctgatacagatgctggggcctgagccctgggattggcccaaaacagggctgtgttgacccaacagctgggcattggcatcctgtcaatctgccgagagcctagaaatagtgcgggggcagtctgctggtctcattgtgtcagaggaagcaaccatgcaggtgctaaccaagcgttaccccaagaactgcctgctgaccgtcatggaccggtatgcagccgaggtgcacaacatggagcaggtggtgatgatccccagccttctgcgggacgtgcagctgagtgggcctgggggccaggcccaggctgaggcccctgatctctacacctactt

SEQ ID NO: 7989 - DNA, 2300 bp, Homo sapien
ggctgaggaagagttggaagctgattcagcctggtggggagcgacctgaggaggagcagtctagggaggagggtagaagtcagatgggtcggtagaaaagaaatattcaaaagactcaccggcacttcaggttgggactgaagggacaggcgggagggaaagaaggaagatttgcggcaagtcgcactgggaacagagattagggaaggaacgaagtgtaaaaaatgcctggatgtagggcacctcagaccatttgcccattttatgacaaaaattatctagatcttgtaggctggagaaatcgaaagtgctcttttctggccatttagagccattatcaagtttgtattggggccaagtggtgttgcagaagaaaataagacacttaggttttaggtcaggtgagagttgaagaggttttaagtttttaagaacacaggctaagagaggaagaagaaggaatggagggctgaaggttgcccatagtaaaaaggtaagtttagagaaaggaggaggttgagacatggagagagggggggtggtacttgccacccaggggaagtggtacttgccaccaaggtggaagatcaaaacaggtgtccccgcagtgatcgaacacctctgaaatgtgggtgaataatcaggcaggcgtccctgcagtgactaaacacaagggaagacagtcttcccgagtccatgaccagcgccagagttttgggtccacagataaaacgggtctcctctgtctctaccagacagggaaaggaaccgaaattaagggaagggagagactgaagggtggtgccgaaattgaaaggagaaagaggttgagggatagtgaaagaggttgaagaagagagtagaaagaggccacttacccgatttaaaattggtgagatgttccttgggctggtctgaggacccgaggtcgtaggtagatcttcctcacggagcaaagagcgggaggacaggggattgatctcccaaggaaggtcccccgatccaagtcatagcaccaaatgtcaaatgcatccgtgtgaagagaccaccaacaggctttgtgtgagcaacaaggctgtttattcacttgggtgcaagtgggctgagtccgaaaagagaatcaatgaagggagatggggaaggggttgctttataggatttaggtaggtaatggaaaattacagtaaaaggtggttgttatctattgttagcaggggagggggtcacaaggtacatgatggggagatcataagacttattgtccagaagaagaatgtcacaaggatggttgatcagttaaggtagggcagggaccagtcacaatggtggaatgtttgttaatcagttaaggcaggaagtggctgttttacttcttttgtgggtttttggctgccccagacttcttggctcccgcaggccatctggacgcatatgtgcaagtcacaggggttacaatggttgagcttcggctgagaggcctgacagcagagactggaaaattgcttaacagaattataaattccttctttcattactcaaacctttttttttttctttttgagacgaagtttcgctcttgttgaccaggctggaatgcaatggtgcgatctcggctcactgcaacctccacctcccaggttcaagcgattctcccccctcagcttcccgagcagccgattatgctgcctcagccttcccagtagctgggactacaggcacccgccaccacgcccagctaattttttgtatttttcgtagagatgggatttcaccatgttggccaagctggtcttgaactcctgaagtgatccgctcacttcagcctcccaaagtgatgggattacaggcgtgagtgacggcgcctggcctcattactcaaacctttagggaacacctcctcactcagccatgtgtaacgacgtgaagacccagaggtgaaacattttagggtgctgcctccgaatctgaatttcaacaatagactaaaacgatccagtcctgggcttctctaaattcttttgttgctggccagaccttaattttaggctttggagggagtgtctatgcgaatgaacgactgaaaactcagaaaacgaaaactagcttttatggaatttcaattaattacgtttatcaaaactacgcatcatgcccatttgtgggtattggatgaaaagataaatctttccagaaggggcaggggagggagaggcaattctggttggggaagttgggagaaaagaaaatcagtatctcctagtcttcgcccagtttggctcgtttggggtactcctcgaccc

SEQ ID NO: 7990 - DNA, 2300 bp, Homo sapien
tatttttgttatttatttattcattttggagacagggtctcactctgtcacccaagttggagtgcagtgtcgtcatcatggctcattgcagcctccacctcctgggctaaagcagattctctcacctcagcctccagagtagctggtgctacaggtgcaagccatcacgcctagctaattttttttattttttatttttttgtagagacagggcctccctattttgtccaggctggtcttgaactcctggggtcaagcaatccttccacgtcggcttaccaaagtgctgggattgcaggtgtgagtcaccacacttagcctaattttagttttttaaataacctttttgtaggataattttagctttccagaaaagttgtagaaatagtacagagagttcctatatatccctcacccattttcccccattaccaccttacataaccatggtacattcatcaagactaagaaagcaatattgatgcatttgaatttcacccgtttttcctttaatgtccttgttctgttccaggattcaatctagaataccacattattgcatttcatttaccctgaattttaaagtgatatttcccttttaaatctcctagaaaaggcatatggaaggagcatttctctttgctgttctcctacatttcaagcatatctacctctatgtagcaccagcttatggtgtatatctgctgcgatcctactgtttcactgcaaataaaccaggcaagttttggtaataatagcaaaaacattttcgatttttcccttactgtgttgacttggtggcttgcttgataagaaggttttatgaagcacagcagatatctcagctgctaatcctgtaagccctttacccattctcgcttttctctgctcttgccacatcatgaatagattggtatactattgtgggatacttctagttttagcacatgatataggttatggttaatgttcctttccatcttcctggttactgataatgttccttttctgtagatgggtctattcgatggaagagtttcagctttgttcgtgttatttccctgggactggttgttttcttagtttctgctctttcattgggtcctttcctggccttggtaagcctttttttttttttttttcaattaatacatgttctttgttggtgtttagaaaacctaataaagccaggaatatgtaaaataagtaaaagctacttttttcttactccttacccaacgtgactccccaaagatagggcagtattccttttttttttttgtttttgtttaagatggagtctcactgtgtcgcccaggctggaatgcagtggcgtgatctcggctcactgcaacctccacctcctggattcaagcgattctcctgtctcagcctcctgagtaggtgggattacaggcacatgccaccatgcctggctaatttttgtatttttagtagagacagggtttcaacatgttggtcaggctggactcgaacttctgacctcaggtgatccacctgcctcagcctcccaacgtgctgggattaaaggcatgagccaccgctcttggcccgataaggtagtattctttcagacatttttgtgcacattcaaatatgtatatatatatacatgtatatgtttaactgtacattacacatacacaaacacagaattgatcttcattatttgtgtattctgtacttgtaagtttacttacttgataaaatgtatttgtaacaaaatcaataattttgcagtcttacatggacagcagacattctaaagtgcatagaatttaacagatgttcagatgttttctttcttcctcttcttccctgccctgaaatcaactaattaattttaattcttactaaaactgaaacgcgtcacatcttttgtagtttcccagctctccccttcaccctagtagacatggataagctgcagtctgtgttctgctttgtagcttgtaaattcttctgttattataatagtatggacgggtattcagagtatttttatgtatattgtcccactggacagtggacaaagtgagaccaaaagaaggttctgtgaacttacattgtggtgagcatataaccacttacttactagaacccagaccccataactttctacacactataccatagagagttccctagttctctttttgaatttgaaaaagattgatgactgtttaatcagtttcatttctcttttcaacagaatcagctgcctcaagtcttttcccgactctttcctttcaagaggggcctctgtcatgcatattggg

SEQ ID NO: 7991 - DNA, 2300 bp, Homo sapien
agcatttattaagttcaccatagtgttgccccaaagcaatcagaatagtagtatcaaagatcactgattacagatcataacaaatataatagcaatgaaaaagtgtgaaatatttcaagatttaccaaaatgtaacacagacacaaaatgagcacatgatgttagaaaaatggcattgatagagttgctcaatggagagttaccgcagccttcaatttgtaaaaaaaatgaaaatgcagtatctgtgaagtgcaataaagcaaagtacaaaaaatgaggtattcctgtacatgtgctgccaaagtgagcgctatatacattcttaacctggaccaagagcagtattcaaaataacaactctggccaggcacggtggctcatgcctgtaatcccaacattatgggaggccgaggcaggtggatcacttgaggtcaggagatttgagatcagccctccgccatcatggtgaaaccccatctctactaaaaatacaaaaattagcctggcgcggtggtgcaagcctgtaatcccagctactccggaggctgaggcaggagaatcgtttgaacccgggaggcagaggttgcagtaagctgagatcgtgccactgtactccagcctgggtgacagagtgggacgagactgtctcaaaaaaaaaaaaaataacaaacaaaaaaaacaactctgaggatacatttctagcctgaggcaactaaagcaagaaataatcttatgcacagacctacagttaatcattttactgaatctacatatacattccacttacatgattacatatacgcatcagtatggacttacattctatacatatgactctcccatattcaacaagagatcaccaagagcctgaatcaaaggataccaataaaacaaaccctaaactaggaagtgggagggaaaggagaaaagggatgagggagaaaaagaaaaaagaggaaggatgaagggaaggcggaagccaatattaataaatactgagtacctactgtatacacaccaccatttcatggttgcttcttggtttccacgctttcagtcttggccctacatccattttttacacagcagtctaactgtggtcttcgaaaccctgtgttatctgtccccagtgcaccccatgctgtgccactcctctccctcaatgctctgcagccacaaggggcactttctgttcctagaatgctctgacttctttcctgccacagggcctttgaacttactctttcctatgcctgaactgctttccacatcacttattctttttcattttttgaatttcaactcaaacatcaccttctaaaggaatagcgcacagccacttagtaaccctctatttcctttatcacaatctgaaaagttcctgtttgtctagctccacccaccaacttcgagggcaaggaccagcaatgtcttgctcaccaccgcatctcccgggagttagaacggtacctggcacctcaggcatctgataatactggctgaatggctgttggaggcagaggttcttaactgcctattaaggatgaggaccctgaggttcagaaacgttaaagtgatttgttccaaatcagacagcgccaggtctgaacctagccagctggggctaagtcaagtaacaactggcgaaacagaaagcttagcaaaggcaggatagcgacaaacacgacctaaagttttctcttcatacccagggatatccacacctttctctcccgccctgaccgaccgcggggcctccccgcccagcccctggccgtgcgagtcccttactatgtggggatgagaaggcatttgagaagagtcaccccgagcgccaaagccgaaaaccaattgccagtacccgtggcaattgtgagcgccgccattgctgcggcaccgcacgcttcccaccaacttgatccacatccgggatcccgcgcatgcggagaaagccctctgaagccgtgcccgctagctgcgcgcatgcggcgagcggcgcagccagtccggggactgcagtcagctatttaaacctcccgcccaccttttctttagacccgcgtctcaccccgggccggaagggctcctgcgcaggcgtttgtagccacttttaagttttatcagctagttcatgcttgcgttgaaagagtggtcgtttgcgctgggtcatcactgtgtagtattggggatacttaggtgagaaaaaaacttaacgctagagacgttcacgcactagtggagaagccaggattgttgccctagagttacagtagataaaagtacctcagagaactgcgggg

SEQ ID NO: 7992 - DNA, 2300 bp, Homo sapien
ggtgaccacctttagatactgagacagcaagtacgagtggccttcttttaccttcttttaacttatccttttttgctgtctggtcatcttcattggtcttctgcttctcggtgtcaagatcatcatcatcatcatcttcagctgcccatttgactgtagctattacaggaaagtaatcgattgtaaggatggaagttggttggaatgatgtgaggaaggggccaaggaatgcaggcaacttctaaaagctgaaaaagacaagaaaaacaatctccctgcagagcctctggaagcaaccaatccaaatgacaccttgactttactccagtgactgattttagatttctggtttacagaactgtaagagaataaatttgtgttgttttaagctactaagtttatggtaatttcttacagcagaaatagaaaattaatgcaaagtgcctttaaaacatctaagtagctgggcatggtggcgcacaactgtaatcccaatactttgggaggctgaggcaggaagatcacttgagcccaggagtttgaaaccagcatggacaatatagggagatcccatctctacacacacacacacacacgttgccacatccctgtggtcccagttactcaggaggctgaggtggggaggactgcttgagcccaggagatcgaggctgcagtgagctgtgtttgcactattgccctccagcctgggccacagaatgagaccctgtctctcaaaaacaaaacaaaaacatctacgtgaggtcaggtagccaactggagaccagggtctgaaagtgagagaagagtgctgagctagaaatctgtgaatcatattcacatgggtggcagctgaagctgtgggagggcataaactcatattagggaggtgacactgtcacctacttgctgtgcatctttcagcaagataattaactgatctgacacattattgagcatttattctgtcctggaatcatatcaagcaatttacatgcattctcatttaatcctcacaaccagtttatgaggctgaaacttttttttttttagaccaaaagcatcttggataaacaggcctgaggcttgcccaggctgaagtgcaatggcgcgatctcagctcactgcaacctccgcctcccacgttcacgcgattctctagcttcagcctcccgagtaggtggaattacaagcgcccgccaccatgcacggctaatttttttttaatttttagtagagacagggtttcaccatattggccaggctgatctcaaactcctgaactcaggtgattcgcccacctcggcctcccagtgttgggattacaggcgtgagccaccgcgtccggccagaaaccatttttatctcctattttcaaaaataaataaataaataaaaattttaaaaaaagaaactgaggtttagagtttagtttgtccaagatcatacagtaaaataatgagacaagcctaattaaattgcatgtgcctcagtcattacgcaatctgcgagtttgttgggcctactgaatcagaatccgaattattttaacatgaaccgtaggctatttgtacactaagcgttaggactagcctctaccctgcttccagaatgggttccgctcaagcaggaggtgagccaagagcctcgctcagagttctaaaaacacaatgtttctcacctctgtatctttgcacatgccattctctagctggatttaatactccggtgcaagcgtccaggttgggagcccccgcagttctctgaggtacttttatctactgtaactctagggcaacaatcctggcttctccactagtgcgtgaacgtctctagcgttaagtttttttctcacctaagtatccccaatactacacagtgatgacccagcgcaaacgaccactctttcaacgcaagcatgaactagctgataaaacttaaaagtggctacaaacgcctgcgcaggagcccttccggcccggggtgagacgcgggtctaaagaaaaggtgggcgggaggtttaaatagctgactgcagtccccggactggctgcgccgctcgccgcatgcgcgcagctagcgggcacggcttcagagggctttctccgcatgcgcgggatcccggatgtggatcaagttggtgggaagcgtgcggtgccgcagcaatggcggcgctcacaattgccacgggtactggcaattggttttcggctttggcgctcggggtgactcttctcaaatgccttctcatccccacatagtaagggactcgcacggccaggggctgggcggggaggccc

SEQ ID NO: 7993 - DNA, 2300 bp, Homo sapien
acttctgcaatttggcatctgccatcccctctgcctggaccttgaagacaaatcccatgcatcggccaggtctctcagctggaattcattccttctcctctgcatctgcggagaattttagtctaaccccttaccacagccaactttacttaagtagatggatgcctggctcccttgctggggctgggggtgcccctttctatatccacagaagcacgtagaataggggaagaggaagaaatttctctcctgtttagtcagatccattttccccacctggattttcaaaactttttaattttgaaatgctctgttcaattttcaatctggaatctaaagggatgtgacaaggccgaggtgattacttgggagtaaatgcaaggagagtttccactgcgtaagggaatggacagcacgtggctgggtaaatttcaaaaaagacaatgctcagagtgagtactgtgttttccagtaagtgggagacttccccaccttaccccaccggagaaaggactctttgccttgaagcccctaggacgactaccctttcttcacctcctcttcctgaccaccccacatcaaagagctgcgtctataattctgtcttgcccagtccatatctctaagaaatccgaaggctgctctattaccatcacaacccatagggaggagagaaaaggtgcttcctagacacagggaccccagaatgagctgcgcaaaaggcaggaggagagaaaggtgggctggaagaaggagaccacggaatctggcacggcaaggtattctttcatctggcgtagacctccaacaaccactaccatcccccagccccttccagaactttccttcaccttctcggctcactctcacgcttcaccttgtgcttttcctccggcaccagcaccccatttcaaaccgctctcttcctatgtctcctccaaacagtaatttataaacaccgtgctttcaaatccatctcatttcatcctcacagtactataggagggctgccttacaggctgtcattcggaagggttggggggactggtcctgccagacaatttgcgaaggtcggggcatcaaaacttttctttcctgcctcccacgccaagctaaacctctgcctccccgagtgcagggagaaaagcaaggtctttgaagtaaggagtcctgagtggttttaggcaagtcccttcgcttttctgagcctcacattcctcacctgtcaaccgctatagtgacgcctctacttttcagggcgtgggaggtcaatgagatcactggtgtgccgcactgaactcggggatggactctttatttccagtcagtaaagggaggtgttctatgcatcacaggcttttgcccacgccgccacagcgcggccggcccagggctctccagagcggggcaagttccctgtcatctgtgtctccgcccttccttccccaatctcacccaggctggcctcatcggcttgttccgcacccactccccagccctacagcccccactccgacctgacaagtgccccacccccacctagagatcccgcctctccttgccccacccaccaaggactcctcccacagtcccgaccctcattatccgggcttttccgactatcaccatccgcccttgctctcccaacagccccgcccctctaagagctctgcccacttcggctcacctcgctccgaaacgcgccccctcccccgcaccacaggcgatgccatccccatttcacagatgggaatggcgaggctgggatagattagtctcatggtaagacaggtgctcagtgggcccacgtaccctcgccggtagtccccgagccccgcgaccccggccgtgccgcacccacctcctgccctcgctctgcagcctctccctccgcgagcggccagcgcagctttgcgaggggggcggagggtaggagcccagcccaggggcgtggcggtccggggtctgtgcgctgccttccgggactggtagttctctctgggctcctcgcagctcggcgcgtcgagagcgaactccatctcccaggaggcattgcagcgagttgctctgcgccccgcctcgtccccgccggtgtccggccggctggccttaaaggggacgcggtcagagtggcagctcgcggggtggcccccgctccggctccgccccatttcacgcacctcgcccctccccatgcttcatcccgcagccccggggccgcgccgcagagtcgggcttcctggatacatagaggcttgtgccaggcggggtgggaagactggattttgcagtggaagcag

SEQ ID NO: 7994 - DNA, 2300 bp, Homo sapien
ttccttttccctccacaattcaagtgtctaaagttctggcctccaaggccctcttagctattctcatccctctgcagcataactggaatccatgtctctgtctcccaccaggctgggacctcccttggcagaggtccaatccccgtctctgagcccagtgcccagtacagaaccaaggactgaggtgtccgtgaaggtgcgtcaagcaactcatgagagacatgtgacagcaagatgagagaaaaccaaagatgtaaccacaaaagtaccttccagaaactggcctaacctttggtccagtcaccaccccctcctttgcccaggcctggtcttgcatatcaaaaaccctgaaaatcttaaacatcagtcaagaaagcccctacagaggtcactggactggactgaggctttagccattctagaaattgttcaaacaaccaaagcaaaagaaaaagcacaaaacaaaaacaaaacaaaacaaaacaaaaatctgttcctggttagccttcaggtcaaaagctcacagaatctcctaggacctgagaagaaggcttcatggtgttactcaacctctccctgctccaggtcagagcagcccctcccagcctctgctcagcacctaagagctgaggagcacatttcctcccctctctgaccctcgaagccagcctccctcctttgactcccctgggagccagagcttccttgggggtaccaggctgcccctcccgacaccaggtggtgccctccatctctggcccctcaggtgtctgaatggcagcatctctctaggtattttttaactgaacttctacccaaggcaaccctgggaagaagtgcttcaccctactccgggaggcccatgtctgggccaccaaactgtctcctggaaagaaaaagaaaaaagggtttcactggtaaaaagcagctgctcttcctcaaaggataaggaggagagagaagggaagaaagcaggagcagctattcctcctcaggaacccaccacacacacctatccctgcggggccacccctcacaaacctgtgagggccgcactccaccccaagctttctggaaggaagggcaccaagctgacacatcagggtctccggtttgcaagggccagggccgtaagagggggttggggagggtatcccagggcccagcacactgagaataggaaaagcccattccaagcaatggtggcctcgggccccccagtttgtgccacctccctccctccagtgcacccgcgcccagcccacgcttgagctggagggccccacgaaaagccagcaagcgaatgtactaggtactgggtgcgaatgccctcttacctgaaaggggagggagcaggatcacttcgacatacaattgatgaagggaggggattaatgcccagagaggaatagctactcgcccaaggtcacacagtgaggcccaggaggcccaggatgcacccagatctcccgactcccagccctgggctcgcaagtccagggttctcgaaaggccagggtgcagacaccgccccccaaagacagtcacacgcccccaacccccttacctcccggaccccggtgggccagagccggctgctgggcggggcgctcaggccgggcaggacgaggctgggcccggctaggtcagggctggtcctctgctccccccagggtggggacgccctcagccaggtcccagacggaagagatgctgcttccactgcaaaatccagtcttcccaccccgcctggcacaagcctctatgtatccaggaagcccgactctgcggcgcggccccggggctgcgggatgaagcatggggaggggcgaggtgcgtgaaatggggcggagccggagcgggggccaccccgcgagctgccactctgaccgcgtcccctttaaggccagccggccggacaccggcggggacgaggcggggcgcagagcaactcgctgcaatgcctcctgggagatggagttcgctctcgacgcgccgagctgcgaggagcccagagagaactaccagtcccggaaggcagcgcacagaccccggaccgccacgcccctgggctgggctcctaccctccgcccccctcgcaaagctgcgctggccgctcgcggagggagaggctgcagagcgagggcaggaggtgggtgcggcacggccggggtcgcggggctcggggactaccggcgagggtacgtgggcccactgagcacctgtcttaccatgagactaatctatcccagcctcgccattcccatctgtgaaatggggatggcatcgcctgtggtgcg

SEQ ID NO: 7995 - DNA, 2300 bp, Homo sapien
tgaactcttaagaggcacacactcttggcatgagagatgctagccacagactaataaaccctggtcctttcctggtggagctcagcctggtgagagagacagatatttaaacaaatgggccctttgtatcgtaacacgtgcagcaatggaggttaggtcacagctgagaactagaacagagcagggagctcactgggtctagtacatagttggggttccagaatatctgtgattctgaataaaactttccagcttattatcccagaaatttaaggcttgtccacactctagctccagttctcaggcataagagtagtttttactgagcccataagtttaaacacctgttgtctgctgagtcttatatcaggtcctgcctagattgggcatcgaagcaaagaaatggttctgcgctccaggagaggcattacgtgttagatgttaagagagcaagctgtgcccatgtgaacctgcatgagagggctcaaagtgggttggtgtgggacaaagtcttcaggaaacaggccaggtggaggagaagggcagaaggaaggctattatggctcagaggagtaaggtagagatgactcacactgcaccctgcatttgctcatccagcaaatgcctgtctgctgggcactgtgctaggtgctggggatactgtggtgaacaaaacctgaagctgccctcaagaaccatatacagcattggaggggaggctgaccccaatcaagaaatcatgacaagtgctaccaaggagaaggacaagatgttctaatttttaataagggagattgacccaggcagggagctcaggtgaggcttccttgatgaagtgactttcagctgaggtctgcagggggagggaagagcatacacaaaggcccaggggcagagggcacacggtgagccaagggtgacaggccggtgtgggctgaggcaggcagagccctaggtgtgcagggctggagcgcggagatgagatgctgtgcttcggtggaggggactgggacccataccccaccagcactaactgattccagctgtaatgcaagaggccccagcggattgtaggaattaagggtgggggatggattccggcctggaggaccagggctattctcactgaggacgggtgctttagataggctttgaaggaaaagacgcttgcttggttgtgtgagagcatggtggtcgtgggggcctcaggagataaggacgtgtcaggcagaaggcacagcacacacacgaagtggagtctagccaaggggtaggggaaggagcagggagttgaggcagaaagaaagagtgcgaggcattctgggacctctgtcggttctcccttggggcctcttgccctttctccacagaggtgtcattttttgtgtgtgccccatctcatctcccccatggaaatgacttggctgagactctggacagcagcttctagatcctgctcttacctgccctgagagtggacagggtcaccagggaggtctggggagagagaagcaaaggggaaggatggggaggaggctcacgtagcctttgtgcgattaaaggcgcttagcaaccatagctacaagtccctggggttaatttattttgagacagggtctcttttgctcaggctggagtgcagtgggatgatctccactcgctgcagccttgaactcccaggcccaagcgagcctcccacttcagcctccagagtagctggcattacaggtgtgtgtgaccactcctgggtaatgtttgtgttttttgtagagacgggcctcgctgttgctcaggctggtcttgaactcctgggctcaagggatcctgctgcctgggcctcccaaagtgctgggattacaggtgtgagtcaccacgcaggcccctggcatttattatgtgccaagtgttgtgctttatttcatcaggatagctctcagtgaaatgacgcccttgccccatttcacagatgagaaaactgaggcccagaaagtttgagttgcttgccctaagtctcagcactcggggactgcaccgggaactcttgagccccgcggttgtcgggctgtgacctcattccctgtcctccgcagcgcgggcgccatggacaagatcttggaggcggtggtgacgtcgtcatacccggtcagcgtgaagcaggggctggttcggcgcgtgctggaggcggcgcggcagccgctggagcgtgagcagtgcctggcgctgctggcgctgggcgcgcgcctctacgtgggcggcgcggaggagctgccgcgccgcgtgggctgccagctgctgcacgt

SEQ ID NO: 7996 - DNA, 2300 bp, Homo sapien
tccttgttgtctaattctgtgctattcagtatggtaccttctggctacctggtctgttgagtacttgaaatctggcttatttgaattgagatgtgctgcaagtatcaaatacacactagattttaaagacttagtacaaaagtaaagataaatatgtatactatttttatattgattatatattgaaataatattttagaaatattaggctaaaatatattaaaattaatttcacctgtttctttttacattttaaatgtggccactataaattttaaaatcacatatgtgcctcacgctacatttgtatttgacagtgctgctgtaattcccaagaagcagcagtggctgccgcatacagcctttccccatggtcctgaacctggcttctttgggtggattatgatacatcagcattgtagtatgtctacaataatgtacatttaccaatataatcccatctatttccatcttttgaaaatagttaaaaatttctagtctgtctttttgcccttattcctctctccctctccttctccctctccctccttctgtctccctctcctccctccccctccctccctccctctctccctctctccttccctcccctaattacattattccttcttgtactacattgccacttctttggggtttgggaggaaaatgaattttcagtctatcaacggggaagcagaagattttactcatctcatcactatttttaacaacagtgcagtggttatcttcatgtgtaagtcagtctacatctctagatattttctcatggtggttttctagaaatagataaactgttcagattatgaatttcttgactcttgatatagatattgacaagttgattcctcaaaaaagtaactaatttatattcttagtgggttattcaataaaaggtgggagcagttactcaagggtacctacattcacatctgaaccccttatgtgggtcttgtatctcagcttctgtggaaaatttggcctcttttctgaatcactaaacttttctgggcctcttttatttgtaaaactgggataatcataccctgaagtaatgtatggaaaagctcattgaaagtagtattttattatttcagcaagtgcttaagagcctcctacttgtactaaatacatgttctgtactaggaactatggaggatgtctaaatgatgtgaacctgggcctcaaaaccaatttacaaaaaaaagaagctaccacacaagtctttttgtgatatctaacaagaagtgcaggccaggcgcggtggttcacacctgtaatcccagcactttgggaggccgaggccggcggatcacgaggtcaggagatggagaccatcctggctaacatggtgaaaccccgtctctactagaaatacaaaaaattcgccaggcgtgctggcgggcacctgtagtcccagctactcgggagactgaggcagaagaatggcgtgaaaccgggaggcggagcttgtagtgagccgagatgtgccactgcactccagcctgggcgacaaagcgagactccgtctcaaaaaaaaaaaaaaaaaaaaaaagtgcaaagtgttgaaggggtttagaggagggagggtttatattgtattttaaagatcaaggacaacagcctagaggaggtggcatttaaggtaagccttgaagaaggagtttaatttcaacagagagtaaggctgggaataatgcgatgtgagaatgatcttgagaagaggcacagagggtaggttcagggcagatccgttgatagcattcactagagtgtaagcaaaaggtgaggaaaactgaaattgtaggttgaaatttttgtttctgcgagtatacttatttgcatttgcacagaaggtggtgatccttatatttatttctgctgtgcatcaataggggaggtggagataaataatttcattgttttggctctggccagaattcattaggcacagtttgttgtccatagggaggggaacacaacacacactggcctttgtctcccttccacacaggctggtggagattctgaggcatttttaaacattgcacttagccattcagatgataacttggatcagaaattttgagaagtggtgggatgaagaagatccctgaagagaggagtaactgagacaaaggcgaggctagcaatagagagacaagtgagggaattagacctttggtatcatcatgaaaaggtgagttttgggaaacaaagagtatggcgggcaagtacctagcaggttctgaatatttgttctttaggagtcaccattt

SEQ ID NO: 7997 - DNA, 2300 bp, Homo sapien
tgtattcatatttcaaggtccctcctgccattggccaaacaagaaacatcaaacttttccatttccacatgaaattgtaaataacaccatcttttcctaagcaaacaaaataagactttaaggaatttctggcagaatatgacctaacccccactaactcttgctaaacagtcttccagtctgtgtattgaatcatgtaactatcaaaggatacgtaagactactcttctgggggaagatagggcatacgtatgcctgacttgcatcacaaacctcagctgcagccaaaccatgcagatttctccgactctgcaatctctgggacttggcaccatgactcagatgtgaatgaagtcaggatagttttattttggttggaagtcaccgcctcctgattgatttggcagacgttaagtgttgtttgtcttacagggatttaaggtacttaaagccagaagttaaaatggccatcattctggtggtggcccttcatacgtgacttaaggatccctaaattgtaaggttaagggagctgtggtcccagcctaccagttctggctttacttcccatccagcagcacactggatattgaagaaagtcagtgaaatgttagatccaggggactgaccgctaaaactcccagggtatctagaagagctaagtacgtggtaggggattcgcttttccaaattgaggagggtgaacttcccccaacccaatcaagatcttttggaccaaatgatgtccaactgcttgaaacaactcagctgcacagagacagaaataaacaaaacagctttagtctgaggttgtgtggggcactgcaagatgctgcttctccaattcatctgtccacacagcacggttccccattgaataaacaggttactatccacttatcagagaagttagggaggacctgccttttaatgctgcttagagagacactttgtgatgagaaaagagctcgtacaaaagatttttttctcccccctcccgctgaagtgctggggttgtgtgcttccacgtacatctgggataccattatatttacaaacagaggtctcatagcctgtgtcaatgagcgggaacgttggggaatttggaccccaatttcttgttcttctgcacttgaccttgccttccaattcgttatgaaatacattgactagttttgcttcttccattctacaaatcatgcgaattttctatactaaactgtgttttcccagaggcagtgtaggagggagtcagctggacttggtttccaggcaatgagaggctcccaggtcgatcccattaaggcaatgccctcattttgaatagcagatgaccgggacccctcctcccccacacacctgaattggaaaattggctcggctttgtacaagcccttgcccttaggctgtccataaaataggaacaatactgaagacaatcctgtaagctacaaaagcaaaggctccggcgcgtagtaggtccgtctcctcctcccgccgagggacgccagagttaaggagcttcttgctgggaaggggtccctcctttcagccggaacctgacccgcagaatgtatcggaaatgtgagcagccctagtatcccttccccgtcgacgctcggtgaaaaatcgatcgacgaccgagggcgcgcagtcccttcccctcacacccgccagcgccaggggcgcggtcgcctccctggcctccgcgcccgcggcttggggcctcaggagaaagcgagactccggggcgcgccggcggcggtggctttctgtatcctcgcgggtccctagccccgcgtccgcgtgcgcggcggcctcgggggcgcggcgggagcgggcgtggcgagcgagccggccttcctgctgcagctgctcccccggcggccgggcggagagtgcggattgcgcgcgctcggggcgggggagcgggcgcgcgcgaggctgccgggctcgcgccgcgccgcgccgcctagtccccgccgggccgcccgccccgcccctggcctcccgcgagctgcgcaccgccggccgctgccccagctgcccgagcccgcgccctcgtccgcgcgacccggcggggggctccaggccggcagcatgagcggcggcggcgacgtggtgtgcaccggctggctgaggaaatcgcctcccgagaagaagttgaggcgctatgtgagtgcgggcgcggccgcccaggggcgggcggggggcgctccggggcctgcggaggggcgggggactcccggaggggcggcaggctggggagctcgggcccggagccgcggggggccgggggc

SEQ ID NO: 7998 - DNA, 2300 bp, Homo sapien
caaacatgtttcatgtatcttattttcttagttatcaagacaatacattgtggactttgttcctttgtatcttactggtcatgaaatttatttggtttatttgttataaaaattcaaagttccttttgggaggccaaggccggcagatcacaaggtcaggagattgagaccatcctggctaacacggtgaaaccctgtctctacaaaaaaaaaaaaaaaaaaaaaaaaaaaaaaattagccgggtgtggtggcaggcgcctgtagtcccagcttactcaggaggctgaggcaggagaatggcatgaacccgggaggcggaacttgcagtcagccgagatcacaccactgcactccagcctaggcaaaagagcgagactctgtctcaaaaaaaaaaaaaaaaaaaatcgaaagttcctaatactgagagaaagactgcaaataaaattcactgccctcagcttccagagaaaccaaaaaacataaaacctaataaccaaagaatcttgcatcttaagccccagagtttactgaatgtgtcgcaaaatactcaccttgaccttgttctacccagggtgaagggacaggagaatgtgaaggaagatgatgtttgatctcaaatacattggagtaaagagaaacactaaaaatggggtaaaggatcctagacccagcaatgtacttaagctcattgtgcctcaatttgttatcagtttatactcacatttgccaccttccttttaggatcatctttgaattgtggatagaaagatacatgaaagaaactttgataggaattattaatatcttcctcgaagtcacagacctttgatttttcaaggtaataatctgaaaatagatacatggtgagcctgtgtaacaaaggttttttttctgcaacaggtgcccatgtacacagctggaactgtattttgccgaacctgagccatctacaactgtgattctttgattcataactttctctacacactagctcaataagaattgctggtttgccattttcctaggaacctagttttgaaaaatcttggaaagaagataattcttcccgtttatgatatatgaactactcccctctgtatttctcctgattcctagtaatttacctattgtagcttcactgaataggaactcactatcttaatagagatcttttatttatttatttatttatttatttatttagagacagggtcttactctctcactcaggctagagtgcagtgacgtgatcacagctcactgcagcctcagcctcccaggctcaagtgatccttctgcctcagcctcccacgtagctgggaccacaggcacaagccaccacacccagctaatttttgtattttttgtagagacagggttttgccatgttgcccaggctggtcttgaactcctgggctcaagcagtcctcccactttggcctctgaaagggcagggattacaggcatgagccactgtgcctagccttattttttggaaacggtcttgctttgtcgctcaggcttaagtgcagtgatgtgtacatggctcaatgcagcctcgacctcctgggcccaagcaatcctcagcctcccatgtagctgggatcacaggtatgtgccaccacatctagctaattttttatagagacagggtctcactttgttgcccaggctggtcttaaactcatgggctcaagtagtccgcttccctcagcctcccaaagtgctgggattacaagtttgagccaccacacccagccaagaagtttttctctcctcagagagctctggttgttagaaacttctacctgagaataaggaaacctgtctctctgtatcatgcaaatggaataaaatagaaacacaactcctcctgttttccagtatagaacctctaactgctcaggtggactgtctgtccttccctgaagtgctgcacccctctgttattcatcaggtcgtgtgtccttataatgggcatttctattggtacataaaagcttccctctcctgttcactcagctgctacccaagtttcctgtgataccaatcttagaagagctttcaagtctccactgcctccttcctatctgccttacagcctgtggtggttgccgaagaactttaattacagtgtcagagtgttcagggacagtcccaactcccttcatgtgaggattgcagaaatgggcttggatcgtatacagacagcgttatgaggcattgctgaagaacagtaagttcttacacagaagttgtcaactaatatatgcattttctttgccataccccaagaggc

SEQ ID NO: 7999 - DNA, 2300 bp, Homo sapien
agcaaatatggcaggataggtagctccaaaggactgtcctgccacagaaaaataaaagaaaaaaaatgaacaaaactgtcagaatcaattgtgggaactctcgaagagagttaaaggtttatagcaatcaagcaaatgctgagccaaaaaaaaggcaaattaaaaatggtagactccacccaacagcagcagaatatacgtttttttcaagtgcacagggaccattctccagagtagaccatataataggccataaaacagtctcaataaatcttaaaaaactaaaatcacacaaggtatcttctttgataactatggaacgaaactagaaatgtacaataaggggttgcggttactagggaaaaaagtttggtggttccttaaaaagttaaaattgagttactaaatggcacagtaattccattcctaggtacataccaaaaagaattaaaatgaggtacataaacaaacacttgcacacaactgttcaaaatagcaccattcacaacagccaaaaggtaaaaccacctaaatatccatcaatggaaaaatgaataaacaaaatatgatatatacatagaatggaatatcattcagccataaggaatgtatatacctatatattaaaattaaatgttttagcatgtacttatgtatgttaaaacatagatgaacaatgaaaacatgctaagtgaaagaagacagacttaaaaggctatgtatgattacatttatatgaaacatacagaataggtaaatccatagagacagatggatgagagtcatggtttgtgtagaggggaaaatgggatgtaactactaaatgggcacagggttttcttctggggtggtaaaaatgtttggaacttaacagaggtggcagttgtaaaatactatgaatgtactaaatgccactgaaatgtaccttttaaaatgcttaattttatgacataaatttcacctcaattcttgaaagtaattattgaatcttagtagcttcaaaaactaccaacctaggattgcaaatttaagatttaggattgtaatcttaaatttgtaatcttacgtacttatggtagtgataaagaaacaatacaatatatgaattaaacacccaactttgtgactttatcagtggggaaggatttctttaacaaaagctccaaattgccaacgataaaaggaaaaactgatgaatttatatatgttaaaattaagaatttctatttaataaaggaagatataggcaaagttaacagacaaatgacagattatgaatgaaatatttgcaacatctaaaaccgccaagtgattaatggacagaatatataaggaactcctgccaagaaaacaaaaaaagagaaaataatctgctccccaaatgagaaagaagatatacagaaatgaagactcaaatggctaatgtgaaaataatttaaatgaaagctgctgaaactttaaattactctgagccttgaataaaatgtgattgattgtaagacctagctcatacgggcaagtcactacaacttttgtttcttcctattacagattaaccttctttcttatttttcttgccctgtaaaacgttgtgaaagattaaatggtgccccttacctcttagttactaattctttgttatagattaacatccttcctttttcatgtacccagctcagaccagatggcgaaaggccccatgactaccaaattgatagggatgcaattttaaatatatctttcctgaaaaagaataagctgtaaccaatcaaactgctgtaactcataaatcagcattgtattaaaaatgtggtaatacttgtaaacttctttgcttctacttatataagtgaagcctcagcttctccacttctcagcaatgacccaactactctggagtcttgttttttctgggtggccagtctcaaattttgcacttgaacaaactcttttaaaattggattctgggcctcttgattatttcagggtgacattttggtgaaccagatgggacccaaattaggccttcattgactcctgctgttttgccaacagctggagccccagcaccagcatggaccgttgcatccaactgacctcgctgaagactgcagaagcccttggtcagactactctcaaggttgaatctccctggcttgactgagattcagactttatggaacctgattcaacaactgatgagactggaattgaagcactactttaaggtaggcgtttagtttgttattctcttattccattatttgtgtatatttgtgattttttcacttttctctgag

SEQ ID NO: 8000 - DNA, 2300 bp, Homo sapien
acaatatgacaaattattgcctgttgaataaatggaagaaactttatggtctcattcatcaggttttaaaactaacactaggtcaggcgtggtggctcacgcctgtagtcctagcactttgggaggccgagacagacggatcacttgagtcaagttaagaccagtctagatatattaaaaccccgtctctaccaaaaatataaaaatgagtttgtcatggtgatgtgcaccaataatctccactactcgggcggttgaggctagagcatctcttgagccctggaggtcaaggctgtggtgagccaagatcttgccactgcagtccagcctgtgtgatagagccctgtctccaaaaaaccccccaaaccaaaaactaacaccattttaatgttaggtatcagctctgaggaagagaacattattctaatttgttagagtgctttgctattccggggattgttagggttaatgctgtttacacattgaataggttcatggatcagagactatgtggttaactgggcagaacaaaaaaaaattgttctgatgtaatagtaacttttttttttcctggagagagtctgactctgtcgctcaggctggaatgtagtggcatgatctcggttcactgcaacctctgcctcatgagttcgggcaattctcgtgcctcagtctcccaagtagttgggattacaggtgtgcgacaccacactggactaattttttgtatttttagtagagacagaattttaccatgttggccaggctggtctcgaactcctgacctcaagtgatctgcctgcctcagcctcccaaggtgctgggattacaggcatgagccaccacacctggccctaatattaatggtaaccttttaaacaactttgtaattgttttgattatatcagtatagcaatcacatgggtctaatgggacctagattttagatttctgtaggatgactgtctctttgagatattcccaggaaaccttaggatatacttatattcatatatgtcaggtagtacatattttaagtcagagcatctcaaattaccctctcaggttgatgaaagtataccagatttccccacccataatgcaatagtggacaatcttatttatataaattatataagaatagcatatatttagcaagcaaacaaaactggatggagaatctcctgacttatttacttcaataaaatttattgtattgctatattacaatatttcaatagtttattaggaaggcacttattgtcatacttactgtaattatgaaatgttagaactagaacagatgggctgggcgtggtggctcatgcctctaatcccagcactttgggaggccaaggcaggaggattgcttgagcccaggtgttcgagaccagccttgacagcatggtgagacctggtctctttaaagaaaagaaaaaagaattagaacagatgtactatcatttaccagctccttttttgatagatgattcttaaatgagcttagatgactttccatagttgtcatacagttaatctatgggagaacttgaactcgaacctagtcttattaactagaaagtagcaccttatgtgcttagatcaccagtcaactaagtaaaaaaaaattttttttaattgcaaaaataggacagagaattcccggcaaattttattttgatttgcagttttcccatgtattctgtaatcttttaaaaagtgttttggccaactaactttttaataagggcaattgtacaacctcttaattctgaattaattatacaaattcttaactctattcccattttaaagcttatggaattcattttataactttatgctctatttatacgacagattatccatagattctgaagattatttaacccaataagggtaaaagcttttgtcattaagtattttaatattcttattgcaaagttgatattaaaatgaaggttgtatataatgatatcttgtttatcttgttttttgttactatagagaattaaattttgggagttctgtggaagtacaagggcagctgataaaaagtccatccaaaaggcaaaatgtggaactgaaggcagaaaaaattaaagttattggaaattgtgatgccaaggtatgatttctgacacttttgtggaggctgtttaggctttaattaagacagcaatctgttttaagtgtgattattaggaagatgaaacttagaatatatttcatttgtgacagataattgaaacaagccatatgacctgtagaggcagtagcaaaaattatttatgtacata

SEQ ID NO: 8001 - DNA, 2300 bp, Homo sapien
gcgtgagccaccgcacttggccaaacgttttactttttaaattagattaaaaaccttttaatgaccgtcattgagttacagaattttttttttaataaaacgtagcctaatatataaaagggtcattgtttccaggtcaaacaaatgcagatagctgtgttggagggcagagggaagagggagacttggaggattctggcaggaaacactcgagtttcctccagtctctgcaacatcttcccaccgtcttgcctgccatatgcaaggtccctccagttccttttatttacctgtcagaggactactttctccaggaagccatctctggcgtcccacgcttaggctctgtcaggcaaactgatcgcccttttatgcaactgtctgtttagctgtctgataccacacaactgtgacttgcgcattggggctatgtctgatttttctctgcggagtactcaggaaaggaacgactgatctcttcaagcgaatcctgttaacagctaagagcctcctcttacttggatccctattgttgactgatggagacggtttccctctccatcagtcactccttgcctctcagtttctcagcctcacctggaaactttagaaatgaagaccctcagatgtgctcccacgttctttcagcgataatctctacaaccttagggcattagctccgccccgtctcggctcctgaccccgccccctcccgcacgcctccctaagcctgggtcacaagtacgcatgctctcccttcttccccgtagcgtgatgacgtaagcggcgttggcgtggtgtggtaggagtggttgcgcgtgttgcggcccgggttctgttcgtaggtttacaattgtcgcgggtagtggggcgccccagctgccaactgcacgtggtttctttctggcgtttgcctagtgtcctgtccattccgccccgttgggaagtgggaagcggagaggttctgtggggacagagctgggagtcctgaaggagaaagcgcgcagccgaggggctctggagtgccttagagcagagctgcggccgcggaaggggagcagctgagaaaggagggccgctgcaggcggggttcgaaccgtggggtctgggctgctcccgcggagggcctgggcggacgcgggatgctgggggtccgctgcctgctgcggtccgtgcgcttctgttcctccgcccccttccccaagcacaaaccttcagccaaactgagcgtgcgggacgctctcggggctcagaacgcgagtggggagcgcattaagatccaggttggtgaatgggaagggagtgggttttttcttgtagggacttttatatggcacatccacatctagcttttcttttacagtcgggtcagacacaaccgccagcagggaaaagttagaaagtgtaggcgtcgcgggtttgcacttttctgatttccattacttttcacaaaactgttccgataactgtaaagcgctggaactttgctttcatgattccagggtattacctgtaaacttgttaatcataccaaaagtgtaaatgaacaagccccctttctctatctttatcccttataatgaatatccaggtttataaagtggttgtcttgacctccctccttgagagcagaaaccgtgtcttacctgcctttgtattcacacatggctgacagcaaatacttgttcaaaccatgccttttaaacttttagcgacctcagtgcctattgtgggggtctgcatgtaatttatttttaatgaattcggagaaagactggaatgtagcagtttgaaagagctctggagttaagctgcttaggtttaaatctctgcatagcgtttatgcgttctacaccttattttcctcttatggaaagagataataattgtccctgagtcctgaaaattaaatgaggtaatggaagtaagatatttagaacagtggctcatagtctacaaatgttagctgctattgtttctcttgctgattatattatttgcagcagctccacatagaagaggtgcagaataaacaaggtgtttgactgtttcttattaggttgctgaagtacactgatgtggttatttattttttgagacagggtctagctctgtcacccagactggagcgcagtgatgtgatctcagatgactacaacctccatctcccaggctcaagcaatcctcctgcctcggcctccagagtagctgaaactataggcatgcaccaccacactctataattttttaagttttttgtgaagatgagtctcactgtattgcccaggctggtctcaaac

SEQ ID NO: 8002 - DNA, 2300 bp, Homo sapien
agtgctaggattacaggcgtgagccactgcgcctggcctatatattttttttgatcgataagaagtgtattcatttatttgcacagttctgcaggctgtgcaagaagcatcgcaccagaatctgcttccactcaaagtaaataatgtcaaggtttgttgtcattcagccattcaggaaggcaaaggggagcaaacatcacatggcaaaagaggaaggaagagagagggaggggggtgccaggctcttttcaacaatcagctttgcaaaaactaatggactgagaattcactcctgcaagggtggcaccaaggccttcatgatccaaacacttctcactaggttccacctccaacatcaagtattttcagatgagatattttctagcctgtcttaagaatgattttacaatttttccaggccatttgccctcctggcaaccttccgtgttcaccttctggcaggaaattttcttacatgcctacctggcaaaatattgatccacttcaaaaattcagcttaattttctccttctctagactatattatattttatccaacatattttatattataagtatataatatataatatatccaatataatttaattatatattataatttataattataattttattatatttataattttaatttattaaaagaaccagggaacacatttatattatataaaatataaaattgtgatacatgtatatattataattgtattatattttatccaatataatatttggataaaatatcaaaaataattttttggataaatttaagaggtagcctaatatataagggtgacttttcagtccaaacaaatgcagacaactcatacatctatgtgtgcacttactggtttatatttcagtagtctcttttcttgcttgtctccatctctaaagcatgagctccttgatggaacagatcaccttgggacactatgtaatacagcatactgcttaagtgcatagagccagcacttctgggtttaaatctcacacttagggaatgtgtatccttaagtaggtcatctagcctttctgtgcgtaagttctctcatttgtaaaatgggtataataatagtagcaactttaagtaaggtaaaagtgagagagagagagtgagagtgagagggagcgggagagagacagcgagggcgagcgctggtcttgaactcctgggctgaagcaatcctcctgcttctgcctccctaagagttgggattacaggcgtgagccaccgcacttggccaaacgttttactttttaaattagattaaaaaccttttaatgaccgtcattgagttacagaattttttttttaataaaacgtagcctaatatataaaagggtcattgtttccaggtcaaacaaatgcagatagctgtgttggagggcagagggaagagggagacttggaggattctggcaggaaacactcgagtttcctccagtctctgcaacatcttcccaccgtcttgcctgccatatgcaaggtccctccagttccttttatttacctgtcagaggactactttctccaggaagccatctctggcgtcccacgcttaggctctgtcaggcaaactgatcgcccttttatgcaactgtctgtttagctgtctgataccacacaactgtgacttgcgcattggggctatgtctgatttttctctgcggagtactcaggaaaggaacgactgatctcttcaagcgaatcctgttaacagctaagagcctcctcttacttggatccctattgttgactgatggagacggtttccctctccatcagtcactccttgcctctcagtttctcagcctcacctggaaactttagaaatgaagaccctcagatgtgctcccacgttctttcagcgataatctctacaaccttagggcattagctccgccccgtctcggctcctgaccccgccccctcccgcacgcctccctaagcctgggtcacaagtacgcatgctctcccttcttccccgtagcgtgatgacgtaagcggcgttggcgtggtgtggtaggagtggttgcgcgtgttgcggcccgggttctgttcgtaggtttacaattgtcgcgggtagtggggcgccccagctgccaactgcacgtggtttctttctggcgtttgcctagtgtcctgtccattccgccccgttgggaagtgggaagcggagaggttctgtggggacagagctgggagtcctgaaggagaaagcgcgcagccgaggggctctggagtgccttagagcagagctgcggccgcg

SEQ ID NO: 8003 - DNA, 2300 bp, Homo sapien
ttcatcctcacaacaaccctgtgcaattggcattattgtccccattttacaggtgaggaaacttcacagagctgacaaatgacagagccaggattcaaacccatgtctgttgctgcgcaggactgtgctccctcctctactcaagagcttcccagcagagctgagagcaacgtggcccatcagaccaaagttctcatggtccagattaattttctctttccttccaaccctttctccaggttcacaaccgaaatctcctatctctggactttgatcgcgtaacacgcacagagaagatctatgatgaccaccgcaagttcacccttcggattctgtacgaccaggcggggcggcccagcctctggtcacccagcagcaggctgaatggtgtcaacgtgacatactcccctgggggttacattgctggcatccagaggggcatcatgtctgaaagaatggaatacgaccaggcgggccgcatcacatccaggatcttcgctgatgggaagacatggagctacacatacttagagaaggcaggtgtctgtctccctgcatcactggccttgccatacagaaggccaatcattcacggccaagcccagcctggtggcctcagtgggctgtatctgacccatgtcaccaaaaggaaatgttcaggaaagtctgccacagagggcatggggtcccaagaggcatcaggatggatcagggagatagcatggcaggtggtggtcctagggcaggagaacatgaaagacctgcctgatagagtagaggcccaaatactcactggatttgcagagcaggactcggggttcagacccaggccaagggtctgctcccaggtctagggcatgtggtacaatccagttgtggagaaccaggcagaagcctaggcatcagtacataggcaggaggcacttactcctgagcttcaagtgctgggcatggccttagtaaatctattctgctctagcatcagaactcatgtcatcccaggggtaagaatcagaaatgacctaaaatcaaaagttggtctcaaataggaaaaaatggtagctttgcagcataaagcctctaggccttttatctgctgatcttttcctgagaacaagtgcactgcatgccccatttcaagtatccagatccctgctttgtttcctgaccctggtgacctgtccagggcataggctgtgcttgctctgaggtgggtctcctctacccactgggtgagtacccccaaaagtgacattttgcgctagtactaagagagagagagaccttggaggtcatccaacatactgaaaacccaaacccagagaggggaagaactttcccagggccacacaaggagactattgttagaaaccaggttctcccattcccatcacagtctgccctatcccagagtaggcttatgacctgtcattgtgcaaagccttaaatgcccttctcaaatatggtcttcgtgctgtaagccacagggagtcagcggaaactgtttagcaggtaaaagaaattgtgagactgtgtttggaggagctcactcttgcctgaataggaagattggtttgagaagtctggggcaaggaagccagactgctgtacatacttcaggccaaagcttcttggccgttctcacaccccaccacgcacaaaagtaaccaggtctgtcctgcacaaaggggcaaacccacgaggctgctcaccataggacagcaaatggcctgagtacctggaggcctaggccccaggtaggttacaggtgtgctaaggttaaagctgtgctaagatgaggctgagagaaagcctcatcttggcacatctgtaacctatttgcagtatcccgtgacactcctgttggagagctctggttggagcataactcaagagaaccatggaaactcaggattctccttggacattcattccgtccctttaagtctcgggtatgtagacctaccctttctcctcaccaccctcctctcatctcttggttttcctctccctccagtccatggtgctgctactacacagccagaggcagtatatctttgagttcgacaagaatgaccgcctctcttctgtgacgatgcccaacgtggcgcggcagacactagagaccatccgctcagtgggctactacagaaacatctatcagccccctgagggcaatgcctcagtcatacaggacttcactgaggatgggcacctccttcacaccttctacctgggcactggccgcagggtgatatacaagtatggcaaactgtcaaagctggcagagacgctctatg

SEQ ID NO: 8004 - DNA, 2300 bp, Homo sapien
aaatcaaaaccactatgagatatcatctcacaccagttagaatggcaatcattaaaaagtcaggaaacagcaggtgctggagaggatgcggagaaataggaacacttttacactgttggtgggactgtaaactagttcaaccattgtggaagtcagtgtggcgattcctcagggatctagaactagaaataccatttgacccagccatcccattactgggtatatacccaaatgagtataaatcatgctgctataaagacacatgcacacgtatgtttattgcagcactattcacaatagcaaagacttggaaccaacccaaatgtccaacaatgatagactggattaagaaaatgtggcacatatacaccatggaatactatgcagccataaaaaatgatgagttcatatcctttgtagggacatggatgaaattggaaaccatcattctcagtaaactatcgcaagaacaaaaaaccaaacaccgcatattctcactcataggtgggaattgaacaatgagatcacatggacacaggaaggggaatatcacactctggggactgtggtggggtcgggggaggggggagggatagcattgggagatatacctaatgctagatgacacattagtgggtgcagcgcaccagcatggcacatgtatacatatgtaactaacctgcacaatgtgcacatgtaccctaaaacttagagtataataaaaaaaaaaagaatctaagttagaatgttttaaatcaaatttaaaatttcaaatcatatgtatatttaaatcattgtcatatgcctgtgacaatgatttaaaatatgtttatatttatgtatttttttttgtcattctgtcagtggtttaagtgtcaaagttatttttcaccttgttataaaaaacattgttaccttagagtgtatcaagagccttaaaaatgttcaacctgccaggtatggtggctcacacttgtaatcccattgcttttggaggctaaggtggaaggattgcttgagcccaggagttcaagacctgcctggtcaaatattgaaacctggtctctacaaaatatttcaaaaattagccgggtgtggtgatgcatgcctatagtcctagctacttgggaggctgaggttggaggattgcttgggccgaggagtatgaggttacagtgagctatgatcacattgtactactgcactacagcctgggcaacagaacaagaccctgtctccaaaaaaaaaaaaaaaaagttcaacccttttctctagtaatcctacttttaggaatctattttgatttgaaaatctaaaatgaagatattggatattgatttatctaaaaagtatttttgaggtataattcacatagcataagatttactctttaaaaacatacaattgtgtggcttttagtatatttataaagctgtgcaatcatcactatgatccgattctggaacatgtttatcaccgcaaagagaaatcccatacccattcgcagctgctccacgttccctcctgcccctcagcctttggcaaccaccgtctctagagattcttgcctattctggacatttcatataagtggagtcagacaatatgtagccttttacatgtgacttctttttcacttagaataatgtttaaactaaatatatacagtggtacttataattctgaaaaactggaatcaaactgagtatctatttgaggcttggttaaataacttaaagtattttcatacagtggaatattgtatggtcattaagaaaaatgtttatgaaaaatattcagtaacatgatataatacaatgatcagtgaaaaactgtataactgttttaaaactcttacctattttaaactgtaatgtaagggcatttggaaatatcctaaaatctacaaacatacaaaatatttacaatggttttctttggatatggagaatctggatggtcttctccatgtattttcctcgctttcttcagtgatgatgtattgctttcatagttaggaaaagcatcctttaaagtcccctccaccgcctctgctgtcctcacacctccctccaccttcgttccttctgagcagtctgtgcttgtcctctcctgcagaccaagtccggaacagctactacatcggggccgatggctccttgcggctgctgctggccaacggcatggaggtggcgctgcagactgagccccacttgctggctggcaccgtcaaccccaccgtgggcaagaggaatgtcacgctgcccatcgacaacggcctcaacctggtggagtggcgc

SEQ ID NO: 8005 - DNA, 2300 bp, Homo sapien
acaagtgggttgggacagaccccagggatttatgctctgactggattattgccaagagaaggtacaatttctgaggcagccaagatcttgcctgaccaaggactgcaggaccaccaattactcagacatcttgtccttcaggcctgtcttgttccctgtgattaagaattatccatccattccatactgctaaactggctgtgagtatttttctcaaaggttcatgtgggctttcttatatttgggcaactttttaaaatttgaaagtgccacattcctcagtttttaaatgtattcatcaatttaataactttttaggcagagggaaaaaagtcatactgctcaaaaggcatacgtggacacattccaatttcaaaaaaacattaaaatatgaaaagaaaaatcacttcttggaatccaggaaacatggtacctgtttttcctctttggtagctctgccaagctctttccttcttgagtaccaggctcagatgctcagttttgcagctgcctcactagagtctctgtgaaaagctctttcggtttcatcttctgtttaaactgtggaaagtaataagaagtagctgctaatgagcagcggccttgggaagtcacagcccacattaaatgggatcatctgagatgggcctctacagatgctgttccctccaagtcaccattaatggacatatgtggattcagcaaggagcagctttaaaggataaattgacacaggctttttcactgttcaaaggcagaaaaatatagattgtcagtgaataatgcatagcaagtttgaggcagattttagaatttttgcatgtgtgagagagaaagatggagagaggagggagtggggggggcctgtttgaagccattctagcagaaaatattcagtgagggtttcccatgaaaactattgcttaataactatctttagttcttgacatagcctggaacataactagtttcatccagcaaaaatttactgagcacatataatcctaacgatgatgatagctaacatttttggagcacttattaactgcaaagcatattttcagcattttacattaagcagtacctcataaggtacctcatatagtaccgcatatgcctaggaggtaagtattattgtctctgttttctgcatgaaggcagtgagaagcactcggaggttaggtagcttgccccagtcacacacctaattgggtgtttggacccaggcaaacaggctctatagaacctattctcttaactgccaatctaaagacaaggggccctattccaggaccatggtcagcactagagaagttcaccatgatgtgtgtgtgtgtgtctgtgtgtatgtgtgtttgtgagagagagagaaatgggatggtggagatagaggagagacaagagacacacatgacagtgactagcacagtgccaggcacataaaaccagtgacagctaacatttacataacactatatgccaagtacagttctcagctcttcatattcatgatctcactcaatcctcagagcatcctgcaaagcagggtacaattattgtcctagtgtactgatgaagtaccagaggcatggaaggttaagaatttggccaaggtcttacagcaaggcagccacagagctggaacctgagctgaagtagcctggctgcaaagccaagctcctaatctctgtgccatagtgcctctcacagcacgcactcaaatattggagaatttgttcattaacggagcagtgactcccacacccctcagctgcaagaccactgaggaggcccatagaaaggctgaggggtgtacaggacagggagtcatacattctggccagtggaacaggggaagcttctggaaagagatgacattttagcagagcctggagggagtcttaagccagcacttactgaagacgggggcagtgcagaggaaacagccaaggaagggccagagacaggagagtgcagcacaaatccagagatagtattttcatctatagaaagaaactctatgtgtattttacagctgaaatttgcttttttcaccgtaagtttcatttagttaagaatctagggaggagccaagatggccgaataggaacagctccggtctacagctcccagcgtgagcgacgcagaagatgggtgatttctgcatttccatctgaggtaccgggttcatctcactagggagtgccagacagtgggcgcaggccagtgtgtgcgcgcaccgtgcgcgagccgaagcagggcgaggcattgcctcacctgggaagcgcaaggggtcaggg

SEQ ID NO: 8006 - DNA, 2300 bp, Homo sapien
acatacatatgtatatgtatgtatatatttatatatatatgtgtgtgtgtgtgtgtgtgtgtgtgtgtgtatatatatatgtgtgtgtgtgtgtgtgtggtggcacatgcctgtagtaccagctactcaggaggctgaggtgggaggatcgctttagcctggaaggtggaggctgcagtgagtcaagattgtaccacttcactccagcccgggtgacagagtgagacccagtcatacacatacatacatacataagtaaattaaaataaaggtatacacttgcttaagcgcaccccagattggaccaaatatcaagggtttgtagggggctcaggaagtctaaggcagtgaatttttaggtggggtggaaaaatcagcagtagggtgcacctgtcggcacttccagcccacacaaaacatggctggacctcctagagacacaggtggcaaagggttccccttagtgccaatacctcctagtgtgatagatccaacaatccagccttcaagtccactgaagaaaacactcctcccctcagaccatgccagctacaatcccctgggtgcccacttgaagactcaccatgacctatgccagtttcccagcctggctcagaggaggttccacatggggcccagcacttctgaactcctagttcctacaaccagcttcagtaatcctttccaggtggacctgttctctgaggtactagaaccactgtctggagcagggcttcataaaccttagtgtgcacagaaatcgcctggggattttgcttaagtgcagatactgattcagtaggtttggaggaggcctgtcattctgcgtttatgctcagctcctaggtgagctgatgctgatgaccacacataaggagcaaggatccagtcatgattctcaagcccacatcaggatcactcaggaagcttttcaaaataatgccgatgcccaagctccaagcccagggatctgatttcacccaccaagggtggggttttcccaccattattttctaaaatcgccacagataatttgaatgtgaggccagatttgagaatcactggtctagaactatgacagacagaggccatggttagcttgtctttatgtctctagcagctagccagctgttaatccatgaactcaaagaattgagaaatcatacatgtatcatatcaaccatgtatgaagaatctttcttaagcctctgaacaactcctacttcagcctccagactccatctgcctttccctcccatcttagaacatcagctgccattatttggtgggttatggtgggtcagggactctgtgctcttgtcattcccatttcccatatgtgactattgaagctcagagaggcaaagtaacttgcccacagtcataagtagtggactatgctctgaactcaggcctatttgactccaaagtctacccttttgcctactattttgttgttgttaactccttcttcatgttttgtcagtctaatgagaccatcacatgtctcagtggcagctctttcatggtttcccggtgatcagggggctgacgcttcattgttgatgataggctgcatgaggatcaagcaagactgtatatgaagccactttggacactgttatgggctacatgggctatgggatggattagtggtgggcatcttgccagtcatttgagtatcggtgtcttcattgtcaggttcacctggagtggcccacagacttagccatcaacccaatggacaactcactttatgtcctcgacaacaatgtggtcctgcaaatctctgaaaaccaccaggtgcgcattgtcgccgggaggcccatgcactgccaggtccctggcattgaccacttcctgctaagcaaggtggccatccacgcaaccctggagtcagccaccgctttggctgtttcacacaatggggtcctgtatattgctgagactgatgagaaaaagatcaaccgcatcaggcaggtcaccactagtggagagatctcactcgttgctggggcccccagtggctgtgactgtaaaaatgatgccaactgtgattgtttttctggagacgatggttatgccaaggatgcaaagttaaataccccatcttccttggctgtgtgtgctgatggggagctctacgtggccgaccttgggaacatccgaattcggtttatccggaagaacaagcctttcctcaacacccagaacatgtatgagctgtcttcaccaattgaccaggagctctatctgtttgataccaccggcaagcacctgtacacccaaagcctgcccac

SEQ ID NO: 8007 - DNA, 2300 bp, Homo sapien
agaaaacgcctgtcttggcacttacagaatgaaattaatgtacattcacgacaggaccatgagaaaggcttcccagccttgaggctgcctggtcctctgtgtgaaatcactctccagcctgaccagcctaagaaggaacagttggtgctccagcaggttctcagcactcagaggcccctgggcatcttaaagcaccctgctggccagtgagagacacgtgggtccccggagcaaaggccttgaaactcacaaagtgccagccactttctcatttttacaatggtcattaataattattgagggctagttactacaagtcagatgttagaatccctgttttatcaatgaggaaatgaagacttcaaagtgaagtaatatgcccaagttaatacgaccagaaaattttataattcaagtctctccaccttggtgaaggcttcctgacccttcttccactgccttccccagagaaaacatagtgaaacaaaagtgaccagaatctcctgtattttaccatgaccctcttgagtctgtcctttcttgtgctgctcacatggtactgattcattcctgtgcctttccatctaaactgggtgctgcccagggccatgtctcatctgtatcccacgacagttcatggttatgtctgattcttgcgattctgaacctgggatggaaattactatcacccatgtacactattaaagcaccctgttcctggtcctagccacccgctgaattcgtatttccaggagttaggccagcaggtgtatattgaaaaacctcttcaggtgcctgtgatgcacatcacaggctgagaggtactgatacagtggagtggttctcagactctggtttgtgtcattatcacccaaggtgcttgtcaaaaatgcagatagtagctcagactccacttgagatattttgaagcagctacctggggggtgcagtttagcaaactccccaggggattcccatacacatccaagagtgagaaatacagatttggagcaatctcattgtttgacagctgggaagacaaacacagagatgctcagtgacttgcccgaggtcacacaagttgggtcagggagaaagttaacagggtgagacagtctagtgaatggagcaggtgatgttgagtaatgattctgactcctctcctcagtgtgctgcctttagaaattcaattcaacaatattctctacacaaatccataggattctattcagattccgtagttttgtaatgatcagtgagactaaaataataagaatagaaaagcatgaaggacgggccgggcatggtggctcacgcctgtaatcctagcactttgggaggccaaggcgggtggatcacctgaggtcagtagttcaagaccaacatggtgaaatctcatctctactaaaaaaaaaaaaaaaaaaattagccaggcatggtggcgcatgcctgtggtcccagctaactgggaggctaaggcagaagaattgcttgaacctgggaggcagaggttgcagtgagccgagatcgcgccactgcactacagcctgggtgacagaacgagactctttttttaaaaaaaaaaaaaaagaaagaaaaagaaagaaaagaaaaatggttaccaaaaaggggaactaattattataattacagagcttcagaaataggtgaatttaaataattcacagtgttaatattgaaaaagatcctccttaccactgtatctctagtgcttaaaaacccccagaagttatgaatccaggtttagtggatggctaaggggatagattaaaatctcaggaggcagcaaggtgggaggaccagagccctggaagatctgaaaaagttctaatccctgctttgaacaagtcactcaaggcctctgagcctgagactcctcctctttgagagaggaatgaaggttgtgggaggctcaaacccaatcatgtagaggaggtgctctgtcagttagcaaggctccaggaatgtgcgggtcattgtcatctctgatgctgagttcctgttttggcttctctgcccccaggcattacagtggacaagtttgggctgatctacttcgtggatggcaccatgatcagacgcatcgatcagaatgggatcatctccaccctgctcggctctaatgatctcacatcagcccggccactcagctgtgattctgtcatggatatttcccaggtaagatggcttcatctaccaaagccctgggactgcccactcatcctctcatctgccacccagccagcctgctggccattcatctttgcactgataagcct

SEQ ID NO: 8008 - DNA, 2300 bp, Homo sapien
aaaaccactgccttaagacctattctctatttggactggcctgaatgaatgatttataaagtatcagcttgtcagcctgggataacttgattcattcattcttcctgttttctcatttaagaagtccgtcataaatggctaatttattccttttacatatatctattgattatctgttatgagccagacaccattctaggtgttggagatataaaaaaaaataaatctctcatcctgcctgcattcctctaccctgcggaggaagcttctttgcagtcttcagcgtaatttttctaaaaagcaaatcagaccacaatcctgtccctgctcagaaccttaaatggttctctactgcctaaagtcttgctactcaaggggtgacacatagactagtagcatcagcattactatgcttgttaaaaatacagaatcacaggctctccccaagacctactcaatcagaatctgcaattagatccccaggtgactcctatgacactgaggtctgaaaaacatgggactgcaggatgccaacacagaccttcacatcctcacacctgatgtgacctctcctatttcatctccaccctcttttttcaaatatacttagtgccactctggcctgcacacctgtcatctcctgcatccaaacctttgtacgcatgctgccctcccctagaataaccttcccctcatggctgccagctgtaattccttcctaacttgggagtcacgcttaaatcctccaggagcttccttagatgccctcccacatgccccctgacttcatcgcctcatcatccctcacttccccaacccagtgctcctggattctgttggagagctcagtgctctgcaatttgtctattatttaggtgggtgttggtctcattcaaaatatggtgagccctggaggcaaggggcaggcctttttttctttacatccctccattccaactccatctctgctgccaggcactggggatgcagatgggatttagagcctgccttggggagcgcccagtctggtggggcagactgactttcaaagtaatgagtgtacgtacatgttcttgacacaggtttgtggcaatgcgtgagatgtttactgagctgaaccattttcaaggctgagggagccaagtgaatgatcactgactcccctcctcatgcacctttcccagtagatcttccattctcccctgatggagacctcctgactcctaggccaagttctcgggagactgcgtcattcgcatggacccagctttgtcccccatcacatcctggccatcagtggaccttctaagtgtggcctctatcttctcacatggctagcagagtgtgcacaattggtaggaaatgaaatgctcacagccagccaggcctggaaagggttcatgctgcttattttaactaaagagtaggcggccagttctcttcattcttatcccctgctcaatgagtcaagttagtacattaataaagtaatgcattaattaatagatccatcaaacatttactgaacacctattttgtgccaggccacagaggcagatgtttagaatacaaagataaatggcttctggttgctgctcccagctgaggcttttctcctggttcgtaggaggaggctctagaatctggagagctggctgctagccctggatcccttgtttcctgaggtaagttactctaattctcagagccttgttttccttatctgcagtatgaggattgtaaccactgagctgtctcacaaacttgagaggctcaaacagaattacatgtcaagagtacttggtaagttgcacaatgctatactaattgtgcaatggttactgagacaggtggtgttagtgacttaacccaagaatcattctctaccccattttccaggctaacacaagccaaattttgctggagaaagcaacacacttagccctggggcaatgactcataatttggctaaggcaatcaagacaagtctgtttcctctttgccagatactcaacttcccagcctcccttgcagctagtggtaatcatgtgacccacttctggccagtaagatgaaaaaaggaagttcactggactggcagagggagcttgggagggcttttgctgatgccacttgttcttcttgccataaaggtaagctctgctggccatcttgggattggaaagtgacaggcatgaggactacgagccacctttaaggacggtggagtagagcaactttccctttctacttcccccattcctagggccccactcaaggcaccatcctctcctgggtgg

SEQ ID NO: 8009 - DNA, 2300 bp, Homo sapien
caggcatggtggctcacacctgtaatcccagcactttgggaggctgaggcaggtggatcacctgaagtcaggagtccaagaccagcctggccaacatggcgaaaccccatctaaatacaaaaattagccagccgtggtggtgggcacctgtaatcccagctactcaggaggctgtggctggagaatcacttgaacctgggaggcggaggttgcagtgagctgagatcatgccactgcactccagcctgggccacaagagcaaaatcctcatctcaaaaaaaaaaaaaattctaccctgaaggtagttcaagagccagtctctggagagtaccaacaggatactctgtacttggccagaggctgctgaatgttcctgcctaatagagttactctttatttaaaataatttgccataaagaaacatagtaaatgtagatgaagacaacaaaattttactattaagtggattttgtttttcatgggaattcccagcaattcctcaccttataataaacagcaatgttttttaagctaggatcctagatctatttgggaaaaatgaattcagggaacttctcaaataatggctttttgggggttaacctcctatgcctaagtgtatccttcatgccttattctttagcctagtaggtctcttgtataataaggcattttgtagtattttttatgggtgagtgtggcagtatggggcaggaaaagtacagggaccttgagtctttgagggcctatattcaaattcctattccttctcttggaatgacctgaggcaaatgacctaaaaccttagcacctcccccttacccttcttttgagtagggtagaatttcttttcttcatttggaaaaacctttattttgtacgggtatctcctttgtcccagagtcctgaaaatcaaatttatagtcataggattctagggccagaaaggacctcacgtgtcccccagttcagaatttccttctttcagatgagggaactgaggcttagaggggggaagtcattagccagaggttgcaatcagcagctgggccagaaccaggactcttctgcgtaaggacctctgcccaggtgactccaaccctcccatgtggtatattacaggaagatcgacccattccacagatcaagtgccttagtccattttctgctactgtaacagaatgcctcagactgggtagtttataaagaaaagaaatttatttagctcacagttctggaggctgagaaatccaagagcatggtgctggcatctggtaaaggcctcctgctgcttcatcccaggggaaaaggcggaagggcaagtgaacacatgtgaaagagacaagcatgaggggccagccttgctttataacaacccatgattgagataactcactcactgctatgagaatgcattaatccattcatcaaggcagagccatcacaatccaggcacctccattaatccctacctcccaacactaccacattgaggaatttaggttccaacacttttgaggaacacactcagaccatagcagcaagagagtaagatttagagaaggccagtgacttatttgtctggtgaatctgtgacagaactgttaacgggggccactggccactaaccctagaccttagccccatgttgcattccttgtctactcccatcacagtatgcagtcaatcctttgtgcaaataacacgcagttcctactttgctccaagccctgtgctgggtgcttgggttgtataaagggcagatcttcagtccctgtcctgcaagcttcagttcactcaaggaaaggtgtgtaaacaattattttaaggcaagaccattactcccatagcacaagatgagatgggagaacagaagaaggtacatttgagcctctcaggaaggctgcatagaggaaccatctgtgtgggatttgcagggtgccaggaccccactttcttctcttcattgctgtgggaccaggaacaagcctcattttcccatagtgtgtgtttgcaatgactgctggagcggagggtctgtgagaaaggattggggcatcttgccacctcactcagttggatctgtgttctctgcttcaacagaaaagatcccgcaccatcctccaggatccaatggccttggagagagggctgcagggcccacggacattgctgactcttcagaacgtgctgacatggagccaggtcagtccccttgtctgctctgattttctgtcattagctgcaaatttgtggccttgatgagaaatgcaatctcagactctgaacatttgcatgtt

SEQ ID NO: 8010 - DNA, 2300 bp, Homo sapien
gtataagcccgtttctatcagtcacttatgactctggtttatggaagcaggaaggaagccaacattagataaagccagatcctttacatatatgtaatgatatgtgatgggttttttcattgcaccttcacggaagctctgtgaagtgactattaatgaaattgaaaatttgtgcatctattctatgaaactggcaggtgttaccaagccaatgggtaagcaaggatttaaatttcacctgtttaatttcaaagctcagtctatcctaccagtattaccaaaaaatactatctatagaacatctgatttaaacaatccccatgtacttgtttaaagtgcaacttgcttggccccaccccacacatactgggtcagaatctctgcgggatgcatgtcacaagttccaggaatatccaattctaacaagtaagtccaggttgtattcatatacactaaagcctgataataatttcacttcaccttgagtattcttgctctctctcaaaatctcaaaattatataagactcaccacagttaagcatttcaattcatcacaaagacttactaatttggctttattcactatatctgagagggttttttctttagaaagtggagaaatatcattttagtttattattgcataacctggaactttcttattctgtcctctctcttacaaattgctttgtgtatcatactgggtccttttacgcagtttaaatgaggcttggaacaaaataaggtgaaaagacctaagcaacatcatcatacattgcaatgtgcttctttcagaaagttataggtggaagaacacatgactagaggttaaaaaaataaattttaacactgggcttctcactgtttctgtaacctgttgtcaatccctctggttcatctttttctaataataataaaaaccataatttattaagcttacaaaattaactttcttttctacttcgaatgaggcattggcttgcaaaagccaattcagaaattgtttggcatttcctccaaatattaaacatatatgcactcaacaacttgtacacgttattcattatttcaaaaaatggaaacaaatgtacatgaactgatgaatgaaaaagtaaagtgtggtatatctatacaataggatattatttgacaccacaaaagaatgtagtatggatacatgataaaacacggataaacattttgcttagtgaaagaagccagttctaaaagatcacaaattgtgtgtttccatttatatgaaatattcagaatatgcaaagccatagagaattaaagtaggttagtggttgtctagttgggagggggatgacagagtgtgtgctaatgggtagagggtttctttttgaggtgataaaaatctaaaatggactctaaaatggtggtggctgcacaactctacaaatatactaaaactaattgtacattttaaacagatgaattgtaagatatgttaactgtatctcaataaagctattttaaaaagtaaggtattagaaaataatgtattaggccaggcgcagcggctcacgtctgtaatcccagcactttgggaggccaaggcaggcgggtcacaaggtcaggagttcaagaccagcctgaccaatatgacgaaaccatgtctctactaaaaatacaaaaattagcctggcatggtggcacgtgcctgtaaccccagctactcaggaagctgaggcagaagaatcgcttgaactcgggaggtggaggttgcagtgagctgatatcgcgccactgtattccagcttaggtgacacagcaacgcttcatctcaaaaaaaaaaaaaaaaaatagactatacaggaattgtgcctatgttgtttttacttgaagcagttgttcacagcatcagtaagctcttttattatttttagaacagaaacttattagaagagcaatttacagttgttctgagtgttgactaagaagtctggaaattggaaaatatgctaataaaaatatcagggtcattatatatggttttggaatctaggccaatcagtattggtgtgatgtaagtcagttctggaatgccatgataaaggaaactgaagaaggtcaatctagaatgatacttgctggatggattgaaaaagtgaagctttagcagcaagtagaaaaactgaagcatcagttgcagtaactcatccattgagtgaaaaggttcttcccatgtccctactctcagaaatgcattctgaaatttcgaagaaacaagacattacacaagtacatggcttcactaccaaggggaagggcaaaa

SEQ ID NO: 8011 - DNA, 2300 bp, Homo sapien
ctatatcaatgaacatttcgaaatctctttaaatggacacatatagaatataactcattgaatattaccatacacaaaatctctcaggatattgagtggaaaacattagaaacagcaatggacaaagtaatagagtaggtaaataagaacgaaatcaaaagcacggatagaaaattagtttatggaataaagacatgttgtgttttgctactagagtagatgaatataaattttcttaagatgtagatagaatgacaatgatggaaaacatatgaagaaataaagtagtgtagttaccaagatatatgaggatgaaatactgtgagggctccagtacagagctaggtataggaaaggaagaaacataaatgaaaacattatataagtggtttggaaattatgccatattgataaaggataaaggactggcaatctatagtgaaggatggctaagaatcagtggcacacagttaaagtaactaaactgagtgtatgtgtttgaatcaatgatattcagcacttattgttgatttttttttttcttttttttttagacggagtctcgctcagtcgcccaggctggagtgcagtggcgcgatctcagctcactgcaagctccacctcctggggtcacgccattctcctgcctcagcctcccgagtagctgggactacaggcgcccgccgctaagcccatctaattttttttgtatttttagtagagacgggggtttcaccgtgttagccagtatggtctcgatctcctgacctcgtgatccgccagtcttggcctcccaaagtgctgggattacaggcatgagccaccgcgcccggcctattgttgattttaatgtcagaaacctaggagaggacttcagcttccagtgctgacatactggcttctattatagcccaatcttctcactgagaaaaaaaaattttaaacaatataacatatataaggaggcagtggtttacccgcaatgggaagcaactaaggtagccaatacttgagagaccgaggtcccagataattgaaacacattcaattaagctagccacctctgttcctttattctcaaaaggcatttgtagattctcaatgtggaacataaagacaaagcagcaacctagatatttcgacagtaatgtcctaaggtaagggagataaaaacagaagttcagggtaacaaggaaagctagaatctgaggatctaagaccccagagaaaattgagatgaccgtccacagacttttaacattgtctgttaatgtcttttaaacattgtctgaattttaactgatgcacaggtgagagggaagaaatcaagtagtatataacaactaggaatataggaaattaaggagaaatgtcagcattcttgaggaattggaggtggggattagtttcaacggctgccaaggaaaagaagcccatataaatctgccattttttaaaaatgaaaactctgaaagtctacactctaggaataaagacataagaagggagaccagtgttcacaacaccaaaaacccaggatcaaatcatatcaatccagactgaaacaaattaattcacccctaatctaactgctagtgacaagaaaataaatcctctcaagaggaaagtaatatccagaaactctacaaatttttgtataattattcagcattatgtaatatttccagaaggcatagagacaaatccaaattaagaaaaccaatttaaaaaaacacaaataataacatgcctataggtaaatcaatatattggaattatagctatggtcttaaagacagacacatttgaaatattcaagaaaaaacatagcgaaatgaagacattcatggttttttaaatcaatgaaaattgtggaactaaaatatatttgctaaaattaaaaactcaagaaatgggtttaataacagagtgaatacagaaaataagcagtaaaggaagtaaagtagaatcatgctgctataaagacacatgcacacgtatgtttattgcggcattattcacaatagcaaagacttcgaaccaacccaaatgtccaacaatgatagactggattaagaaaatgtggcgagccaagatggccgaataggaacagctccggtctacagctcccagcgtgagcgacgcagaagacgggtgatttctgcatttccatctgaagtaccgggttcatctcactagggagtgccagacagtgggcgcaggccagtgtgtgtgcgcaccgtgcgcgagccgaagcagggcgaggcattgcctcacctgggaagcgcaaggggtcaggg

SEQ ID NO: 8012 - DNA, 2300 bp, Homo sapien
ggcataggatcttgaaaaaatgtcaaatatactatatgataaataataaaaataatttttcaataataaaattatgtgcttgatcagatgagagcgtaactaagagaaggggtggggatagagatgatgtcctaaaaaaacaatgcctgagctggagctttctgtgtaggcaaaaggtaaaagtgcatttaaggtagaggaagcagcattcttcagccacagatatttatagtggatcttttagggatatatgacaaactcagaacaatccagccttctctgagaaatgtctccctaatctatgatgttgacataggtgagtactgtggagtcaacagcacatccctggacatagcttcatggagaagtaaggcaaatacaatttcttttccaaataattttgatgcaggaccttaagagagtcatatccctctgcttgtatggctgtaactcttttcttttctttttttttttgtttttttttttttgtttgttgagatggagtctcactctgtctcccaggctggagtgtcgtggcgcaatcttggctgactgcaacctctgcctcctgggttcaagcaattctcctgcctcaccctaccgagtagctgggactacaggtgcatgctgccacgcccggctaattttttgtattttagtagagacggggtttcaccgtattgcccaggctggtccagaactcctgagctcagacaatgcgcctgccttggcctcccaaagtgctgggattacaggcgtgagccaccacgcccggccagctgtaactcttaacacataaattcaatcactctgagatagcagctatgtctcatgtggcctgaggttacagaaggagaaaaagaaatgagacatatagagaaaagcagaagagctcagtgagggaggctgatcaccttctaaatatcaatttcagtcctattgatacccagccataatctagctcaaaggttctgggagatgcttctatgttcttataataaatttccactttttgacttaagcagagctgaactggtttcattagtcgtagctaatgagttcttactaagccaggtattataaagcttgagccaaacacttcaagctcccaaaggccaaagctggaataaattgagtgataaaataaacaacatagtattgaactataatccaaagtataaaataaatattcataagatcatagtgagatagatgatagatgatagatggatgatagatagatagatagatagatagatagatagatagatagatagataaaaaggaaataaacagtccttacaaagataaatagtcctacagtcccaaacaacaaatctaaatattcttccctttaggaggtgtggcttgatcccccccatcacccttgagttgacttactaattcaattccaaagaatagattacagaaagagaaaacttgtaactttacagtggagaaacctggcaaacactgccttaatcaagtggttaagatcaccagtgagaagtcatgttcatagcatattcctcttgatatgatatgatgacaagggcatttcacttctgtggcattctttgccaaaccccgtaacactactgtaatcatgaggaaaaacataaagcacacacagattgagacacagtctgcaaatgtctgaccagtacttcttaaaaactagaaaaatctgaaaaattgttatgtattagaggaaacaaatgatacatgatgaccaaatgcaatgtaatatcctagatagaattttggaacagaaaaaaaacagttaagagaaaaatgcaggtgaaatctgcatgaagtatagagtttaattactagtaatatacccatatctgcttcttggttttgatagatatgccatggtaatgtaagatgttaagtgtagggagaaatgagtgaagaatatatgcaaactctatattctgtcttttcaaatatcctgtaaatctagtattattccaaaaaaaaaaatgtatggctagaatgaatgatacatacaagggcagcaaatactgagatcaaggaattaagtgaagaccaaatttcagagactagtctttgccatacataataatgggagacggccgggcgcggtggctcacgcctgtaatcccagcactttgggaggccgaggcgggcggatcacgaggtcaggagatcgagaccatcccggctaaaacggtgaaaccccgtctctactaaaactacaaaaaatagccgggcgtagtggcgggcgcctgtactcctagctacttgggaggctgaggcaggagaatggcgtg

SEQ ID NO: 8013 - DNA, 2300 bp, Homo sapien
gctgatctagtgcccacagagttggaagagattatgaggaagagaggtaaggggcagaaatttttacctgatttgtatagctataaaagtacattggtgactgtagcatcctgggtctaatcaggagatagaaacaacacagtagactaaacaagggatgtttcatataaagaattaaggatgataaaagagtaactatgagatgtaaggaaattatacagcatgctagggctgagggaatgtgcataaccgacagcaaacttggaatggattcaggtcttcttgtaagagaaggaatggttcagcccactagatagcagagacgttccctcaattggttagcctggagctggcaggagttgccggcaagtgatagacaactttccacagtgccagtgggattagcaggggatcagcagctgggggtgtgggctcacagtggggcctgggacaggtcctggcaggaggcctttagagcacaggtctgagtggggctctggtttccaggctgtggaaaggttatcaccaggcgagactggaaaggtcacagagggactacattctcagccgatagctggggcagtgcttcactggatgacctcacactcatgccactcacccctgaccgatggtgaaaactacagggcagacttttcctcctgcaatattcctacattcctctactaagatagcttcatactgtgctcactttaaaggataaatgcttaaggaaattttaccatcacagagcatatattgaaaagtgtattctgagataagaggcaatatattgctaactaacatagtgattgtgagatgtggaagatgttaaatagtgattttttttttctcatgatttgctgcttagatgcggatgaggtgtgagtgctggaaaaactgatttcatgatctcatagtgtgtctggaattggtgggttcttggtctgactgacttcaagaatgaagccacggaccctcgtggtgagtgttacagttcttaaaggtggcgtgtccggagtttgttccttctgatgtttggatgtgttcggagtttcttccttctagtgggtttgtggtctctctggcttcaggagtgaagctgcagacctttgtgttgagcattatagctcctaaggcggtgtgtctggagttgttcattcctcccggtgggttcgtggtctcgctggcctcaggagagaagctgcagaccttcgcggtgagtgtagctcataaaggcagtgtggacccaaagactcagcagcagcaagatttattgcaaagagcgaaagaacaaagattccacattgtggaaggggaccacagtgggttgccacttccagcttcggcattctgcttttattcccttatctggcctcacccacaacctgctgattggttaattttacagagagctgattggtccgttttgacagggtgctgattggtgtgtttacgatccctgagctagacacaaaagttctccaggtccccactagattagctagacacagagtactgattggtgcattcacaaaccctgagctagacacagggtgctgattggtgcatttacaaaccttgagctagacacagagcgctgattggtgcattcacaaccccttagctagacataaaggttctccaagtccccactagactcaggagcccagctggcttcacccagtggatcccgcaccggggagctggtggagctgtgggtcagtcccgtgaggtgcgctggcactcctcagcccttgggtggtcgatgggactgggtgccgtggagcagggggcgacgcttgtccgggaggcttggttggtgcaggagcccacggcgtgggggaggctcaggcatggcgggctgcgggtcccgagccctgccccgcggggaggcatctgaggccaggtgagaatttgagcgcctgccggcactgctgggggacccggcgcaccctccgcagctgccggcccgggtgctaagccttacttcactgccccgggcgggcggctccgccggctgctctgagtgctgggccgcggagcccacgcccacccggaactcgcgctggcccggaagcgccgcgcgcagcctcggttcccgcccgtgcctctccctccacacctccccgcaactgagggagccggctccggcctcggccagcccagaaaggggctcacacagtgcagggccgggctgaagggctccttaagggcggccagagttggcgccaaggctgaggaggtgcccagagcgagcgagggctgccagggctgctagcaggctgtcacctctcaatagc

SEQ ID NO: 8014 - DNA, 2300 bp, Homo sapien
tatggtgtatatgtgccacattttcttaatccagtgtatcactgatagacatttgggttggtcccaagtctttgctatgtgaataatagtctttgctatgtgccacaataaacatacgtgtgcacgtgtctttatagcagcaagatttataatactttgggtatatacccagtaatgggatggctggttcaaatggtatttctagttctagatccttgaggaatcgccacactgtcttccacaatggttgaactagtttacagtcccaccaacagtataaaagtgttcctatttctccacatgctctccagcacctgttgtttcctgactttttaatgatcgtcattctaactggtgtgagatggtatctcattgcggttttgatttgtatttctctgatggcccatctggccttttttctttggtaaggctgtgccttcatggtgttcaaaaatggtttcgctacatctacaaagtgaggcttaataaaaagagttttgaaagagatggtctatgtctctcctatgcaagctctgtatcgaaactagagtaacttatttagagaacactttatcacacacacagtgttttcatatagagacagtccccaacttatgatggttcaactttatgattttccaacttgaatcagtgtattacatgcattttaacctacaatattttcaacttacaatgtgtttatcaggatgttgttgctctatcacaaattgagaagcatctatgatctcacttaatgctcatgaacaccctatgatccagaagacacgtaagggatatagtcacctttttgtgtttcagagaagtaagggtgaatactcatccaggctatggaacaatgtatcatttaaatatcacaagtgccctgtggggagggcaactttacctgcatttaacatgagtaagctaaacagagagagtacgctggtttgtctaaagccatgcactcagcagagcaaggatttcaacctaagtcatgaggttattgagtggtggctaagaccagaacccaagcctcttctgaatctcttgtgaaaatgaccttattgctcattttctctatctatcccaaagaggattgcccaggtgaaattagttttaagtgaacttcatgatgatccctgaaatgcaatgaaaattccagggataacctaaatggtatgacaggtaggggagaggttccaatccatcttttattctaacatgctgagagttttatacacacacagtgttctcaagtaacagggggcttagccagatcgactcctttctccattgcctcctgctatgtgttaataaaagatgggccactgctggcctcaatttactgttagccaattgttactcgtaacaatcaagtggcaaacagtcaagaagaaagagcactgggcttgagaatcctgggaaaactcaggttagaatcttaggatcaggtctagagctttaagaaatactcattttccttccccatcttaatagatgagaaaggcaagggcaagagaggacgcaagtattgtcaagggcttaggaatggctttggagtcagaatgggctagatctgactttggccaactcactgaacctccctgaggtgcagtgtccacgtttgttgaatggcgataacatgtaattcacagggctgttgttcaaggattaaatgagataatagatggacagcgcctggcagaagcaagcgcccagaagctggtgggtgttgttatacagctggactgaaacccacgtctctagactcctgccttcttgcctcaggagaggcaccaccgcaagtacctgcagaagcctatcaagcgctgcagcggcctcatgggcctgaactggagtttgagaccagccatctcttcctcaccccttgcggttagaggagtcaagagaaacaccacggggcaaagggaaacgaaggagttaaggcgttgagcttcagaaagctcagaaaactaaagcgaccccccactcctccaagccaggctaagtaagcccctcccctctaccaccgggacggtcgccgcgcgctccctccctccgccccttgcttacaagacctaatgagctcccccgggaggcagcgcagcgagccaggcccggaactagtaggctgcgccgcgcgcgccgcgccggggcgggagctgggtctgggcggcgggcaggagctggcgggggcgcacgggcagcgctgcggacagcccgggagccgcggcgatggcggtgcaggcggcgctcctcagcacgcaccctttcgtgcccttcggcttcgggggctcccc

SEQ ID NO: 8015 - DNA, 2300 bp, Homo sapien
tcactctgctaccaaaattgttaaggaagtgcaaagagatattagagattctgttttttaatggtagaggatgatgcttggactcacaaaatctttgagttagaaaggaaatttagacttacctaaaataaaatttccatattaaatttgcaaatattttgcaaaaaaattttaagtgacattttttcaggctttctatctagcatagtagtagaattaaaaatcagcacttcctttctataaggcagtttgacaggatgtaccaagggccttaaacatgttgatctcttttgagccagtaatttaagaatttatcccaagaaaacaattaagaatataagaaagatttagccccaagggtatttattgtagccttatttgtaatgatgaaaggtggggaatgacccaattttagggttgcttcagctgtttttcagctccccatcccgattgctctcttctagattttctaatgttggtcggtgcccttcgtaagttgtgtacaaagctggatccagtactccaagggtgatctgacctcacagagcacagtgcctggggagtgcccttaatctggacttggaattccatcatacagaggccaagtctctgaccatgatgttctctctgtgtaactggggctgctgaaacccaagtattgtcagccagtgccggtctccagccatgcttgtgtcttttaagaagtgacagtaactgctatttgtggagatggctattcatagggactccttttctttgcctgacagaggcccagtgttctaagctctaagaggggctctgatgccagcatgtgagtcacactcacttgctactgttcttttccagagttttgggccacttgttgctgcacatcactacctcctctccccctgcccagcttgcattgtcgcccttccccatctaccatgctgtccttgaacataaggcgcttctctgcattccatgtgtctactttgtagttatgtgctgcattttgaaagagctgaatctatgtccaggttcaggaaagaatgctgatcaactgttggcaatagatggtttaatatatcttatgattgtttcttgatttccatattgtcttgagttatttcttattgacatatttcctaggaatgttttctgagaaaagtgccatgcaaatgttaggtatttttttgacttaccatgaaaaatcgagagttgccaaaataaacactattttgacttttaattagctctcagtttagctcaattctctcttcatgtacatcctaaaccctggtattccttattcttatgacctcacagttacttttgaaagatatatccaattatttgaacatcttaatttctgacttttctcacattcagcagttctgaaaacttttggcaatgatgcacactccatcttcctttggaaagtcatattacatttgagcatgttaaaggttctgagaaatcatctgagattatataataataacaaccagtcaggaaaactgttcacatttgctaatatacagtttctcaaaactatctggctaggaaacatttttccacaaagtaccaataaacattccatggaaatattgtggtgcagaatatatttggggagaggcattgaattttcctgaaaattcattttctcttttacagttttcctttttttttttttcccccgctggcagctggtgccaggcagaactgtgatgaggggctgggtttggttgcatcctttctcagtaccctcctttcctgactgggagcatgtccccagcccaggccctgttattcctgctgcccagaatctctctccctgaggtggggtgactgggctcctttcctggcttcttctctggactagtcttttttttgtcaggactagtctattatatatataatcttttccgtatgaaatggaaaaggaccagattactgaattcatgtcagagtcaatagagattcaagcttactgggtttgccttgccactgggactatttgtagttttacaggtggacacttcctaagctgtgtgtcataatggataagatgtatatttcataaccagagacagctgggaacaaatctaggccctattatttaccaactgagtgaccttgaagatgacttaacctaagaatcaggttttttttttcatgtaaaataatggacaatcatctatctgatagggttctttgaagattacatggtgtattggttggaaacccaaggcttaataattactagctgttgttgttgttagtattattcagctatgattccattgcctgttattttt

SEQ ID NO: 8016 - DNA, 2300 bp, Homo sapien
aaaacctctaatttcacgttacagaccatagaaaggctaatccccacccccaccacaaactcctacaactccttttacaagcataggctacatacattcagtcttatggggaatagggactgtcaacaattcttaataatagggctacaaaatcagctctgagctgaccccttctgagaggctggcttttaggatggataactatccaatattttctaataggtaaagatattaaaatttgtatttagggctgccttggggcaaaggatgactatcaccgcagactaggtaccagagctggcatttaataatttgaatttgagggaaggtcaagggagttcggattggggcaccctctgggagcagagggagttgaagtgactgtcgtgtccaattacagaaaagcctgaatcaagagtatgcagccaaaactactaccaaattattggtaatgggaggagaaaatttaaacagaactgggatttgggaccaccttctggaagatgttagccaaaaaccgaacagatcctaggcatcaaggggtgtgaatttcgaggtaggctccgttgcccgggctctgagggtcagggttcccggcggttgggcctgggacggcgaagcccccgctcccccttaccttctgttggaagtagagaaccgaatagttcttggctacagccgggagggatgtggggttggttggcaagtgtaggctgccgagggcccttaaggccggccggagggctatggtggcccagggcgccagaaaagacagaagcaggagcaggagggctcggcggcccatggctcaggctggagactgcagtgcgggtgggagggcgaaaaggaggccagcagaagcgcacaggctaagccctgcccagcctgcagctccgcccgccgcaaaacagctcctcccaggggaaacccaaagccagccagctcctcagagacgccgcccaagccaggtcaccacagccactccgcccccatccccgaggacaccgcctccactccactttcctctcgtgccatctgctccttagcactcaccttcattgcggtcacaccccaagtctgcccttatcatgctagggcctcttcctaactcatcgctgtagcccatgctttatctatagcgcccccgaagcccacctgtccttcaggtcacccaatatccctaccattatcatcaccaccaaaccctgccctggccaccgcaattccattgcgacacctcctgccttccgcaaatcctacgtaacggcaataacagctaccatgacaatttattgaaggttcactacaggccagtgtatcacgaggcagggaggcacacgcatcatctcctctaactaaatcgtcacagcaatcttgtgcgtcgtatatgattgttattcccatctacagatgtggaaactgaggctcagagaggtgcgggaacttgcactagatcactcagcagtgagcggagcacgtcgtcgcagaccgctgggtccaggtccaaagactgtgctccttgcacccacctccatctggagcctaaccactccctatgatactccgttcttgggtcaccccaaaactgtgttgctcgcacaacccatccattacacaggtcgccccgggtccacatcgcccctaaatcccgccaggtcccggtcccttctttcaaataacgccccctttcttctccggcacccgaaaacccactccgcgctccacccccctcctgcctcctgccaccgcccccttcctccctccgcccgtgggtagtgctagcccctaggacagcgccgggtctggcttccaaagctccctcaaccctcttcatccagcttccattccctctttcagtcaccccgccagaccccagggcgctgcggctcactccacactttcccgggaaccctacgcccaggaggctcagcgaagctccaaaaccaattttacggactgtactactgatccacctgtcggggagaaagactctacccgcagtttgacgaaaatggtcgtttccagatgcttgtaggatttcctcgctaagctccaccctctgcggcgccttcttctgattggctctgagtaatcagagccaaagcgttacttccggcggaaaaggacgcgggagattcgattggaaggctgccggcgtgctactgagttcggccggtccgagtcactgtgcgtcgcctgggcccgttcctggtcttctcccccaggtgagctgggtaaaggggttctcgggaagccgaagagccggagactcctaaggaggctcttaacttcattatgaa

SEQ ID NO: 8017 - DNA, 2300 bp, Homo sapien
aaaccactagggctgaagagccaggcaaaagtcagataggaaagagtctgtaagtcatgttaaagagtttgggcttaaacctgagggcaaataggagcgactgaaaggttttcaatggggagtgcctcggtcaaatatgaactttatcagcccagcaatgtggagactggactggaaggtagcaagattgaaagcaggagaaccagctggggcggcgggggaggggggggttactgtcacagctatgtagcagtcatagggtcgaaccaaaataatgtcagtaaaaaacggagagaagtgaacagatctgagatattcaagaggctggtagggactggctggatgtgaaaaggaagaaaactttcaagctctggtttaagcacatggctcagttaaaatatgttccttctaagccatcatagcattttggaagatcccctttcagcacgtactactctgcacagtggcccactgaatacgtatttgcacattacagaagcaagagtcgcgccttttcctctctatttccgattctaaaagctcactccgagtctagctcgatggcactgtaagtgttcaataaacgttcgttaggtgattgcaaaagcactgagtctaaaataaaataactgacgtttatattctgttaccctcatggctgcccgtttacagagaaccacttgtgaaaaaacaagcgccgggctctgggtgggtctcattcataatgaagttaagagcctccttaggagtctccggctcttcggcttcccgagaacccctttacccagctcacctgggggagaagaccaggaacgggcccaggcgacgcacagtgactcggaccggccgaactcagtagcacgccggcagccttccaatcgaatctcccgcgtccttttccgccggaagtaacgctttggctctgattactcagagccaatcagaagaaggcgccgcagagggtggagcttagcgaggaaatcctacaagcatctggaaacgaccattttcgtcaaactgcgggtagagtctttctccccgacaggtggatcagtagtacagtccgtaaaattggttttggagcttcgctgagcctcctgggcgtagggttcccgggaaagtgtggagtgagccgcagcgccctggggtctggcggggtgactgaaagagggaatggaagctggatgaagagggttgagggagctttggaagccagacccggcgctgtcctaggggctagcactacccacgggcggagggaggaagggggcggtggcaggaggcaggaggggggtggagcgcggagtgggttttcgggtgccggagaagaaagggggcgttatttgaaagaagggaccgggacctggcgggatttaggggcgatgtggacccggggcgacctgtgtaatggatgggttgtgcgagcaacacagttttggggtgacccaagaacggagtatcatagggagtggttaggctccagatggaggtgggtgcaaggagcacagtctttggacctggacccagcggtctgcgacgacgtgctccgctcactgctgagtgatctagtgcaagttcccgcacctctctgagcctcagtttccacatctgtagatgggaataacaatcatatacgacgcacaagattgctgtgacgatttagttagaggagatgatgcgtgtgcctccctgcctcgtgatacactggcctgtagtgaaccttcaataaattgtcatggtagctgttattgccgttacgtaggatttgcggaaggcaggaggtgtcgcaatggaattgcggtggccagggcagggtttggtggtgatgataatggtagggatattgggtgacctgaaggacaggtgggcttcgggggcgctatagataaagcatgggctacagcgatgagttaggaagaggccctagcatgataagggcagacttggggtgtgaccgcaatgaaggtgagtgctaaggagcagatggcacgagaggaaagtggagtggaggcggtgtcctcggggatgggggcggagtggctgtggtgacctggcttgggcggcgtctctgaggagctggctggctttgggtttcccctgggaggagctgttttgcggcgggcggagctgcaggctgggcagggcttagcctgtgcgcttctgctggcctccttttcgccctcccacccgcactgcagtctccagcctgagccatgggccgccgagccctcctgctcctgcttctgtcttttctggcgccctgggccaccatagccctccggccggccttaagggccctc

SEQ ID NO: 8018 - DNA, 2300 bp, Homo sapien
acactaaatacagtcatcttaacccaggccagaacctaaatttattggtttgcctaacagtcttattgtcatggcaatatttgctaagatgagccttctttagataaaaatgaactctcatttagtggtggatgaaaaaagagaaattgctttatcatatagtttaatttggctcggtctactaagaccaccagggttgatgtattcctccatttttggtgtgatctttttcttcattcaataaagttattaaatatatggcaaaacttttttcagtttccagtgaaaatgcatgatactcatgtcatggagtcaggcttgggaaaatctatgaaataatagtttgctgataatgatattttcttatggctttgtatagactacatcctcaaaggattttgtgcttctttgcccatagaaggctttttctccctttgtgtgcttttattaaatctgttgaattatattaatattttttgaatttacagggccaattatcttttttgatggattacttagattaggccatgggttcttcctggcctttctttttctcggtcttttaatcatttcacgtttttatctctccctgagtaaagtggcaagaaaactaaaaatgaaagttaaatgggttgatttgacaatgtgtcaagttctgatttagagtttataaggaaggtagaaacgattggccaaaataagatatttggatgaggattatttaagccgtttagatttggccagagacgccagatttagcaaaggactgggttcttatcttctttcattcatgaatatatgccttgggaggacactggtgattcccacagaattaggccaatgatttgccacattaccctttaagctagcccataattccaccagatcccacaccaagtttcagttcatgactcatactgaataaacgtcagttgtaaatgatgtttgaattggtcttcctactaaagtgaaacatcttcttttaagccaagccacatgaatgaaatagcacaatcagaaaaaaatctttttttttttttttgcatatcaaaccaatggccttctccactaagccagcaactaaaggtattcagaaaacaagttaatcaaggtgggcagaactttttgaactgtgaggaaatgttcctaagtttagatttattacctgtcatttagggcaaaaatctaatgtcttttttatttcttaatcttgtagaactctgtatttcatagtaatgagtacttagggatcattgctctattagcctctgggagagatcttctagagtttgccattcctttttttccaaaattttttgttgttgttgttgttgttttaactgcaactggttacttttctcaaccatggtcctgacatgtttatactatgatacttttgagacttcgctaaagaattaaaagctgtgaaacaacatttgcttctcatccttcagacaaaatgtgttccatttaagcagcatggttaaacactaattttgggataagggagggatatgttttctttactttctttttggatttcatttctgtggcatgagcctatttgcgtttggaaggaaagatgccttcctttacattcttcacactggtaattttttcatactgaattaagaaattatcatcccttcaaaacacatattaatatagcaacattagagtaagggagatggcatttcatctcctctcctcagtcccttgatgttggaatgttattatcatttccaggagccatactttgaaattaaaaacaaattgaggcattaccagtctgatgaaggaattttaaatgcaagccatttaaagaatacttgaaggatttggggagacttaggttaggaaaaagaggggaatacaattagtgcattagaacaagatgctctgtggttcagaggggtggaatgaggcctactgaatgaggccgtagggacacagatttgggttccatgtcagggcgaccattctcaaaaagttggttcactatgggacagtctgcctcaggtaatagcctctgtcaagaggcaaagatgtggagaggatccaattggttggagattggagcaggtgacctattaacctaaattccatgttgtatgtagtactttgcctctcataacatgttcaattaaatatctgttaattcatagctaatgatttttttaatggggcctcgttcttctgccacaagtgcatcccacctttatctttcagggaagaggttggttgcacgttgttaggccaagagactggccctccattatgccctatgctggacttgcttt

SEQ ID NO: 8019 - DNA, 2300 bp, Homo sapien
gaagtggaggaccagggagtgtgttctaagattgaagagaaagagatgtgatatgctggtgataaaggaggggttttgaaacagaaaggaaaaatgtaaactgcaaatggagagatagagaaataaacagaatttcaagagatgtgggtgggatggggtggggtggggggaagaaatgaaagtacaggagagaagggtagggtgtccagaagagcagagcgtcatcaacagagagacgcagaggcaaaggctaactgttgatcttttcccaaatccaaaagctgctcattggcatcccaataaatcactctactacaaagcccatacaatggactgtcctttgcattcagcatcaagcagcatttaatgaaatatcacacagctacaactttggagacctaaggatctgaatttaaaatgaacaaaattggcttagcagcagaagacagccagtaaagaatttcgcccatgtctgactcagctaggaaaaggtttagcattctagagttaagcaaatactctggcatttctccttcttttgacattccaagagggggtgtggttgaccccaggcccattcatttccaagggtgtagatctctcagccaagactggccccatctgttgtggagccagccagctgtttatctcaaagtaacatatctattgccctaattatccctataactcttacaagagcatcatgtaagtcagaatgctttctctcctgttaaatgtcagttcgtttaaaaaaacaacaataacaaaacaaccaaaatcactcttccatgggcacctttcagtaatggcaaatgaaggttaacagcgcttctaactttccctttctctaatgtgttaaaatgaacccctcttccctaatcgatctcttcaaaccgttatttgtgagtagtgactatgcctcaggaaacagcagctcattatggtaccattgtcagtggcaaagagcctatgcaatgtaatttaaaacacacaagcacaaatctgtcggctccacttccaaacaatcttgaatccagcagtcggagaacggaaaacatttaacaaaaacgctgcttccagcagcctgaaagaaccttcgccagacacgtgaaatgtttctgactggcacggagtgcaccattaaaggacactgtcacctcaaatcagcagaaaaggcgagacaaaccacatagacatacacacataaaataaagccctacaaaacttaagcacgttcatcttaaaaattaataactagtgctcgtccaagcgacattcaaatgttctaaagtagtgcgaccacattaattcactgtctccatttctccccacgcatcaccccttcccactcaaacctcagctctcgggccgtgtgtgacaggactgcagtcccccacctctgccttcctcagattttccaagagcactccccaacatccttcccagcccagccccctctctccgcctcaaaaaggttgagaggagttgcgactagggaattggcaggcacccgtcctctggcgggggaaggttgctggagttgttctttgcagtgacccaaatggcacagagcttttccccttagctgtgcctgcaagcctctccccaatcccccccacctccccaccgctcacagcttcccaaaagaaagccttgagaactaagcgggaggaataacttggtagaagcatttgaataaatcacttcaactcacctggtttgggatttttctccccaccccaggcataaacagaaatggatgtgcgaatgagtcacgcacgcaagggaaggtctgcgatgtcctgagtccaagggctggagtcagtccctgccctggtgctgctgctacacttagctcagctggagcgagcggcaatcgcaagcccagcagcagcagggggtggagagaccgtagcacaatgaatgcagtggggcttttgcaatgacatcatccctctgtccaaacgtccccaatagccatgctcgggagcggtgctttctgggaactgtagtcttcttacgtcctgaagggatacccaggcaatccccgaaactacaatgcccaaaatgctccaagtgggacgcgcccagagtgaaggagcaaaggggactcggccgccatgttaggagtactgggacgattccgcggagccgggcagaggttttaggggtgcgcaggagtcaagtggtggttcagtggggacggtgaggtggaggacgatctggtcggatagccgcgggcacgaacctgggaaccagagggtggaggccatgctggggactgatgtagggcgggaccg

SEQ ID NO: 8020 - DNA, 2300 bp, Homo sapien
ggctatggcttacataaagaaatatattataaatcaacaacactcatgataagtttacataagacatgagaatacacctgaatcaccaaccgggaaaaatgattgaagagcttgaaattaagcctaagtgtaagtctctgttaagcttacaacattacaatagttaaatcgaaggttagaaagaaaatggtagacattgctccttttcctgtacttaccaccattacttagagaagtttctgaataacaacaactttgagcctttttcattgttgtattcatggatgacaccaacacatactacttctgcttaaaaatcaaactcattcatcttgacttgttcccagaaacatgacacagaagatcattttttgaaaaagtatttttgtaattaccatctgcatacacctgagagactgtttctaacatgttttggtcatttttaatcattctatctgcctttctttgttataaggatctatttttaattttattcactcctaacatagaggggaagtgcataccttcaatgacgcaaagtaactagttaatgttgtttcagaataatatgcaaaagggaagggaggaaacagcacaaagtatatcatatttttacacatcagacaccttcaggaagaaaggacatttctcatcttagtgtgacagactctgaaaaagaacacacagcactgtttcagtgacacaagaaaaaaagtacagttcattttgagatactgtgcaaaatcactcaaaagacaattaactttggtttcagtcacttagttaaaaaaaaaatttatccatgaccgatgttactctggaatctattgccagacgtcagaaggcctatcatcaataatatcccacccctcccgccttttctgagacacgggcttgctgtcgcccaggctggagcacagtggtaggatcgaggctcactgcagcctcaacatcccgggctcaagcgatcctcccacctcagcctctagtgtagctgcaactacaggggtacaccaccatgcccagctaatttttttgtttaatgtttttgtagagacggtacggggtctccgcatgttgcccaggctggggttgaactcctagaatcacgctatctccccgcgtctgcccccaaagtgctgggattaaaggcgtgagcgaccgcacctggccaatatcccctttgaacatctgctttcgctggttggtaaaaaagtgtcattttaaatttagtgttactccttcaggctattccctctctcttcttacttgcagggccaaagcaacgtctctttccaccttggtcaccttccaacaacgatttcttcggacgcctttgttaatcattcctgtatgaaaaatcagtgaatctgaagctttggggagagtgaaagggggttggaaaacaaacggcaaaacaaaaatgcatttcggaggactaccccaactctgtgggtggaagtgggcttctccgaataaaggcgagggtcgccgcctcgggtcctcgcacctcaacaaaagacaccaactctctcaactgtactgttaacagatctaaatgatactccaagcccaaaagtaaaccgactctctcaatctcttagctaaaaaatggagaaggaagcgtagggccccatgcaaccccttcaggagctgagaccgaggctcactgggcctctggatgccgcttccagtcggtcccgccctacatcagtccccagcatggcctccaccctctggttcccaggttcgtgcccgcggctatccgaccagatcgtcctccacctcaccgtccccactgaaccaccacttgactcctgcgcacccctaaaacctctgcccggctccgcggaatcgtcccagtactcctaacatggcggccgagtcccctttgctccttcactctgggcgcgtcccacttggagcattttgggcattgtagtttcggggattgcctgggtatcccttcaggacgtaagaagactacagttcccagaaagcaccgctcccgagcatggctattggggacgtttggacagagggatgatgtcattgcaaaagccccactgcattcattgtgctacggtctctccaccccctgctgctgctgggcttgcgattgccgctcgctccagctgagctaagtgtagcagcagcaccagggcagggactgactccagcccttggactcaggacatcgcagaccttcccttgcgtgcgtgactcattcgcacatccatttctgtttatgcctggggtggggagaaaaatcccaaaccaggtgagttgaagtgatttat

SEQ ID NO: 8021 - DNA, 2300 bp, Homo sapien
aagttcactttgctgttaaaagaaagttaaaaactgtaaaaggcagacatttctataatgaaattcacctttaaaatgaaaagaaaatgaacagaggactatttcaccctggtcatttccctccagaaaataaaacctttggacgttattagttgaaactttctagtatatctaaatagcaccactaacaatagtgtgaaattattgagattataaatacttatttaacaatacttcttagcttcaaatgagggaagaccagttttcctccccaggttttacttttcattcatgtgtgatatcatgctaagaaaaaaatggaaaatacatgtcaaaacttaacctttgcagcacactttatgcagttcattatgtttcaattagacaacaataaagatgctaaaaaactcaaagaaacaaaaagaagaaatgaaaatgttactttatatgggacaagtaaagagtagtttgtttgtttgtttgttttttgagagagagtttcactctgtcgcccaggctggagtgcggtgttgcgatctcggctcactgcaacctctgcctcccgagttcaagtgatcctgccttagcctcccaagtagctggaattacaggcggccgccaccatgcccggctaagtttattttttaagagcaatttcttctggggagcaacaaattatctctcaaatgcctagtagcctacggaaggcaatggaaaagcaattttaggtaattgacacttttttttttttgagacagactctcgctgtcaccagcctggagtacagtggcgtgatctcggctcactgcaacctccacctcccgggttcaagcggttctcctgcctctgcctcccgagtagctgggactactataggcgcacgccaccacgcccagctaatttttgtatttttagtagagacggggtttcaccatgttggccagggtggtctcgatctcttgatctcgtgatccgcccgcctcggcctcccaaagtgctgggattacaggcgtgagccaccgcgcccagcccgtaattgacacattttaaaagcttatatttaggtcaatatcgctactcaatgaaaaaattacgtttggtttgtgttatgtcgcagctccacggtgaactatttgaaagctttgtgtgttttacgagcatcatttccaacctgggaagacagccccacaagtttaaaacaaaagtgcatgcgcgtgtgtgttttcctacgtgccccaaatagtgtatgctaaggaggttctgaaatgcagattcacagtggagatattacggtccagctgggtgtggctgttgtgaaaaactcttcctagagctcatagtgggctccttaaagagctcctccaaacccccaaggaaaaagcctttcacacttaatctctaaataaaaggcattttcctggggattcaagtcaggcaagctcgcctaggtatttttgtgggtgtgggaagcggcgtgctggaagaaactctccagcagtgctttccgaagttccgggtaaattgggcacctccctcccacttcccagttcccagaggggcagctggacccgccctggctctccagagcacctgagacgctaagggagagggggtgcggcggcagaaagcctccgctccctccaacccccgctccctccaacccccaccgtcggtagcagctacggggcaggcgggaggaaagatgattgacaggcccgctcagtggctgggaagctagagggagggacgaagaggggacggctgagtcttcttctcaaagtggttgggttgggccgcgggaactgccttcccaggcctattggcttccctgaatgggttgttatggtaacaaatgaccgaacagtcccttatgaatcggccaatgagaagggccgtcttttccagtgcgcctccgagcagtagatgttgcgaaagtccgggtagaggccggagaagaaggcggtgccagggcgtcctgcggaagggccgggggcggggctcgtgacgttgccgggacagccaatcacgcctggttttatcagtggccccgcccttttaccgcacatttcccctcccctagttcatttcgcacgacgcagcggttgggaacacagacattttcggagctggagccgccactgccgccgccattttgtgtctgtggagaaagaagcttctgtggcggctggaagtggacggagatcacccgcgagacggcggcgtttcatacccgaggttccccctgtgtcgtcccccatcccccctccgcggtcagcatgtggtgaagccggagccgcgag

SEQ ID NO: 8022 - DNA, 2300 bp, Homo sapien
tttcacgttccttgaggcaccacgagttcctgcttccctccctagcgcgctgtaaagtcacaaggttgataagcaattgctacaaaagcatgcattcccaaggatgtaagacatgtggtgtaacaaatgtaaaagaataattaactgcctttgttcttgcttctgcaagtaggcttcctgtagcaccaaactcccgccacaaattgcttaaaaggtgattgatccctttgttccgggctcagactttctggaccccagtccgactgagccagtgatcaccttaataataaagggttgtcctgaattctgtttggcctctcccgtctctatttgtcccgcaacactagcagtatatcctcaggcaattaacttttttttcccttgtttctctctctgtaaaaaggaagaggaatacttattttggcaggttataataagaattgagtcaaactcatttatgttggcataaaaaaatgaacaagaaaatataaagcacttagtacaatgccaggcagatcataggaactcagtagatggcaattgtaatattacaaaaggtgatggaagtcaaagacaatttactgtacctcaagagagtagcggtaggatcagaagaatttcccaaatgtgttcacagaccaaaactgggggaaaagcagggtagtttcctggtaagacgaacagcacatgacaaggcagagatattaaaaagtaaggtacgcttccaggacgagttcattattcctgaagggagaaggcaataagggtggaaaaactgggccgagaggggaatccaggttggtgatgcccctggagggcaggtaattcttactaatttctgtattttctgctgctggcacaaaacgtgacccatacgtttgcaacaaatggtgaaataattcattcctgttgttaagcaatagggttgtagaaatatttgagcagtaaacatgctacagtgaaaggattctcggatttggagtcaggagacctgaagcactcttttgactaatgacctgtgtttttttactggttttacaacttacctgctgcctggccttaccaaagtactgatatattgagtctcttgacccataaaacaggggtaacaactaacaagcgattattaaagagttggcgctagtaaagtacgcaataaaaacagcggctgcagctgctaaattctcctttaggtctttttccatacttgcgaaatgacagggcaacaaatttccttccaaccaccactgagaaagtataccacgtttgcccaaggacaaaaaggccccgcccggcccgcgccacacaggtcacctacgcagaatgcagtcctggggggttccacttgtgtcgctcagcgatggagggcgcgatcgatgacaggccactccagagacggacctagataggttcgcatgaggccgagccgaatttcaccaaaaaccagtttacaccacctcccgatttgtccacacgaaaagccatggaatagctgagggaaaggaaaccggaagtagcgtgggccgtgaggaacgggaaatgacctcagcacgtcggaagtgtactcgtttccaaggcgacggccctgctgcctctccagccaagtggctggagtcgggaggctggaaagagactccgagaaagtaccagcggaaggcggccgccgctacggcgattcgcagggagtagcagacgaagacggtggccgccgcactagccaccacgtgtggaggataaacggtctacacggccattccggcgccgagtctagggaaagagttagcgacgacggggaaagaaaatgtgaagagagcgaccgccgctccagggtcgctgcaggaagcctaagtgcagacgccggcttctcccgcagtgacttgagaagggtcagtgaaaacctcggccactgccgcagcgtctctagggagagagttaggggagatagtggccacagtcacagctgctcttgggagagagttaggggagacagcaccttctgcagcagcgacgtgaattttagtgaagttggaggccaccaaactaccgactccaggggaacagccagagaagaccgaggcctccgcctcagtggtccttgggagggagtcagtgacattcgggacccgcgaactagtgacttcggggatagagtcagtgacgatcgcagtcgccgcttcagtggctcctgggagggagggagtgtcgaaggcggccacagcgttggtagttcttgggaggaagtaagtggagaccgcggctacgcagccagcgactcctctggtgtgagcggcagtgaagac

SEQ ID NO: 8023 - DNA, 2300 bp, Homo sapien
gctcacgcctataatcccagctactcgggaggttcaggcaggagaatcacctgaacctgggaggtggaggttgtggtgagctgaaatcatgcaattgcactccatcctgggcagcaagagcgaaactccatcctggaaaaaaaaaaaaaaaaaaaaaaaggaataaaatatagagttgaagccctttggagctctctccctaataccattaccttttcttcctcctcaagggtaaactattattttagatttttcattccattctgtggttttatattttagttatatatatgagttggggtctcactatgtttcccaggctggtctcaaactcctggcctcaagtgatcctcctgccccagcctccccgcaaagcactgggattataggcatgggccactgcatccagcctgtattattctttatgtgcattatttgttattgttgtattgttatttttatttgtttctccttcaaatattttccatctgttcaatctgcagatgtggaacttgcaggtatggagggccagctgtacatctgtacacatacatatgtacacatacacacacacacacacatacacacacacatacacacacacaactggaagtacctaacctgatccctagcatataggtgatgcttaataaaatgtctttaatgatagtaactacataaactgagtccttactaaaaatgccagacatgatagtaagcacttgtaaggattgcattgttttgtcttttttaaaaataagatcttcttgatacttggttaccaaagaattcataatttaaccctctcaatgcatctgaaatgtagctattctcatttttacatatggaaagaaacaacctagaatagccaaagaatatttttaaaataacaaagttggaaggacttacacgacttgattttaagacttttactataatgctatggtaatcaaggcagtgtgtagtaatggcaaacagacatacagatcagtaagacagaatacaataaagaccagcaagagtagggcatgatggtgcatccctgtaatcctagctacccgggaggctgaggtgggaggattgcttgagcccaggagttcaaagttacagtgagctgtgaccacacctcagtgacaaagtgagaccctgcctctaaacaaaacaaaacaaaacaaaacagtatgacaactatttacatagcatttctattgtattaggtattgtgagtaacctagagattatttaaagtatatgggagggaggatgtgcataggtttatatgtaaatattataccattttatataagggacttgggcatccacagattttggtatctttgggggtcctggaacccttaggattccaagggatgactctatatgtgtgtgcacatacagacttcttatttgcttctagtctattttgctgttttcactatcttataagcagaaaaggagaggtctgtgcaactgcaggccgtgagaacaagtgtgtctttatttatttattttttttgagatggaatctcactcttggctcactgcaacctccacctcccaggttcaagtgattctcctgcctcagcctcctgagtagctgtgattacaggcgtgagccaccacacctggctaagttttgtatttttagtagagacagggtttcaccatgttggccaggctggtcttgaactcgtgacctcaaatgattcacccatctcagcctcccaaagtgctgggattacaggcgtgagccaccatgcccggcttctaagtgtgtctttatacaaagggttttaaagggttttaaatgaccatcccctgtgttttgtggtgatatgagagagaaagagagtatggctaaaaattgtcctggtacaatacttctggcatgtttgaagtcctgagggtaaaaggagtagaatgattagtaataatctcattttataattctctttttactggtagtcatcaactgaactcatccgattacaacagccttatatttgagaaaatattgaaacctgaaatatatgacagcttaagacagggaaaagaataaactcttatgtttattgaaatgctgaatttttttattcatagctttagcatttccaggtcatgtggctgcctttaagggtgatttggggatgcttaagaaattagtggaagatggagtaatcaatattaatgagcgtgctgataatggatcaactcctatgcataaaggtgagttatgattcctcctttcagttcggatacaatagctgctgagttattcatcttttaaagtaattatcagt

SEQ ID NO: 8024 - DNA, 2300 bp, Homo sapien
gaatcagtgtttccagctcaaagtggaataacagatccttaataatttgaagagttttgtacagacttaaacatctgtacaaaaccccaaacctttcctttcattgttactacttttgtttctttgatacctatcttgtggatttgtttgttcgtaatagcgagatacaaactcaagagtttaaaggtttaaccagtttcacaaaactactaagtcatagattgtggattggaactctggcctatcttgcaccaagctcctctttgctggaaaaggtcaaattttacttttgaaaaaacaaccaagcaaacatgtaaagtgttgtcccattaaatttaagctgcaagttttatattaatttactgctaattttacagctgaaacacttcagtgtatagccagttacttttctgtcaggaattcaaaagaacaggcattaacagcatatattcttacatgctggtctactaacgtgctacactagttgcactagaataactaaggtccttccattggtcagaggtcaaggttttcaaatcccttgattattgacattattaggcaagtttaaactacttgtataaaataaacattcaatatttgtttagtgaggaaggacacaaatcctactagttgtaagaagagatttaaggtttctccaagaacactcagattcaagtgggataacttttatgttaaaacattaacatgtacttatggtcatttatttcccagtatgatatacacttcaaagttcattctctaagaacatttaattttgttttcatttggatatgtaaaagtcaacaaagatggcagctggatgacttcctggagttcaaaagtgctacctcctttttgtaaaatccatcataatgtgtatgtatgctaaacactcaaatacctaacaaaagagaccttgtgaatgaccctggcagctaaacagcaatctcacagatggaggatcaacaactgcagttttgactgcagctgttactggtgtggattaaaatgaaacaatgagcaaaatagcacaagtaacaatatggagtataaataacagcgtagaagtgtttgggtaccgaatggctcagcgtacctggcactgaagattcaagaaggtgaacagagataagaggtgcctattcgcctattttgtggacaaccttaaaacggtttaaaaactgggagggaagttaaaaaactgggggtgaaaaacaacgacgacaacaaaaacctagccctagaaacatttctctgaataaagttagatgtcttcaggacaccctgttaacaggggtgccaacaggttggaaacttgtgggttccagtattcacttattttcccaaagtctacaatgtgactgaaatgtactgagaattccagtgagaataaggcagacgtggcctgaaatttatgatgctgtctaccaaaaacctgggctcgaggccagcacctaaaaaaacaaaatcaaaatttgatcaggccacaaaagaaaacaggacaccctcaaacacagattaccttacgttggctcctgacgagattactagcctcttgtcaccaaaaaacggaaacaacggctgagaaagaagccgggcgcgaagcccaggccttcaaaggttcgctttaagaacagaaaggcagtgctttcctcagtcctcgccccttggggcgagctgggcaagtcggggcagcaggcagcggcgtcgcccagcacaaggcgtgaatccgggaggagggcgtggcaccttctcttcccgttcgctcgagcaggcgcgaccccacgggcatcgtctccctagagagcactcaggcatctatgacacgacgccttgcctcacctctccgcagggccggcgagaaatgcccgcggggccttgaaacccaacgatctcctctgccttgggagagaaagagccgccaagcctggcgactattcatgtcctcagagttttccggtgggagggaggcggaagacggggtaaatctcgcacaggctttcgggcaaggtagttctggcaccacaggaatgctgggaattgtagttttcgctctgtcacaagctcacctcccagcgcaggcgccaccgtggtcccacgaaactgggtctcttcacagacagacccacagttcgcgagcatggctcagcgctgccccgcttctcccagcgccccttcccgacctttgaacgccttcaccgccctaggaaagcgagatcttgtcagagaaccttccggcgcctgtttcctggcagtggggcatagtccaacagctggctcccccaagatagccagcg

SEQ ID NO: 8025 - DNA, 2300 bp, Homo sapien
cagaatctataaggaatttaaacaaaccaagaagtataaaacaatccaattaaaaaatgagcaaaggacatgaacacacacttctcaaaagaagacatacaaatagccaacaaacatgaaaaaatcctcaacaccactgatcattagagaaatgcaaatcaaaactacaatgagatgccatctcacacccatcagaatggcaattattaagaaaaaaaattcacatattggttaggctgtgaagaaaagggaatgcttatactctgttgatgggaatgcaaactagttcagccactatggaaagcagtttggagatttctcaaagaacttaaaatacaactaccattcaacccagcaatcccactactgggtatatacccaaaggaaaataattcatgccatcaaaaagacacagagctgggcaccgcagctcatgcctgtaatcccagcacttgggaggcctaggcgggtggatagtttgagcccaggagttctggaccagcctgggcaacatggcaagaccccatctctacaaaacatgcaaaaattagccagttgtggtagtgcacacctgtagtcacagctacttggaagcctgaggcaggaggatcagttaagcccaggaagttgaggctgcagtgagccatgcacgactgcactccagcctgagtgacgcagcaaaaccctgcctcaagccaaaaaaaaaaaaaaaaaaaaaaagacacatgcaaccgtatgttcattgtagtgccattcacgatagcaaggacatgaaatcaacctaagtgcccatcaacagtggactggataaagaaaatgtggtacatatacaccatggaatataatgcagccataaaaataaggaaattatactctttgtagcaacatggatggaactggagccattatcctatgcaacctaatgccaagaacagaaaaccaaatacacatgttctcacttataagtaggagctaaacattgaatatatgatggtaaacgtggaaacaacaggcattgaggatcattagatgaggaaagggggagacggacagaggggcatgggttgaaaaagcacctgttgagtactatgcttacatcctgttgggatcattgggacccctaacctcgatataccctaaggttttgcgttttgtattttgaaactggtaagatcaaacttttttcccaattttttttttttttttttagatcgagtctcactctgtcgcccaggctggagtgcaatggtgtgatctcgactcactgcaacctccgcctccaggattcaagcgattctcctacctcagcctcctgagtagctgggattacaggcatgtgccaccacgcccggctaattttgtatttttaatatagacagggtttctccacgttggtcaggttggtctcgaactcccgacctcaggtgatctgcccgcctcggcctcccaaagtgctggaattacaggcatgagccaccacgcccagccatcccagtgttttaaatagcaatttatatttcctcttcatgaattgtctgttaaagcagttgttggcgggaatcaagttttgttctttcaatgtgcttcgggccttagaaatggtgtttgttacttagttgactctcacaaagctttgaatacatatagatagaaacctagccgtaattgtttagaatcttgagagagtaagccactaacaccgcacaactgtgtgccattttacaacttacagagaatattcatgagtattagtgcattttaatacaactactgtgcattgttgctttcagcattttactatgcggagcagtcttgagtaactgaggtctgagaaggataaatggtgaaaattcaaggaatttctcctagaaacggaggaattcggcttccctaaagaaaggacataccgactgaaatagttggtcctcccgtgcaccagagggtgaagcagcaggatgtgacgcctcacgaaaagtgagcggcttgctggactacacttcccagaaggtttcgttggccctcgcactacgcaatcacccagaacgctcagcggccgaaaacttcaggttccaggctgctgtgcggctaaatgcgactccatctcccccgacccaagcgcgtaatggccgctggctatcttgggggagccagctgttggactatgccccactgccaggaaacaggcgccggaaggttctctgacaagatctcgctttcctagggcggtgaaggcgttcaaaggtcgggaaggggcgctgggagaagcggggcagcgctgagccatgctcgcgaactgtggg

SEQ ID NO: 8026 - DNA, 2300 bp, Homo sapien
atccatgcgtattccagaccttctagtaagacgctcagaggaaaagctaaacaaagagagaacagactgtatgtgagcaaattaagttggccacagagttattctctggaaacatggagctaagaaaatctctcatgtctaaacctgcatatcctgcaacattacagcatcaccttgtcccacagagggttacttctgatggctctcaaggaatgctgactgcataccttgaagatagcagtttctgatcgggaggagctcatcagatagagacctcaccagtggccaaatactaggttatactgacttacggtaggagttagcagtggaacgttcaagacagagatacctgtcttcctgcttggcacaccatgacttagtggctgtaagtgtatagttacatataaaagttcattgtttttatgggttttgtggtaggagcttgtttgaaaagggtgagagaagccaagatggtctcacagtggatagcagacatgttgcaaatttgctttcttgggctgatgaatttatttgagtaatggtggaagtaaagcagagagaagctagtgagctgggccagcagcccagcacagagccctgggcccttcattctcttatagaaagcccatctctggtagagagatgttaggtctctttagggctttttccccttcactgactggcaggttagaagactccttagcacagtaaaattaacatcttaaaaggtagttgagggagaaggtgtggcagaaattcattttgtcaaaggaaatacggcaggaatgagaaccatttgggggtacatactataaactaggcactatattttcttgatattctccatttagtcttgtgatgtacgtttcaatatacccattttacagataaaacaatctgcgttttagtaaattagtggcaaagacagggttaaacacaattctgttgaatttcaaaacttatctttttatcctttctactaaaggccatagtaaatcagtctgctctcattgttcatctgcctctagcagtttagtgtaaaacactacttggggccagataatatatatgagtctgggctttgaaactaaattgcgtggagtccattagagctctgccacttaacagatatatgatcctgcgtggattagttgacctccctgaatctcagcttcttctctgcaatatgttgctcatgatagtacttaccttacagggacattttgaagattgagtcaatacatgctaagcatttagaatactgcatggcacctaaaatgtgttcaatagatattagctattattatccaaaacatattttccagtgctgttattcgatgaacctaaaaaggttaaactgaccttgtcagggagggaacaaaaagctcaggcactgctccccatgaagcctgcctattaatgatttttggtcaacagtactgtttatgatttccagtcttctcgtttgctgggctttcatgctccagaggcagcatggtagaatagaaaggcactgtactttgccatcagaagacctgggtttgggttcaagttcaaatcacactttgtgtgacctgggcaagtcactttatctttcttgccaggggttccttatctgctcagtaagggggtaggactccctaatctctaggactccttgcattccataaattcagtgaataccaaataaagccatttagtctctctgatctctggtgctcatctgtactgtagcactcctgataccttctttagtcactgagagactcagtgagagtgaaagtgtttggtagactgtgacaggctatgcaaatataggagttgatccttactattaagagctttaaccctgagtaatacgccttgctgtatgtgcattggtgcaggggctttttccacattttgttgtctttgcctactcctcactgagctgggtggatccaccttaacaaggtgtaggggaacacgagcagaggatgggggtacactactgatggtgggaaagcatcttattggttaatagtggtacatcccaaacaccaattactgtcactgcttctaaggctgatatatttatcaggatgagttacaaggaaatatatgtacccagtgagcgagaatgctgcatggtcaccccctgtgatgtaaaatatgagaatctaggaggggctgttttataattcatcaggttccgctagtgagttctgtcagagtcttagttataaaggcaagtgtgaaccggacagcagacaggagaacctggcaccaaggagacggagaagctgcctttggtgcctcct

SEQ ID NO: 8027 - DNA, 2300 bp, Homo sapien
tccgtctcaagaaaaaaaaaaaaattatagcacatgggagatgcttgatatgtttgttggatcaatgaataaatgaatgaatgcaagattcaaagggcagtttttaaaactgtttccacacacaaagactatgaattctttacctttttttccccaaaaactaaagagaagaggatttttaggacatgctctttaaaggaaagaataaaggaacctgataaacaggaggttggaaaagcctcacaagacccagcaagtggggtctggaataatgataagcatttgcttaagaatttcagagaggaatgactgggattttggaaggtaacttaaaagacagctttttattttcctgttgtttcctgagaaattcagaacatttactagtgaaggaatattttctgaaagttgtgggctggctggtcgacaatgcatggagaagaagcatgtggctggggcagatgggagactataagggcaggaatgaaggcagaggagggactgtgggtgtgagctgaacagaacaccatgaatgagaaaaagagaaggttggttgaattgatattgaaaaacaaactgtctaatggcaatagccttatggtgtgtgctcgtgaagtactaaggaaaaacaatttccctacaaattaggtaaaatttacaaattaggtaaagattttgaaagatcagttctacttttcattccttcagttcaaaattgaaaagaaatgaaggtaagaggaaaacttccctggtgtcagcctttgagactttaacactacaagggcattagtatgaaccagtctaccatcatcagggtacaaatggaggaaaactaggtaacccaaatcatgctgctcttccaaaaataatacagggaaaatatttcgtgtatgttatcaaactgtttcctacaatttgtaccttgtttggtcttccttggattttctaggtcaattaaatgcataatttattatgctgtgagtttctctccttttgcctcttacctcttgacatgcttgagtaaatatcaccattgttgactgtgcaaccagcccttagagtacggattcctttggaacttccaagtgctctgagcatcaccttccaagatgccttacctcctagcaccttctagctcagcaatcctacagagacattagggactggtggagcctcacctccctgtgtgggtactgtccttggtgaagggaattgagaatatgtccctaaattctgttcatattttatttcatgcttatacgagtcttttttgttgtcgaagtgcacatgcatatttctttggaattaacacattccagcctactctcatttcccgagaacatttaaagacacgattctccttgtattatctatgtaaattttatctagaataaggaataaaagtgacttttcttcaatatataggcaacataaagttcttctagttactcttacattttatgatgccttctggcttgtctttagagataatcccagataaacaactcatagtgccattaagacagtaatactctgtaggtgaagaatatgtcacatctagctcttaactaaactgagaggagagctggacatattaaatgacactgtgagtatgcatgtatatagttgtatttctgacacagcaaacaagtgctgacatctgtatatgtacatatatgtgtgtatataaccgactcccttcaatgttactacttttcacaagctacttaaattccaccaccatgacctgccacccaaatcttctggtaggaatattttttcacatctctcttcttcctacttctttccccctacacgcttatggtatgtgccatttcaccagacccgtgtgaagacaggagagcactgatgggattgcttttcacaagtgtaggaatgaaaattcttcccgatgaaaacatctgtctctgttcaagtcatgcccagttatcccccaaaagaaatgttctgattaactttttttttaagtcttaagatagcagtttgtgtagcagatctaattaagaagtttatgtaacagatctgcagggtttttttttttttttttttttttcctcttcaactgggttctgtgagctcagtttgagtgttaccagctttcgctatgcaacggccaagtgtttctcgggctgagaattatcagcttttgtgggatactattgcttccttaaaacaatgtgaacaagctatgcaacatgcatttattccggtaaggaaaattttcttttattttcctagggattcttttatttattcttcctttttctcctgttgtatct

SEQ ID NO: 8028 - DNA, 2300 bp, Homo sapien
aactagagaagcatctatggttagataagattggagacagccaaacttatcactttccgacattctcatttgagagtgatggcattggcatattgcatcaaatcctactgtacagccatgcatcatggttataccagaaaagcctaaagttctctagggttttcttcgacccaacagttctttcaggtataatctattgatctaaaataaaaaggggggagggagggaaagagagagagagagaaataattttctcccttttcgtcactgtcttcaggtattgattttaacttcttgatcttctttaagaaggcaaaaactattaatgcctttgttatttctgcccaacagttcaagtttcatatatttttgacaaatttccttaacaagaatacctcaacaccagaactaaatttaactttaaaggaatagtttatgtttctagaacattgctgaattaaatattattattttaaaaatgtgtatcaactccttcatttctctattttttccttccatttatacttccacccaaccatccattcatccgtcaaacatatgtatgtatttactgcctgttttgtggtggacggtgtgaaaggtgcttagagaaaaatggccattaacatagaccagaacctgccctctaaacttacatatctggccattattattgaacaaacgtgttttgaataccttctgtgatgggcacaatgctaatatcagccccttgtgcagaatttggaaaagtacccttatatggagatacatggacaaagaagatcctactccttactttcaagatttttaagtctaacagtgatttatccagggagtcttagtgttcaaatgtagaacttgctatgatctcagcccttgcaataagcaccttgccagctcaggcaaaaatcaggcctatactgccccagcacctggtcaatccactgagaaggtagatttgatggcatctgatggtctacagataaagtaattatttcataggattatataatctttgttaggtactgcatggatggtaactggctgcacacttaaaccaaaattatttccttagtaatgtgtgataaggatagacattttggaaatggatgtggaaagtttcaaacagaataaaaattattaatgttatggcaattagcctttcacttcactgaaaatactatgtatggattcagcaagcatgctaaaatttaacacaaaaatcctctttggaaggcaattgctttaagttagaaaaaattagctcatttttcagtgaaagaatttgaaaattctgtctttggaaaccaaaatactgtatggcagagttggatgcatctttcactttaaaacgcagactctatttgtggtgaatgtatttgttatggtaaagtatttgaaaggaaaccctcagaataatttggggtaaggaaaaatactgttttaaaataagcccaacccatcagttttaaaccttgaaaactgccttgctttgaataagaaagaattaataatcgtgtatagcataaagaatatatgtttggactaaaatgcataatcgtgatttaaaacaaacttccaaattttaagagactctagtataatggtgtgacctcaatgatttttccaaatgaatttatgttcttcagagttaatattgatgatcttatatagttacttcatgactgggtctgtgtcttggcaaatctctctctagataagtgattcttataaatgttgaaaattcctttacaggttaactttcccatcattttttattgcttatgctataaagtttaagcctagatgcatcctttctggaaagaagggtcctactaatctcataagaatctcataataagttctctttcttaaggtttgtattttgtgtggggatcggcaaggaaagggaaaagccggaatgccaaacagcaaagagttattctttactgtagggctccatccaaaaagggtttgtaacacagtgtacagtcttgtagcccagctgtgtggagcattgattgcttctgcctagagcagggatactgtcaagttgctctgtgagttgagtcatctattgacaaagagctaccagcccgcagataatgctgtgcggagctgctgtcgctgctcccactgctcccacgatgcactgcttatagcagctgtcaaagatactgaggaatccacggtggaaaaaagacttttacaactggctggaagaaaggggtgtgagggaggagacatttctgtgcagagctgaccaaaggaaagagtaggcatcagtgcagtatgaatgc

SEQ ID NO: 8029 - DNA, 2300 bp, Homo sapien
tccctcccatccaggctcactgtaaactcctttgggccagtttcctcttccaatgtaagtactccttgaaaaatgaattagacacttttaaaataaataaatgtatgtgtacctttttaaagttgtaaatctagttatacctatagaaataaataacaaataaatttaaaaactcaaaataagcctcccactagtcatctaactttcattttaaagaaaggtattcccttggcttctttcaaattctgcctattttgaaagtgccaaagtctacacagaaagaaaaaacaaaacctccagctgaaatttgagaaatatttaaggccagaccctcccatggtcaaatgactttttattttattgtctacttttctcttgtcaattctcaagagctaggttccccaagacacagtacaatatcacttcatcgtggggagttttattatcatattcactgcattaatactaagtgcagatattagcaaatagatttctttcaacggatgctcaaacttcaatttgttatgaagtcttctaagtataagcaccccaaccctgaccccagatccatgggagaatataggttatcaggcccataagaattcttctggtccctggctaatgaaagaaactgtgacacactcaagtcaggggaacctaagtctaataagggtgaggaatgcccaatgaagtcatcaaaaccaaatggatgcaaagcagtcctttcgaggcactggcctgtcctaagcattggtgcctgagcctagcatttattgtggtttcaccagttacttgctgtgaggcccggaacaaggctctaaacctccatggcccagtcctttcacatgtaaaaataggtttaatagaaaactttctcttggggttattgtgaagatgaaatgagtgatgtacacagtgcctgactcatcataaatactaaacaaacattagttattattattaagaatattgaggtatgtaagtgggtaggctaaatcccaaaggccagggacagggaagtaagcaccgatctatgaattcccagatgaatatgctaatcggcaaatgaaccaggctatatggagaagccctagtgttggcttcttagtgttgtctgactgttgtaattcatcatcttttcatttgcatattcctaattgaggttgtatttttcttaaggcagggaacatgttacagtgtttttcaaattatgagttatgacccattctacaccccttcaaagtcaataaagaaggttaatgaaggaatcttttaagcgggtcaatatgaattgtatttccccccccattatttttctgattataatacatttaatcttgaccaacattataaaaaagaaagaaattgttaaaagttggaacggaaaatatcacaatgcataacttttgctaaaggaggtattgctttttaaaacatactgagttgcaattttaaatttatttcttgctgcatgttgcaatccagcatttggaaaatctttgggtctatatgttacttaaacaactattaacacatagcaatttctgaacacacttgagaattccaaacatatgctatatgacagtgttttccaaacttgtcttatgaatggtttacctagggtcattttcagattcccaggctgctttcctaagattctgatgctggaaacatactatcataatgaacattagagaggaaattaattagagattaattaattaatcttaatttttcattagagaggaaactctccttgttgtgcatctattcttatttggtggtaacacatccagtccaaagaggtactttataaaatatttccagctttctgaacggctaacattcattcattcagtccattattttcaaatatttattaatcatttgtcatgtgcaaggcaatgtgtacaaaaatacatataagagacacagttcctgccctcaagtagcttatagttgactcatttaagaactagggcagcatcccctgaggatcagaagaactgagaccaaaagaaaaggaaatcatgaacgtatacatatgactcaaatctagggtaacctaccttctaaaaatgttcagaggattaagaagcaggccgggcgcggtggctcacgcctgtaatcccagcactttgggaggccgaggcgggcggatcacgaggtcaggagatcgagaccatcccggctaaaacggtgaaaccccgtctctactaaaaatacaaaaaaaaaattagccgggcgtagtggcgggcgcctgtagtcccagctacttgggaggctgaggcaggagaatg

SEQ ID NO: 8030 - DNA, 2300 bp, Homo sapien
agtccacttaagaaaattaggcagtaaatctacaggtatagcactgggattttgtaggctagacaggtatactcaggtgttttaaagaagtttttaaggctaagggcctttttaaaaaaatgtatacacattaaaatggtatctaaagccctgttagaagtcctccctgatagccttgacagggaaacctacatgtacttcttcacctgtaacttgtttcatttaatccttgcttgcgagctgttctgagatttgtaacattttccagttctttttggtctctctctcctgggccatccaaatatcccggcaactactaaaataatattaataaaataggtaaatttcattttcccagcttctaatggaaaaaaatggtacttattcacaggttgaataaagtaggtttttaaaagttcctctgaatcctcagtggagaaaggcatttttaagttcttctatgttttgcatggcattgagttgttatatttgggttcatttattaggaagagctgcaggaaatgtgacctgctataaccttgggaggggaaagtgttattaactgaaatactcagttttgcatttaaagtccgtagaaaaagttgtggaatgatgagagctgggcatccatgtcgattttttaatgtcctggaagtcactggttgtgttgtaagtgcttataatttgtaaattacctaggctcctaagacagacggaactggaaatcaaaataagtggctgccttctcttacgttgcccaaggatctccagcttaggataagactgcctttttcttcctaaaaaaaggcacaaacaatgacagcccaaaatagctatttagtcagaactgacgacactttctgaatgcttgtcattaagagagaaatagaaaatcctgcttttcttcttcctttaatttctctccctgaaatacctttcttcctcctgaagctgcctcacctcattgcccaggagaaatgcccagtaactctgatggtgcttcagcacttctgcaggctccagaggggaggtggcttatgcaaagcatattaaagaaagatcctaaaagtcactgcagctttttctagtgagttatgctgatcttccttgttgctggaagctgatggggagcatcgtggcaaagacataaccactttttttcctcccactatttttgctgcagtgaaaactgttcatttctgcttgcattttgccagatagctttagaattctagctgagaatcggcttcccaaggctggaaataagggtatagcaccctaaattgtactttgtccttttgattaagtaaaaattgagttaatttgcagcatccggtgcctgacaggaatgacaacagatagaaggatctgacggatgtttttaatttttttttttccttacggacttataggggcagaagcttttatttttctctcttgctctctcccttctggagcctgctgaacattttacattcagcagcagttgctactgaatctgaggttatgttatcccctgaaatcttctgtctccatttcaaccccatctcattactgattgtcatgtaccaataaaacatagttttggaaaattggccacatcattttattatggagtctggcaactttagatagctctaaaagatgtaacagggcagggaagtaggagaaggtggtacttctcagtcctttaaccacagatcaccccagaggaacccagttcacattttaggggactttatatgacaatgatcctctggtcctggtcctgttccacatggagaagcagaatgagacatgcttgcggtgatttgtagtatttgccaaacagggtgctgcaccagaatagcctggaatatagtgcagagctcatattaaacctccaaaggaagaagggtttcctcttcatttacagtctgcgatgcgatcccattgtaaagtatttaataggataacaccggggctctccagaaatataagtaactcattggttaaatttcaattcttcacctttccccccctccttcctgagtgagctcattcccccctccttcttcttcttcttttttttttttaatccagtgatttaaaatgctagaaggaaaagcaactgaggtcttaactttcagacgctgaattctcatctaattgaaattactgggcataatgctatatatagccaatgaagagattttgagctctcactcagtgccttcaagacatgtcgttttgtagtcagagaaaacagagatcaatgcattttcaaactgacagagggaacggatgctctttagtagcac

SEQ ID NO: 8031 - DNA, 2300 bp, Homo sapien
caaactgaagcaaaactttactctcaaatggaatataatttaaattacaagtaccagaaccaacaaaagggagaaatattatatagcaaccttatggcccacctgtcttcttgactggcattcttgggtctttccactgccacaggagtcaatatctcttttcaggtctcagtttgatccagctggattgaggccaagagccaggtaactgttgcaaaccacttcagtgttcagttttgaaatccaggctgagtcttctatgtcagacaaagaaaataatgatgtattttttccacaactaaactttttacaccgcccacagagtttacagcaacgtaattttttagtttttcaagtttttcaattttcagaaaatatttagactgtttttacaaactgggaaaattattgtaaacatgaagaacgttactgaaattcctcttcaggcagcaacatttttggaagttcaatgactaactcaattaaggcacaaaccaaatttagacaggtctcattactttatacatggtcaaattcaaagatgatgataaagatactcaaatctgtagagaaaaatgtaaccccacctccccaaaaatacttttaaaaatctctttgactccagtctctaaaaagataggtgagtttgaacagttttctgtggcagaacacacattgaaaggcccccttatatttactgatcagaagttccggatctcaccccctcagtaactcagaatccagcttgctgtccctttcatttttttcttctgtgctctccaagcccccaggcttgatccttaatgcccctctgattctgatcctcccatgtattaaccgagaggattgaaaaaaaaggaaagcaatcccttggcatggagacattaaagtgacagtgctactcaatgggcacttgatgcaggatgagttggcgaagcagatttcttcacactggagtcattcacatcatgccatctcttcgcattcaagcagctccctatccggcgaggaaaaacactgagacttcgagagaagccaaaccttcccccaaaggtgttttcagagacgccgtagtagtattagacatgtaagcataagctatgtaaacggtccgcgatttcctaaatgagaaagtgcagctgcttggctttcacatccaccttttctctcaatctctcttcaaactacccaccttccttttgcagaaaagacaagacatttctttgccaccgctggccacccctgcccaagccccgttcttttagggaagagcactgaaatgtcctgcaccctccacgcgatgaagtgtttcctcaggcaggagcaacagcagcactagaaattatataactctcgaatttggcttctgtaagacatggagactggagggtcgggggttgccggtctgggagatactgctgggcatttaacgtgcacaaaacagcgccaggccttgcagtgccccccaccccgagacacggctgacaagtgggtcttctcgcgggggtagtgggcaaatttctctccggtctctttccaagcggggctaaaggatgcaaattgaggggactacagactggggagaggagtcagacggctgagaggagaggaggctagtcggggctgctctgacggcgctgggcggctggtccggggtttggaggaggaggtgcccgagaaacagagctttaacaccacacaggccagggcaaaggggcgagttccctcaaggactgaaaggggcaggcagctagttcccagctgccctgaggagaggcaggagcgcagtaacattacaacattcgggccgccccatctttcccgcaggacgcgaagagatcagggagctaagctgataaatagtcagggaaggaaatactcggctggcgaggggggcaggcccacaggcgcctggacctcctctaagcgaataagtggccgtaatttctagacgccgcgcccaatcacagtcaggatggagggcgcggcttttgactgagtgggggcgggcccgggctgcaatcgagaggcgttgagccgtaaatcagcaccacttcccgcccagggcgttctgggtccccgcccaccggcaagtcacatgagccaccaaaatggtggtgttcgggtatgaggctgggactaagccaagggattcaggtgtggtgccggtgggaactgaggaagcgcccaaggtaggcggaaatccgaagtggtatggggggtgatttctgcaccttcaaagtgttggcagactcttctaagatgatacctttaaaggagatttgaaaagttaaaacagc

SEQ ID NO: 8032 - DNA, 2300 bp, Homo sapien
gtgcatttatgtaggtttatagtttgcaaatcatctaacggttttgtagtgctttcatgtgtattattttacctaataataaatttttcacctaataataaatttcacctttagaattttattcaacattcgctcataatttagggagcacgtggtatatgccagacctccgggtaatcaagatacagtcatcccatcctcaggaatccacaacgcagtgggagttcagaacaaaaaagctggcaatttaaacacagaatgagagagtgacataaacgaaaaacccaacaacctaagaaaaagcaaacaatctagccagaggaagcgtgggaaggcttcccggaagaagtgacatttaaatcaataaccgaaagagaacagtttggcaggggagttgggacggatagaagcagggaaatactccaagttgaagaaaaagcctgtgcaaaggcctggagacaagagaaaacaaactgcagataatgaggactagaatttaggtcatctacgttctctccgcctctttccacagcaactggagacttaatcgactgctccttgcatggacttgggagctgttttaacttttcaaatctcctttaaaggtatcatcttagaagagtctgccaacactttgaaggtgcagaaatcaccccccataccacttcggatttccgcctaccttgggcgcttcctcagttcccaccggcaccacacctgaatcccttggcttagtcccagcctcatacccgaacaccaccattttggtggctcatgtgacttgccggtgggcggggacccagaacgccctgggcgggaagtggtgctgatttacggctcaacgcctctcgattgcagcccgggcccgcccccactcagtcaaaagccgcgccctccatcctgactgtgattgggcgcggcgtctagaaattacggccacttattcgcttagaggaggtccaggcgcctgtgggcctgcccccctcgccagccgagtatttccttccctgactatttatcagcttagctccctgatctcttcgcgtcctgcgggaaagatggggcggcccgaatgttgtaatgttactgcgctcctgcctctcctcagggcagctgggaactagctgcctgcccctttcagtccttgagggaactcgcccctttgccctggcctgtgtggtgttaaagctctgtttctcgggcacctcctcctccaaaccccggaccagccgcccagcgccgtcagagcagccccgactagcctcctctcctctcagccgtctgactcctctccccagtctgtagtcccctcaatttgcatcctttagccccgcttggaaagagaccggagagaaatttgcccactacccccgcgagaagacccacttgtcagccgtgtctcggggtggggggcactgcaaggcctggcgctgttttgtgcacgttaaatgcccagcagtatctcccagaccggcaacccccgaccctccagtctccatgtcttacagaagccaaattcgagagttatataatttctagtgctgctgttgctcctgcctgaggaaacacttcatcgcgtggagggtgcaggacatttcagtgctcttccctaaaagaacggggcttgggcaggggtggccagcggtggcaaagaaatgtcttgtcttttctgcaaaaggaaggtgggtagtttgaagagagattgagagaaaaggtggatgtgaaagccaagcagctgcactttctcatttaggaaatcgcggaccgtttacatagcttatgcttacatgtctaatactactacggcgtctctgaaaacacctttgggggaaggtttggcttctctcgaagtctcagtgtttttcctcgccggatagggagctgcttgaatgcgaagagatggcatgatgtgaatgactccagtgtgaagaaatctgcttcgccaactcatcctgcatcaagtgcccattgagtagcactgtcactttaatgtctccatgccaagggattgctttccttttttttcaatcctctcggttaatacatgggaggatcagaatcagaggggcattaaggatcaagcctgggggcttggagagcacagaagaaaaaaatgaaagggacagcaagctggattctgagttactgagggggtgagatccggaacttctgatcagtaaatataagggggcctttcaatgtgtgttctgccacagaaaactgttcaaactcacctatctttttagagactggagtcaaagagatttttaaaagtatttttggggaggtggggttacatt

SEQ ID NO: 8033 - DNA, 2300 bp, Homo sapien
ctccatctgcagtattgcctccatttttttctacatcatatgcatcttatcatagtgtaactatgaattttttaactcccatttttaataactaacgtttcccagaaaataaagcaaacaaaagggagcaaattcttagtctggcatttgaagtattccacactctggctcttttttttttttttttttaacttttcaaccttattggccattattctctacaagatggtggtttatagtttctacataattaggaaacacagacagttacagagaaggcctagtgaaatcccattaaggcaaaggtagtaagcagaatattgtgatttgtttgcttaaaaccttgagatgaaaagcaaagtgagtaaaagactagatgaccaggcacgctggttcacgcctgtaatccctgcactttgggagaccgaggcgggtggatcacctgaggtcaggagttcgagaccagcctggctaacgtggtgaaatcctgtctttactaaaaaataagccgaggctgggcacggtggctcacgcctgttatcccagcactttgggaggccgaggcgggtggatcacgaggtcaggagatagagaccatcccggctaacacagtgaaaccccgtctctactagaaatacaaaaaaattagccaggcgtggtggcaggagcctgtagtcccagctacttgggaggctgaggcaggagaatgctgtgaacccaggaggcggggcttgcagtgagccgaaatcacaccactacactccagcctgggtgacagaacgagactcagtctcaaaaacaaaaaaaaaaatcagctgatcagctgggcgtggtggcacacgcctgtaatcccagctactctggaggctgaagcaggagaatcgcttgaacctggaaggcagaagttgcaatgagctgagatcaggccattgcactccagcctggccgacgagagcaaaactctgtctaaaaaataaaaaataaaaataaaaaaaagactaggaattttccttcttgtacaccttcgtgaaaataagtctttctatttgtgcaagtttagaaactgcaattacagacttcttggcactatggagcctaatggtcaagcaaccctgcaatggagagacagtataaaaattatctggacaatgcaacactttatcacttgttcagaaatttgagaggatgagaataattaagatttctgataatgtgttatgatcatgtatttattgctacagttagttatatattttttggcacaatgtttacctgctaatcttaatggagttaagataaaattcaattgtaggcatttttcccttctattgggttaattagtccaagcgaactgagcaaaggttgcagggagccccagcatggctgaggaagacctggtgaggcatccactggctgctgggaggagagcattagaggtaccttctgaacagcactgtccaatagaaatataatgcaagccacatatataattctaaattttctagtatttatacttaaaaagcaagaagaaataagatgactttcacccaacactgcttccaaataagcagtactctggagaacacgagaaatcctcagaaaaataagctgcagctctgaggtgctgattatggtagggcaatcaatacagatcaaaacatggcacagggagcttaagttcctagggagagtagaaaatcgatagagccaagaaatagctcacctttgacttatttttaacctgagtagctatcatatgccaagagctgtgcagttttcatttaccccatgccaagaacgtaagtaggctctactgaccaggaagttaagtaatatgcccgaggtacgttttcaatggaagaggctgactgagggtcacccaacttatatctcgaaatttcacaatttctacaagttctgtcctgggaggcaagagtaggtgaaacgagcacactctacgccaggcaaacaaacctcaacgcttagcctcccggcacctcctagggccggaagcttctcagcccaaagccgctgctggctgcaacctccgtcccgcagtccaattagcagccgcgacccggcgcccgcccacgccgcgtcacgagtcagccaaagatggctgcgcccaggtaatttgagcaaaggccacagtgaactccggcgtggctgaggaaggaggaggcacccacaggctgctgggaggagagcataaggtactggtattccgggggagggggtgaagtaaatgtcccggtgtcaggagaagcacgacgcggtgacacgctagctaccagcagcgc

SEQ ID NO: 8034 - DNA, 2300 bp, Homo sapien
tagggaattgatctcagtgggtatacagcaaagacaaaatttggaggcagacgctaaaggaagttgagataaataaaattcaaatcagtgtattaacagaactacacaaatgtttacaacacagtaactacacttttcaattagttcattgtgaaaactgagcaaaatattttcaacaattttgggtcaacaaaaagtatggaatattttaagacaataaagagtgactggtgttgagagtactgaggctacacagaggtactgaaattcaaatctgaaaaatactgtgctggccacacaacactacaaatttctaatggaagaattccctttttgatccgcagcttaggtggtaagtaaataaaaaaacagctcagaaaaacagcaaaaatattaacatttaggagtctcaaaactttgtattggctgtgagtctgggggaaaaaaacataaatgtcatactaccaattaaactttcaagagtcatcagattatttagctttaaaattttactaaatcagaccttaaactacacattcaaaatgctgaactagataatcacatattaaaaaggtaatgactcattatcagtgaattacccagtctgttctatcaaagtagtagttaaggtcaccaaataatgttggtgcctttggttctggaattataactagctgtactgtaggagcatcagcgcctaagttttaagccagtgggaatactctgctgcctggcttcacaggcactgaatacacttaaaatggtaagaaactgaatggatttaataagttttgaataatacaataaccaactgtatatttattatgaagtaaaagccaatctcctacccaatccctcttctatcagctgcacatttccaagtaagtgagataaaatgactcaatctaaaccacgtgaaggaatgtattaacataatccaacaaaaatgaaataaaacaatccagagttttgagtgttttttcacacttgtaataaactgaaaaaatatttcaattaaaacaaccatatgccacaaaaagccactcccatcatccacaatactaaagtccttatacaacactagataaatttttatataaaacagtagaaactagcataccattaattagaaacctcaaaatattcagaaaacagtatcaagtactcaagagaaagctcaagaagccaaaacctcaagaatccatacatcctggttgttaccctaaattgtaattaactacccacacatttaatcataatcaactttttcaaagatatacaaatcaatgcatctatttaaaaggactactctttatagttcagaactttacattaacttttatattctactcagcagggtgtctgtctgtactccaaattagctctcatgttccaggaaataaatacaaactcatatgccttgtgatcactgatggcctgcttatgtaattctagtccactaaatgttaattccatagaatatgctcttgattatgtaaaaactctaatttcttgatgaaatactgtaattctccaaaggttacaattttgtaaagatatgcaataactgagtatcactcccatgaaagacaaaaaaagtataattttgttccaagattaacttagtctcatgtatctctattaagtctttcaaggattccagagaatcttttcatatctccatttctggaaagtgaaatcagtatagaagtaatttgggaacttgaaaatggcattcatttttttcagcagatgccaaatttttgaccgacatggttctcacaattactttgttaccaacagtccagtcagttaacaggttgtaggaaaagattcgtttttgcagacactgctaagctgttcaaagagaagagagagagattaatttagtgattataaaatgcacaaatatttaaaatattttgaacacttcttgttggattatatcagaggtgtgactacattttaacaaaagtggactttttaagataagtctggtcaaagaagtgcagaaacagtaagtcaatatgatagaaatagtaggtcaaaatatgatgtgttagttcaattaatgtatgaactcctgccaccatcaaaagacaaatattaaaaagctacatctttagtctagttctgtattttaccagaggcacatttagaagaaaaacaaaagggtcacccaaatactaaattgttttcaaccattacagtaaatagagccaaacctagaaatttcaaaaacaatccattttatattccagaaatctcctttatccatgtgctaatcatccagaacacaa

SEQ ID NO: 8035 - DNA, 2300 bp, Homo sapien
catggtagtgggtgggggttggcggcggggggtggggggttggtgtctctctatgttgcccaggctggtcttgaactcctgggctcaggcaatcctcttgcctcggcctcccaaagtggtaggattacaggtgtgagccaccacgcccagccaaatcatgtgtatttaaaacaaaatttcgtaatttaaaaaatataatcagttaataatattgaattttgcctaaggggaaaatgtagttggatgggattaccagccatacaaaacacctgtactcaagggaggccagagtatacatatatcaccttgaactgtgtgctcttgtactttggcaaaatctttcctaatggaatgttaagcaggacaaggagtccttttatttattcttctagataccacaggtcatacttttttcacaccttgaaataattgttttcattcaggtgagctttagtgttatggcttcagtcaaaactgtagactttattcactcactcactcaatatttgttgaagcctatgcagtaccaggcacgtttctcaatatttgggacctgtcagtgttcaacttccctggaccttgctttctgtgtctctaagaaatactgtatagaagcagctatcctcgaggatatctactacattattcagtatcctatagagaagtttctttaagatttaagaactagaagagcagttaaagaattcatgtatattttactcatgaacaaaggaaaattcatttctctttttttgtttgggctgtcaggaaacaatttttagcccaattcaaacaactgagtaagatattgcatccatccaattccaagattaaccttttcccctttcagaaatccttctcttcctagttcatcttttattggccttgctttttaaaaattcaaaatgttttgttttactatattctaatgtacttgtaaactgcttcaaatctcaaatcccttgtgggatgtgaacctaaatatctgtatttgtaaactgcttcaaatctgaaatcccttgtgggatgtgaacctaaataacaaacagaaaaggtctctaaaataaaagacatgttttgagaatggagcatttcagtgggaaaacgcatgccatagtaaactatgtgtgtattcaggaagacgaaggaagacaaagagttttaaaggaaaaaaaaatgaggatggttacacattgttttgaactaattatcttagctacaaaggtcaataacaagggtgacgtcagttaaaggttggacaggcagtttctgggcagacatccttgcagaggttttgtataaggtcgtgatggtctttgtgcaacgttgtggtttttacagtctttgttttcaggcatacaagcatgagtaccctctcttcatagcctttcctggctctatttgtcagagtttttgtttgtttgttacccaaatgcagtaagtcagtactgattggattttggctcaagtgaaaacatctacttacaaaaatggcaagaacaactgaagacaatttttgtaagcaatgttgtattctacattcattttgctttggttttaattttttttaattgacaaataataactgtcatattcattgggtacatagtgatatttctatacatatggaatgtagtgatcaggttagggtaactagcatatccattatccaactgaggacatctagtatggcccaggtattaaatagtattagtaaacgattgttaattttctgaagacttggtaatagtattatgattatgaaaaaaaagtccttatttttagagatgcacactgaagtacgcaggggtgtggtgtctcatctgcaactttaggatgattcagcaaaaaaaaaatttacaagcatttatgtaaagataaagcaaatatagcaaaatgttgtgttgaactgttgagtctgggtattgggtggtattgaattagggtggataaatctagagacttgttatttttgccgctgttattatgacatcactagaaagctggaattattcccactctaaagcaccctgaaatctcgcgacactacggcctggtggcgcgcgaaacgcggtgggcgggactggggcgaaaaccactgacttccggctacgccgttgtctgggtggcgcggtcgagtcatcgcagggcctcaccgcttcgttctcccgtccctccccgcgccttggcgcggggggtcgactagccaagtgaggcgggaggcgactcggacctttccctgcatttcgtttcggccagtgccgggggctacccgccctggggcctgggatccttggggc

SEQ ID NO: 8036 - DNA, 2300 bp, Homo sapien
tacagtatttcttagagacacagaaagcaaggtccagggaagttgaacactgacaggtcccaaatattgagaaacgtgcctggtactgcataggcttcaacaaatattgagtgagtgagtgaataaagtctacagttttgactgaagccataacactaaagctcacctgaatgaaaacaattatttcaaggtgtgaaaaaagtatgacctgtggtatctagaagaataaataaaaggactccttgtcctgcttaacattccattaggaaagattttgccaaagtacaagagcacacagttcaaggtgatatatgtatactctggcctcccttgagtacaggtgttttgtatggctggtaatcccatccaactacattttccccttaggcaaaattcaatattattaactgattatattttttaaattacgaaattttgttttaaatacacatgatttggctgggcgtggtggctcacacctgtaatcctaccactttgggaggccgaggcaagaggattgcctgagcccaggagttcaagaccagcctgggcaacatagagagacaccaaccccccaccccccgccgccaacccccacccactaccatgcctggctaattttttgtacttttagtagaaatggggtttcaccatgttggtcaggctggtctcgaactcctggcctcaggtgatctgcccgactcagcctcccaaagtgctgggattgcaggcgcaagccactgcaactgcccagattcgcttttctttgattattggaaggttgaatgtttgtcacatgaccaattgacatctaatgcgaataggattttcacttccctaactcatttttctttgaagtagggaaaaaatgttcttcagggaagatgtttgtcttttttcttcttgatttatgtgaattctttacattataaggaaaacatccctttgtctcttacattttccaactttttttaaaaatcattttaccatttactaggggtggagttgtaaagctgcttctcaggctgtaatttttaaatagtcaatttatcaaagaccaggctcagcagctcacacctgtaatcccagcactttgggaggccaaggcaggtggagcacttaaggtcaggagttcaagaccagcctggccaacatggtgaaaccccatctctattaaaaatacaaaaaattagaaaaaaattagccaggtatggtggcacatgcctgtaatcccagctacttgggaggctgaggcccaagaatcacttgaaccttggaggcggaggttgcagtaagccaagatcacgccattgcactctagcctgggagacagagtaagactatgtaaaaaaaaaaaaatccacttatcaattcattgaataatccgtacttgtcccactgacttcccaacatgccatatattaaattcttacatacacttggatctgtttctggtctttatctattttattgatcagttctgcaattccagaagcaaaatcactccactttttattggagtttatattacattctcatatctcatatggcaagtccctctttgttacttgtactttcttagaattttctagctatacttaagtatttatttctccacataactttagaagactttccaagttcaaaaaagctagaatttttatggaaattgcattaaatttattcatttctttcacctagtttttatgcaaactttacctagtttttatgcaaactttgcataaaattgattatttcttccgttctatttctaaatggttattgttactatgtaggacagctatttgtcttttctgttaaatttttaactgactagtgcaccaaactttcttgttttaattttcagcttatttatcaatttttaataattacataaccttatacataataactcttttgcttcctgctttgcaattattattattatcttgactgataataaaatagcacttccagattcatgtctaataataatgtttgtagccaacttccttatcttattcctgactttaacaggaatgccttaactatctagctattgatttgagattagtatttttattagattaagaaacatgcggccgggcgcggtggctcacgcctgtaatcccagcactttgggaggccgaggcgggcggatcacgaggtcaggagatcgagaccatcctggctaacacggtgaaaccccgtctctactaaaaatacaaaaaattggccgggcgtggtagcgggcgcctgtagtcccagctactcgggaggctgaggcaggagaatggcgt

SEQ ID NO: 8037 - DNA, 2300 bp, Homo sapien
cctttctagtcctggcttgtcttaagagaaaattttttgactaatttgatacgtgaaattatatctttttttttttttttttttttttgagacggagtctcgctttgttgcccaggctggagtgcagtggcgcgatctcggctcactgcaagctccgcctcccgggttcacgccattgtcctgcctcagcctcctgagtagctgggactacaggcgcctgccaccacgcctggctaattttttgtatttttttggtagagacggagtttcaccgtgttagccaggatggtctcaatgtcctgacctcgtgatccgcctgcctcggcctcccaaagtgctgggattacaggcgtgagccaccacacccggccgaaattatgtctaattttaacttgtatttattggatcactgtagacgttcagttcttggccatttttgtgaatttaattgtttattttttagatgttaatgtttcgttgatatgtataaaatatttatttaaaaaaggtagtgtctgggctgggtgcgatggctcatgcctgtaatctcagcactttgggaggctgaggcgggtggatcatttaaggtcaggagttcaagaccagcttgaccaacatggttaaactccgtctctactaaaaatacaaaaattagccaggtgtggttgtatgtaattgtaatcccagctactcaggagactgaggcaggagaattgcttgagcccgggaggcggaggttgcagtgaatcgagatcgtaccactgcactccagcctgggcgatggagggagactctgtctcaaaaaaaaaaaaaaaaaaaaaaaaaaagtagtgtctgtcatattagggatatttttctcaatttgatttttaccttcaacatccacttaatacacatttatctgaatctcccccatgtgccaggcactagtctaatcatcaaggatgaaatagacacagtccctgcccttaaggatcttacagtctaacagagggaagctggcagataaacagtgactgcaataaaattttcacatcctccaccagaagtacaaatagctatagcggatgcactaaaagatgtgagtgaccaattggacatgtaggggccaggaataggcttcagagacgattcttaactaagaataaaaagctttactagagtgacaagggacaaagtaggaaaggcattccaagtagaggaacacctaaagatagggcgagagagctggttagtggatttgggtttggcttcaatatttgggtttgaggagtaaaatgtcaagaaaatccagtggaagaaggggctggagagacctcagaagtcacataatttaaaaaattatacataactttttgagtaagctttccctttctgatcttacataatgtttaagataaaaaaaaaatccttcctagccccagagatttgatgtttaccttcattttcttctagtttctgtttacatttaactaatctatcaggagttgactttggcatataatggcaagcttcatttgaatcttattttttctgttttaatgtttatctgtgtggttcactaagcttctttctgtaaccttattttgctaatgggtaaaaacagggggtgttaaatatctaataaagagtatttatgcccaggtggggacaatgctaagaacaacaaaagaaatttcactggtgttttctattttaatacttaaataccaaaagggagctgtgccaaacatcacgggtgcagatatgcaggcttttagggtcctggctctcagaataccactactactttgtattcatagactgaaattttttgaggagccaaccatgtttccacaaacagtaatttattcaaacgataactgaagaggggagagggaggataaatatatcattgcctgcttcatttgtttactactaccagaaattaggtggagtcaggcttcctcccctgatgctggctggagattgagtggggttggcatctctgtgctgtacaggccagacactgagacagttgacaactgagagctgtgattggttagaaaggcaaaagtaacccgaccagattggctctggactcccccagattcccctgttgttacttcatagcattctgaagacctgtccaccaattacagggctccttactggaaaaaccaactgctggggagtgccaagagtccctagcaacaccctgcagcgtttgaaatctgaggggaaaagactgtagtcagcccttagtggatgagagcgcctatgctccagaaacagcaggctcccaggatggacaccccgcc

SEQ ID NO: 8038 - DNA, 2300 bp, Homo sapien
gatatgctaatagggcttaatgaggaaagcagctaaacggaggagccattagatagaaaaccaatgtgctgatggctaaaagtcagtgacatgtagtgggaaacctgaaactttgcttatgaggtcctcctgccagcagtgaaggtgctgaactttggcacatgacttgacaaattcttaagaactgcctaggaaagaagagagtccaggcttcagctcttgtgagtatgtgctctctgtctgactactgcagatgaaacaagccttctgcccctaaggggtgttaggtaaaggggcttttccagttacttttgaactaggacatatttaattttgagcatcttataatatcttgctatgttttgttcaaaatttagtctgtggagtaaaagcaaaacacacatagacatatatgcctaaatatctgtatctttattcatgatctcctaattggcttagtttattggtcaaggcacatagactactcctgtgctgaactctgggtaaattaatttgtcccttttttgtgatattttccaaaatgactgttagtgccttttcactggtaaagagtatattcttaccacaaaaatcaaatacatgatccaaacacaaatgatgaaagcccataaatctaaaattgattacatttgagtagtgggtataattgaatttgaccttcatagcatcatccaacaatatactttgaaaatagtagggtgcaatgttataacaaaaaagtttttgcattctcattggaccatattgtgggacctaatcttacactgctaccagtataactctccctaatacacacacattgttgtttcatgggaagtgattaaagtaggtgtcattttagtgagacaccataaatgcattctgatgtgcatttacctatgggagcctaaggataggtgaaaattgttatgtgagcaaggatatctttagtacgtgtagctaaatttttagtttttccttcattagatttctttaaagatgaatttaatgtttaagcatgaatttgagtcttttgtgttatgtatataaatataatttgatttttacctattttcttaatatctcttataatgataaagtcaatgtatctgtttcattcacaatataatttaagattctttatcatatgatatttattagattagaaaatacttatatagagcttactctgtgctaggcactaagtgccttggaaaatattaacttattcattataagagctgtgattcaccataagaaaagcttagatgttgtgattcttagaaaaagaagaaaatagttttctaactaggtgtatgcaaattaggattataatttatcctcttcttgtaccttctacacatatactttctatatcagaaagaagacatatgctacattttcttattaaattcttagagtaccctaactttaaccattctaactttgccttgggatattgaaaattctgaatcagtgaggtatctaaataatttatattttcaaaaaataatgtttattttataattctgagtgtaaaacactatcagaaaagtaatcctcatgctcactaaacaaacctactctaagacactcaacaaccagaacagttttattattgagttgtgtacaaaaatcttgactgtccagatgaaatagtttttcagcctgcagtgtgttagtgatatatctcaaggagatgaaccaataaagtacagactttgtggtctgaagctctgttgtgaaaaaataagctaaaccaattcacactgacagtataatttgattcaagtgcagctccagttcaataaaaactaatgtttttaaaattaactttgttttgtatttggttcaactccttgctagttctctctctatataatttataaaaactgcatgttgctaatctcatgatcctgtgcatgtggactactctgcctttaacttttttacaaaaacatgtttgttcatagattaaataaaagtatgttttcaacttaatgtctaatgttttctgacaattgtaagaataattttgaaatggaaatgctgctgtttagtttccacagtgcctacacaacctgataatccattttctcaccctgacaaactcaaaaggatgagcaagtctgttccagcatttctccaagatgaggcaagtttgtcttttgtaccttcagaaaaatggagacagagggttggaattgctatgccaaggttggtgtgtttgtattccactgtggcagagatcaaagaggtcagaaggactggcccttgcctttcaagtcaatagaagtagt

SEQ ID NO: 8039 - DNA, 2300 bp, Homo sapien
ctgatattattgtgcttttgtcagtctctatgctgtttgaatctctgcttaaaagcaagttggcaccttctgatttcatttggtttttatgttgcagtatgattttgagtattggatctcttgtggcctctgtacgaaactgtagatgtgaattcatttataacttatttggacctatgaaagaactgttagagtatgtgcttctctccatatccataaaagcaaatcttattatgcccagggtttaaactctgagtttcaaaactgccttgaatggtaaatgttctaagtataaaccaagtgaacaagtgaatctaagaagtaaatgtatacctgtggtgactaatgcccatctactaattaatgtctatcatcaagcaaagataatgtttgttcgatcttttctgttcaatcttaagattactctacttagctgtgactactatcttaaggacaaataacacatttaaaaagtactcagatggcctagtaaagcatgcagctctgtgtgtgtgtgtgtgtgtgtgtgtgtgtgtgtgtgtatgattttttagcttcttggtttcactctgtttcataaaccctaggcactgggggtatgaagataatgatacacatgtctaccctcagggccacaatattttaaataataatttcccaacagtctttggatatgctaatagggcttaatgaggaaagcagctaaacggaggagccattagatagaaaaccaatgtgctgatggctaaaagtcagtgacatgtagtgggaaacctgaaactttgcttatgaggtcctcctgccagcagtgaaggtgctgaactttggcacatgacttgacaaattcttaagaactgcctaggaaagaagagagtccaggcttcagctcttgtgagtatgtgctctctgtctgactactgcagatgaaacaagccttctgcccctaaggggtgttaggtaaaggggcttttccagttacttttgaactaggacatatttaattttgagcatcttataatatcttgctatgttttgttcaaaatttagtctgtggagtaaaagcaaaacacacatagacatatatgcctaaatatctgtatctttattcatgatctcctaattggcttagtttattggtcaaggcacatagactactcctgtgctgaactctgggtaaattaatttgtcccttttttgtgatattttccaaaatgactgttagtgccttttcactggtaaagagtatattcttaccacaaaaatcaaatacatgatccaaacacaaatgatgaaagcccataaatctaaaattgattacatttgagtagtgggtataattgaatttgaccttcatagcatcatccaacaatatactttgaaaatagtagggtgcaatgttataacaaaaaagtttttgcattctcattggaccatattgtgggacctaatcttacactgctaccagtataactctccctaatacacacacattgttgtttcatgggaagtgattaaagtaggtgtcattttagtgagacaccataaatgcattctgatgtgcatttacctatgggagcctaaggataggtgaaaattgttatgtgagcaaggatatctttagtacgtgtagctaaatttttagtttttccttcattagatttctttaaagatgaatttaatgtttaagcatgaatttgagtcttttgtgttatgtatataaatataatttgatttttacctattttcttaatatctcttataatgataaagtcaatgtatctgtttcattcacaatataatttaagattctttatcatatgatatttattagattagaaaatacttatatagagcttactctgtgctaggcactaagtgccttggaaaatattaacttattcattataagagctgtgattcaccataagaaaagcttagatgttgtgattcttagaaaaagaagaaaatagttttctaactaggtgtatgcaaattaggattataatttatcctcttcttgtaccttctacacatatactttctatatcagaaagaagacatatgctacattttcttattaaattcttagagtaccctaactttaaccattctaactttgccttgggatattgaaaattctgaatcagtgaggtatctaaataatttatattttcaaaaaataatgtttattttataattctgagtgtaaaacactatcagaaaagtaatcctcatgctcactaaacaaacctactctaagacactcaacaaccagaacagttttattattgagttgtgta

SEQ ID NO: 8040 - DNA, 2300 bp, Homo sapien
aatgtctggcataggacaaatcatatgtctaaaataggagtaaacaactaagagatcacatttctattaatgtggtaatcttgtttttgtagggtttacgtttgcaaatatttcttgaccaggaaaattatgtttaagagcatattaatagtggagaaattttattttcttctgtgaaataagtgcttcttaaagtagaaactcatagcataatgtctcttttcagcctaccatttctatgtccatatgttagaggattttttttttttttggtattgtgcagtgttcatcgattttgttttataacaggttcagaagaagaacccagtcctgttttgaaaactttggaaaggagtgccgctaggaaaatgccttccaaaagtctagaagacatttcatcagattcatcaagtgagaataaagttcgcctcactgttcatgccccatctaagcttaaaaatgcctatgtgctctcctgtagcctcactgcgtgctgttgtgcactgcaccctctaatgggggcagttaacagatgaaaataacctctccaaagtgcgctgaagaggctcaacctaaagtggctggaactttgcttataaaataatatattacatttggttactaaaacactaggtttcctttaattgaagaatcccagtttgagtgtttctcaagtacagtgagtttcaaaggatagtggtagctagtagtattagtgaaaatagtcataactagcatttattgaatattatttgccaaaacgtgcctaacaattttacatgtattatctcatttaaccagcacaagcaaccctatgagaggtgaattattgttatccaaatttaaagatgaggaaaatgaagctcagaaatgtgaaatgacctttttagtattacacggaagatctgggactcaaaattaacaggctattatcaagaacatttatgaagggaccacattatatatgacagcgttggatgtccagtgaattttgcatgatacggagttgaattagtccctggcttcaaggactttcctttctcttttatcccttctattctgttcacacttttcttctagatactggaactataagcccaaaactacttaacatgaaagactttaggtacacgattccccactggcagctgctttaatggtgaaggatttcttgagtactagcagaaaacataatatataaagagagttgtgtgctagacaaatggactaagaaaccatgatttcttggggttttgttcttgctattttcaagctaaaatgcacccctgggattgcagatggtcataagaaaaattatcaagtgaaaagttaaccactgccaaactcatatgattgaaaattggccattgttatgtttagaatattttttgtgcatttgcaattaagaataaaaagtcagaatttaaaaatgaaaaaaagaaaagaaaaagccacttcaccaaacatttcctaaaattcacagattcccaggggtttgaagacagtattcccaatttggaatgtagtcctgactatcccaaggatcttggaatctcagggttagaagggatcttaaaaatcacccattttaacctcccctcaatgcaggaattctctctaaagcctcctcaacaggcggccaacccccatatccgcctgaatgcttccagagaaggcgagtcgaatcctttgttggacagccctgattgtttttcctgatgttggtgatgggccttgagaaaaagaaaaaaagaaaaaaaaaatctcagaacaattggcccatttagcaaacctcttgcctgtgaaacatggggctatttccatggtgcagctttaaagtactcaggaatgtatagggttaaaaaaaaatcaccatcagctgacgggtattcctgcacgctcccttccaaatactgatacccactctcacactagcctgccaagattccacttagcagctggtccccagttacatctcttcagttgacttcccaagcaagcctcccagaggcatatgtgaatgatgatgcacacacacaaatatttgttaatgaccatgggtttgggaaggtgttagtcatggctagcatcataccctttacagaagaatagagaggctgttgcagccccgtgctttctcctgctgctggccgattgcttgctctgaactaaccctctaacccttgggagtctgtgtgcagcagtgatgtgagctgcatccgggctgaaatgggagctcccgctatggcactggctcaaggagctaatctaaagagaaagtattttggggaagacatctt

SEQ ID NO: 8041 - DNA, 2300 bp, Homo sapien
tataatcaggccattcccaaacgagtggtcttagatgaggatgatcaagcatcccagctctccaattcttattcctcaaataaatctaaagagaccaagccacaaatagcaggtccatccagatactatctttcagctgagcaatcagataaagtgtctctgtttcagaataagaaaaatgagcctataaaaagatcacaagtggcagacagtttgccttctagaagaaacattactttaccagcactgcaacctccctcaaatgtcgggagtgaacgacatgctccattggagaaagacagacctctagttcgtgaatcaaatgccaactttaaagttatgtccctaaaagaaagaatggatgaacccaatgcagaacaggtctataatccctctcagtttgagaatttgagaaagttttgggacttagaagctaattcaaacagtaaggataatgacaagaatattaccaccacaagccaaaaaaattctgcaccttttaataggcagaaacacaaggaattcagcgacattaaattatcaggtaaaaatacccatgaagcagaggtgcttctaagcccaaaaaaagttatggcaagagaggaaatggagaaattaaattcaaagggcatactccaggtgctaccagatgaaatcacatttcctttgagtccacttagaaagtatacttatcagttgccaggaaatgagtcatcaaaggaaaatgtggaaaagaatacggaagggattgttactccagtgtttaaggaagaaaaggattactcagaacaagagattcaagaatccataataaaaaccaatgttttgtctaaagactgcaaagacacttttaatgacagcttgcagaaactgctttcagaaacctcaacaccagcaattcaaccctctggtggaaaagttcatggaaaacaagtgcttgaaccaagtgtttctgaaaataggacatggcctcaaaaaacagattttgctgatactgaggaagaagtcaaaggacctgagaagatcattaatgagcatgttgacaaaacagtagttcatccaaaggttaaacggaactctttgactgctagtctagacaaactcctgaaggaagcaactggaacttcaccctctcccttgcaagccaagttggcgcctgttatcactggaaccaactctaagctggaagaggggagattttttggaaaagggatagaacagagtcacaatacttcagctgataagagagaaatactagctccttttccagtgagagatgaaacttttggaaatacagctctcctcaagaaagctgaaagtggtgagtgccagctaagcacacagaatttgattcagatggctgcagaagattctcatccattggatccaacttcccagctttccagaaagggttcttttggggatgtggccagccctccccaagatatgctttttccccaggatgctcatcttgttccccaggctagggtacacccttctcaaacggaaatttcggagactgtagagaaagtcattcttccacccagacctgtattgaatgatgtaagtgctgcattacagaagctgtgtggagaagtatggttaagttatccagctggaagggaagtaggtcctggagaagtgaacccagaatttcctgaagcagtacagccagtatgtagccccctaaatcctccaggagtgatatcaccatgggctacgatggacaccatagttccagacaggaaggatttttattcctccaatgtagttcctgataaaactcatgaagttggatcttatttagctgcccaaatgtctccatcagaccagacgcttagctcatttgcttccattgttgctcaatatggcaaaggcctccctcaggaagtggaagaaattgtgagggaaacaattgttcaacccaaatcagagttcctcgaattcagtgctggcttagaaaaactactgaaggaagaaactgaaaccttcccctcaaaatatgaaagtgatacagggaatctttctccatcaaagttaataggtagtacagaggagcccaggcgagccacttctgaatgccatcctgaggaattaaaagaaacagtagaaaaggccgaggctccgttaataactgagagtgcttttgatgctggttttgagaaacttcttaaagaaataactgaagctcctccttatcagccccaggtgtcagtgagagaagaaactcacgagaaggagtcctcacagtcagagcagaccaggttcttggggacagtgccccatttttacagggcagc

SEQ ID NO: 8042 - DNA, 2300 bp, Homo sapien
tcatgactgtaatcccagcactttcggaggctgaggtgagtggatcatgaggtcaggagttcgagaccagcctggccaatatggtgaaaccccgtctctactaaaaatacaaaaattagctgagcgtggtggtgcatggctgtaatcccagctatttgggaggctgaagcagaagaatcgcttgaacctgggaggcggaggttgcagtgagccgagatcccgccactgcactctggcctaggcaacagagcgagactccatctcaaaaaaaataataaaataaaatgtaacatgaaacagaatgcaaaattcacatgtatttttaaaataaagaaggaactacaaagaaatttttcggttaggtctataccatgtacttccaggtctctacatttcctttcctttactgtcatagggcacctttggtagaataccttaattaggacaacttacattttaacccctgaaaaatgctggtataaacagctattggtatagaaagtgcaaatacaaagtgcttttataaagatgatgatgtgaatgattaacagttctttaagcatgctcttttcttatttagaaaagtatttctatgttgcagatgaactgtctcattgtgttgagcctgagccatctcaggtgccaggtggcagttctagagaccgtcagcaaggtaagccccctcctctcccggctctaaaagctaagacatcttcacgttctggtccatatgccactgagataaagaagtcaactgatgattccatatttaaagttctagactggtttaaccgaagttcttattcagatgacaataagtcattcctccaacatccccgaggaatagagtccaaagaaaaaacagactcaaaatcacaggttgctgttgacttggtgacagatgacactactttaagagaaaatggctcaaagaccctatcacccagcaaaattgaattgaagcctgtgagatctgactcaccattccaagcagagggagatatgctggtttctgaaagttgccaagataataatgtgaatatcaaatccaaattcatgaatttgtcccaaaaaggcaccccaaaggaaggcccaggtatattgcaaccatttgaaagctatggcaccccaagtcaagggagtaaaaatatggactatagccaagattcaaaaagcccaggaaaagggaatggggcatctccttcaaatagtaactattcctacagtgttctcaaggaatctgatgcagaaaaccaagttccatgcaacactaataatattggcaacttgggtgaagaagaacccaagtttcatgctcatgaagaaaatagaggacactcagaagtgaattttgactcttcaacagttgtcaaagaaccaggtttgaaagataacatgaatgcagagagaaagagcaaagtaggaaatacctatatcctgaaagcctccttagagccagagaatattaagtcaacacctggggttgccaacaatggctctccttggaagaagcctgaggtccaattccagcaagaagctggtgaggttcccaagaaccaagtgcagagagagaaatacaaaagagtgagtgacagaatatccttttgggaaggagagaaagctggtgctaagataactcatgaaaaacccacatcttcatgtagccaggaacaaccttctgctaaagcatatcagcctgtgaagaagtcacagggtgtatcatccatggacagtttatctacagaccagagtgaatataatcaggccattcccaaacgagtggtcttagatgaggatgatcaagcatcccagctctccaattcttattcctcaaataaatctaaagagaccaagccacaaatagcaggtccatccagatactatctttcagctgagcaatcagataaagtgtctctgtttcagaataagaaaaatgagcctataaaaagatcacaagtggcagacagtttgccttctagaagaaacattactttaccagcactgcaacctccctcaaatgtcgggagtgaacgacatgctccattggagaaagacagacctctagttcgtgaatcaaatgccaactttaaagttatgtccctaaaagaaagaatggatgaacccaatgcagaacaggtctataatccctctcagtttgagaatttgagaaagttttgggacttagaagctaattcaaacagtaaggataatgacaagaatattaccaccacaagccaaaaaaattctgcaccttttaataggcagaaacacaaggaattcagcgacattaaattatcagg

SEQ ID NO: 8043 - DNA, 2300 bp, Homo sapien
aaccacaaaagcacatttacagcctatgcttgcatcacatttgctaacattccattggccaaagcgagtcacaggccaagcccaacattaggaggatagggatgaattctttgcttactctggtgggaacatgatagtatagttctgttacagggaggaaatgaagagttaggaataatcattgaatctgctgcaactttaacttggggtatggaagttatggaaggcttcatggaggtggtaactttgatttgtcttgaagggtaagtagttttcaagatgaacaagcaggtagtagcatatgcaagcacatgcaaattaaaaagaaaatgaagtaatgtcttaatatttatttgagtaattactgtggacagtatgcagagagctagaggaaattaaaacaaaggtcattagattccctgtcaatgaagcccaaacttcatggggggagatcagaaagagacataatacaaaagagaaatatattactaagtatagtcttattcagctggatggaaaaaaagtgtgaactcagagcggaagctagaatatagttttagtagctatttttggtacagaatgcaagacatgtgctctttttatattcattatttcatttaatccttacaatctgtgagggacatcctaatgtcaagcacaaatgagaaaacagcttcacagtggtcggtaacttgcccaatgacttatagctagtaagtggtagaaggataacttcccagtaattctgtttttcaagtaattaatttttataaattttattcactaatgtacatactgttttattcttaagtggggctgctttaaaatttttttttctttctttttttttttttttgataaggagtctcactctgtcacccaggctggagtgcagtggtgtgatcccggctcactgcaacctccgcctcccgggttcaagagattctcctgcctcagcctcctgagtagctgggattacaggcgtgtgtcaccacacccagctaatttttgtattttttagtagagacggggtttcaccatgttggtcaggctggtctcgaactcctgacctcaggtgatccacccaccttggcctcccaaagtgctaggattacaggcatgaaccactgcacccagcctgctttaaaatttactaaaggtttttagtgtgtatgttcagcactgcacttgttaaaagtgccccaaccttgagtggatcacctccgaatttctgtagggctgtgtcattcttcacttctcacttccttcccattacatatgtattgaagatgcctcaaagaaaataggattcttgcacattgtgcaactgaaaaatcctcactttggatggtgaggtgttttgaaactctgcctcttcctttcctccagtttatatacacacacaggtaggtgtttttcccctgagaaatgaaagtagacaagcttgttaggttcctctaggtccagcaaaggttagcagtgagactggatgaagaataacaattctcactcttctgcaaactatctctatctaatactagttctcctgttaatatggagcacatatatagtacagtggaatattcttacttgtgaagaggtgagcatttaaaatttttatttctagattcttgcttgaccactggaatcacatatccctgatcttactgacctttaacatgactttttagcctagcatccccagagtttgcagagagagaaccagttcatttttgcaaccatcctttactcaggtggatcgttaaacactgacaggcatttttgtgggttctccatcttggccgtctggaatagggttgaagcatgtttcatgacccatttaccatttgctcaggaagctggctgaactggtttccttgatctcagagaccatctcgcatggccatttaaaaatcttgtagtaatgagtagtgcttataggaactgcctctcactgtctggtgtttgctgtctcatgattccccaggtaggtgatgctctgatgctgctgcctcttatgaattgacgacaggtgcagagagagaataaactgtgtctaagactggaccagagagtgagtgtgctggaagccaccataggaacaagcgacctgtttggcaaggaatacagcatccttctgagagcctcttctcgacactatcccacagaccaggacttcctcatgggaaagagcacttaggatcttgctatcagctgccctaaacttttgctgagccaaaataagactttgatgcagaactgaacaagatatttcatttttgtgtgttttaatcttcctg

SEQ ID NO: 8044 - DNA, 2300 bp, Homo sapien
gatcttggccaagagctctaagatttagtctctgagccatacaagatttagatgaattgggagccataacaagaccctgccttaaaatttctcccccacttgcctgccccacaacctgaagcaaggatcctgtgaccctctctagcatttaggcattgctatttgtttccaggggacgagtgatactgggaacagcatgtatttagttccttcaaagtcctatgccagatgatacaaggcacccagaggtgagcaagacccagtgcctgccctccagagctagagaggggcaggaaggggataaccaaggcaggtgcaatcaacaataaaagtgaagtaccaaaagcatctgaggtcacgctactcccctgcctaaaatcattcgccaacagccatcaccaacaggacacagcctgcttccctcagcaaggcaggtacagccactcctccaacatctgcccacctacctccttagcttcatctctgcctcattgtcccaaatcctgtgcaatagccgtgacatatgacaggcatctccatgtctctgcctgcctctctgtgcccagtcttctgtcaccccttcaatctgacctaatttgtagccctccttcaagacctaccttggtcacatttgtattttttattgtccccctccttcagcgtagtgactctacaacactttgtcaacctattataacacttaccctaaaatgaaattatttacaaatttgtttcttcaaaggcaagaccagtggcttattcctcttttgcatgtggcatgctcacccagcacagggacacaccaggctctcaaaggctgaaggaagccagaatacacatctctgcacagtgccaggactcttgggccaggctagcagcctgcactgggcactaactgaagcccttggggataagtatttgtaagtttgggagaaggaagacctttggaagaaccaaaggcagacctgggccaccctcagttaaatggacaacactagtccaggaaatgataaggaaaaaggctttaaggttcatctccttcagaggtttgcctgggctggccccatcatgggtaacttgtaaaaaataggtcgtgatacaatttttaaattattttatttatttttttgagacagagtcttgctctgtcacccaggatggggtgcagtggtgcgatcttggctcacggcagcctccacctctcgggttaaagcgattctcctgcctcagcttcctaagtagttgggactacgggcgctcgccaccacacccagctaatttttcttttttcttttctaattagaacagagttttgctatgttggccgggctggtcccgaactcctgacctcgggttatccacctgcctcggcctcccataatgctgggattacaggtgtgagccaccgcgcccgaccacaatattgtatttactgtattgcattgtctgcctccctgccacacagcgtcttccaggagcttaccagtcctctgtgcataccccagtaagtagctcaggcagtgcatgacgccctcacctttctctaggtattattgtattttaaagcatcacttcatttagtcctctcaacaacttttttccccccttcttctatttcacatgtgaggaaattgacgtcccgagggttaaagcaagttaccccatgaccgggctccataccctccgcgcccctttccctgcgcggtggctgtcccttctcggagtgcagaggctcctagtgctccacactctcgggctccaaggccccctaacgcgccgtgataaaaataataataacaataacaacagtgctgctttatttgcacagaaaacaggttgtttcggggcaaggtacacttgagaaggaggctaggaaccggagagaagcagcaggcgggggcggagggcgaagggagggaaggggagagggcaggggctggcaggcgctgtgtgccgggcgaggaggccggggcgggccggggcggggagcgggcgaagcgccattggcccgagcacccgggaccggccccaccgcaccgcccgccgggggcgggggtagcggggagggactcgcgcacgccgctctgcgttgacagtgccgggcgacacccgggccgtgccgccagcgtccgtcgggagagtgaaggctcgcaacgccttgcccgggggaaggtaacgcgccgcgcccggggctgcgcggtttgcaccgccaggccgagggctgggggccagaagacaagagagacggcgaggcgcgctccctgcccggcagcgactcggaggtgcgcactcgggttcca

SEQ ID NO: 8045 - DNA, 2300 bp, Homo sapien
gtgaggagcccctgcgcccggcagccaccctgtctgggaagtgaggagcgcctccgcccggccgcctccccgtccgggaggtcgggggcgcctctgcccggccgccccttctgggaagcgaggagcccctctgcccggccgccaccccgtctgggaggcgtacccaacagctcattgagaacaggccatgatgacaatggcggttttgtggaatagaaaagggggaaatgtggggaaaagatagagaaatcagattgttgccgtgtcttgagtagaaaaaagtagacataggagactccattttgttctgtactaggaaagattcttctgccttgggatgctgttgatctatgaccttgcccccaacccggtgctctctgaaacatgtgctgtgtccactcagggttaaatggattaagggcggtgcaagatgggctttgttaaacagatgcttgaaggcagcatgctccttaagagtcatcaccactccctaatctcaagtacccagggacacaaacactgcggaaggccacagggtcctctgcctaggaaaaccagagacctttgttcacttgtttatctgctgaccttccctccactattgtcctatgaccctgccaaatccccctctgcgagaaacacccaagaatgatcaataaaaaaaaaaaaaaaaaagaagaaaagaaaagggccccaaagtgacgtcagccccatctcaaattcaaaccccatagtaaacgaacaagatagaccttaactactgactaattctccaaagcaaaaagtcaggaaaataaaaaaatctcgttaagctgtaaaaaataaaaataaaaataaaaatacatatccaggtacatactctttctttctttgagacagaggctcgctctgtcacccgtgcagtggcagtctcggctcactgagatctcagccttccaggctcaagcaattcttcggcctccacctccgaagtagctgggactacaggcactcaccactatgcctggctaatttttcgtagagatggggtttcgccatgttgcctacgctggtctcaaactccttaccgcaagcaatctgtccacctcggcctcccaaactgctgagattacaggcgtgagggattgtaggcgtgagggattacaagcatgagccaccgcgccctgctatattacttatttcttaaacacctgcaattcattaaaatacaccatgtataaattataaatcataatattatcaagaactgttatttctaagtgctgaataaatgaatatttccactcattaaaaaaaaaaaaagttgtccgttcaaagccagtgtcaagtaccaaaaaaagaaaattatcttgcggcagataatgagaaataatgcaggagaggaaagaggaactttaaaggctgtacgtgtaggattttctttttctctctcggaggaaagaacagcaaaaagcgaagagtgggaaatgctggacttaaattcctttctttaggtttacgaacaaaaaaggaaagcgagaagaaaaacagaatcaaggacttatacagcaggaagttgccctgtaagcatttagtccagggacctgccattcttattaagagctaaaaccaaagaattagtgcacgaaagtagaaagaagacaagccgccattgtggaaggagcgcagcgggacagaggcgcgcagaagcctcaccagacaaccaggccccgtccccgtcccccgaactgtgcggaaagcgccaccgagtccaggcgtctcattttacagcggaagacacaaactctgagatccaaatgacctgctcacggtcacagcacgaagcccgtgggccctgtgtctacagtcaccaacttccaggcttgcgactaaagggagccaacgagcgcgtgagcgtttgagaccagctggctgagggacgccgaaaatcccgcgcggaggaaggcgggagagcgctaccgctgctaccaaggcggcggcgcgggcgctcggccgggacccttccctgcgtcgccaccagatggcgcgctcggcccgccgttcgcggctaagctagggcgggtggggagggagtagggaggaggacgtcggttgccttggaaatgcagggcgcagcagccgctgcagtggagccggtaggcctggccggcgggctgaaaggaagtgcgagctgtccgcccagggccgggtatccgcccctgcaggctgtggaggggatgtcaggagactggctggcctcttttcttggcccccgactccttccagtctgacactgaagactttataagcttccccccgac

SEQ ID NO: 8046 - DNA, 2300 bp, Homo sapien
gctgctgcactccagcctaggtgacagagcaagactctatttcaaaaaaacaaacaaacaaacaaacaatctctataatgcctaaaacaatgctgggcacctttcagctctttaaatctacattgtatgtatgactgtttgaaagggaatattggtccatttaaattgcagaattttgtaactgaaaaggaagcatagagttcatctccatcaatcctcttatttctggaggttaaatatccttagagaactggaaaaccagctctaaaattcaagtttcatagtatccaaacgagcttttttttgaccagtaaaggatttttttttaatgttgcattttctcattattgggaaagaaagagcctagtttttctctctaatgagtatacaatgtcacaaatataattgatgtttgggggaaagggctaaggatataaggtttaattcaactgaaatttactaagcatttattttatgctagaaacattcacatatgatttcttattttaatccttacgataatatgcagagctaggtatttttatcccatttgactgcttggacatttaggcccagggaattgacttgcctgagatcatgtagacaagaagtgataagggcaagacttaaaaccagagtttctcattctttaactactcttcactctactacagaggtactatatttctgtttttgttttattttgtttttaattgagccaaagggtttaggtaacacacttctgttgccttattttggtctcagatttaaagttataagatttattaggttatagtgatacaagatatactataaagttttaaaaattattttatttatttactttaagactgcatctcactctgtcacccaggctggagtgcagtggcatgatcttggtttgctgcaacctccgcctcctgggttcaagcgattctcatgcctcagcctcccgagtagctagaactacaggcattcacctccacacctggctaatttttgtatttctagtagggacagggttttgccatgttggccagcctggtctggaactcctgtcctcaagagatccacctgctggccgggcacggtggctcacacctgtaaccccagcactttgagagcccgaagcgggcagatcacttgaggtcaggagtttgagaccagcctggccaacatggtgaaactccgtctctacaaaaaatagaaaaattagccgggtgtgggggcaggcgcctataatcccagttactcgggaggctgaggcaggacaatcgcttgaacccaggaggcagaggttgcagtcagccgagaacatgcaactgcactccagcctgggcgacagagcgagattccatctcaaaacaacaacaacaacaacaacaacaaaaacccagatccacctgccacggcctcccagagtgctgggattacaggtgtgagccaccatgcctggcacatgtttaaagagatacactatacttaacacctcaaatagctatcaaatagcctataagaaagtctttctgcacttttctatctctctttcataccttacagacactcaacaaatacttgttgagtgttaaagaaatgtatttgtgccaggaaagaagtttttattatttgtagaagagatggcacactaatgaacttgaaccaataggcatgcctagtttaccttagtatttcaagaaggtgtgcttgcccttataaagtcttagatttgttcgtcgtttttgtctaaatgtttttagaattctagaaagcatgttttctgtatgcccactcctagttttcctttaggctaaattatttataaacaattagaaagtataaaattatgactataaaacatgaacagggatttttttttcaaaaaaaaacaaacaactttgaagttttctctccaatatatattttagtgagtaaaatagattcagaaacacaaaaccgtttaggaaaggtttttatccctaaatgtgttttcataatacatttaataattcacttcaaataccttttaaattttttctcatttcctaagataaatgattctaacacattttatctttgttgattctcagatgtcaaataaaggaagatgccgtggagcaattcatgtttcaaataaagacacttaggaaaaagaaccaaaaatatcatgaaagagtgagtataaaatttagaacctatatatagtcattaaatatttacactcatgctttaaaaaattgtggattatggtgaaatatactctaggaaattatcttcttcaaagcttggaattgattgattta

SEQ ID NO: 8047 - DNA, 2300 bp, Homo sapien
agcatataagacaacataggtcagtaatgtctacccttagaacaattccccatcttcttttaaatttctccatatatttcagttcacaaccacacataaacctcttcaatgattactgattatttacatagttagaaattctactatgtatacttggaaaaaaataaaatatttctaacagcagcttgtttgttaatagggtaaacatgtcaacaattattgtcacaaaagtggtctgaaagaacctctttggtaaaagtaatagtgtaatactttcctgttatgtacttaggaatgactggcattttccctaaggataaaatattcagctgttgatagctagaccatgttagtgttgacctcagattggggtttaccaatgcagaggctcaggccaatcagtaacttatacagtggaacccatagaccagtagcaatgatggctgataacatgtcttgagaatttggtaattccactgcccagtggacgtggggcagcaaactgggcaccaaaccacagatggattgcagtacactgaaggaattcattatagttttgtgaaattggaggctggcttgacaaagatgaagcctgctgggattaaaaacttgtgtgttcttggcaagagcatgttgctgcagaatttcaccagccatagtggggaaaaaagaggggtgagggggcgtggggaaaatgggagaccacaaaattcctgatatgatacataaaatgttaaatatctatcagctttgcatcctttgagagtcaccagattgaagcacagtattttggatttggctggcagatggtgtacacagactttctgagaatgttagcatttcatttgaaactagcaagattacatgtgactatcatggtaacttagcactcacatatttttcaacttatccctaaccctgggttgaatgtagaggctctaataacatataaaaggctttgttaatgtatggtctgggtctcattgaatagtatttcaggatgtaatacttcttttaaaatgtccacagggcagtgtcaacgtctttccatggaaatctggctcacccaataagagaaaagaggccaaaggtaagaaagactaaaccaggggagatggcaggcagtgatgtctggactgtttgaatgggacttctccatttaccgcccctctcacttccttctatggtctggacctttaatcaccacagcagtcagccatgtagggtcaagctaatcgctgttgacatcatcctactacttcccttttcaaattccagtgaagctatgtgtttcctgtcctattccacaccctagagaatgaataccggccagctagtatctaaatttagaatggcagcaacgtgtcgggttttcggagtagagataaacaaaaccaggtgacatttccaagcctctcaaggaaaggggggaaaaaacctttctggggtaagtaaataaggagagcttcaatagttccatggtagagagaggcctgctggaaggttcagaaaataggccgtttggaaccttctcctttaagccaggagggcggctttgggaggcgtcttgaaatacattcttgactctgctgggaaagctcggggagccagaggcctaataccccccacttcaggggaagctgtgaaggcagctgcacctcctttgtcaagctgttggtttcaaccacagacacgaggacacacttgaggtggggggataaggggagaagcctgccgccccgccccacccccgccagcacaccgccctcgccattcctctcccgccccgccccgcccggcgtctgtgaccccgcgggccgagcctcaggcgacctgttggcagggagagtcacgtgatgcgccggctgtgcactcccctcgggcgggcctcctgttgcgcccgcctggcgagttccatcacgtaacgcgcgggcgccgcccagctcttccctcgctgagcgagggagggcgggcgtcgaagaggaaagggaaggggaaaggggcgggagaagggaggaggggcggtgtccgagtcacgtgacccggggcagcccggaaagctccgaggaggagcctggcgccgccattttcctgcagctgcctgttcctcttaccctgcccggctccagctgacccgggaaggggtgggctgaactgaggcgggggcaagggagtgcccgacatcttgtccgactccgcgggtgacacgagccggttctctctggactggtggcagcgcgcggccccgaaccgcgccccaggccggcaggcggggaaggagccggtgggggtagggggtg

SEQ ID NO: 8048 - DNA, 2300 bp, Homo sapien
ctcaaagccatgtctacgtggctccaaaagctatgctgcatcagtacactgtattctgtattttcttctgtacattgccaaatcttgcatctcagacaaaaaaagaaaaaggagagataaagaagaaagcataattccgtaagtgcactccatattttcaagaggttattgcatatatacagtaaattaaaaagttaaatccaccttaaaagtctccagttgatatgtaaaattgttttgaaagaatcatgtagaagtcccaggggaagactaggaatggtcacaaaatagattgaagattatagttaattgtatattagtattgaggtaggtgttatttttgttaggaagagcctcttttggttaaggaaatagagaaaagagtaaataggtcttgatatttgatgggatctagtgtatcatttctctaaagctggcaattcaaactataagatcattcttttctggtaggtgcaactcttaatcttgactggaaaaaaaaaactaagaaaatcatgcacagtacatatgtccaactttttgttctaccttgatgctgagaagggagatccttcaaagtcttttgataagtaagccttgttataagaatcaggttgtcatgtacaaatgcaagaaataattcacctgagtcgagctaactttttcagagaatgcaagctgagttgagctagtttttgtggagaacacaggctctaatattaccttgaaagacccagcaaacaaaacgttcaggcttttgatgcagaaatgggacagacaacctgtgacaagacgagggggaatatgtcagcaagttgctattgaaataaacaaatcccccacccctaacacatacccttttattttgtggtattaatttaatgtagacaatggggattattttttaaattttattacaggatgtggctgcttccttggctttcaaaaaattctacttcctccatttgtttctatcagtgttatatttctgctttacaaccatgaatggaggtggtcttggaagcagactagtgtccgtatgtggcggggtggggttggatttatggcttaggggagatcacagtttggtaactagcttagctcaggggagattccagaaaggtaacagatggatcaagcagtaagaggacagttacagctacaagactgtgtagtgagaaaagagttaaagggtctgataggctgaaaggatcttgctgtaaagcaattatcaaaaaccatggcattccatttcttcttatgtagacatgatacaccagaaattaagaactttgtattagaaaagctaagtaatatcccagggaagaagtttcaacacttgggggaaaatgattttcaatcactttgaaagtataatttgcatatgaaaaactatcctactgattatatagcattctaggtcctaagagctaccattgctttgttaaccttgacagtgtttggtggtctcttgtttgtgggatgtctggctactaacttgattctttttggccccaagataatattattctggtcactaccacagtagcccaaagcacatgttttcctttggtgcgttgatttgactaccagtgtcttggaagaaaggccaaaagtcaagagaaattgaaagactttgggcagtggttaagcagctacttcatatttcaaaggacagacacttgaagtccacagtgaactccaagttatgaggagaataattcacctgctgtattaggccgttctcacactgctgtaacgaaatacctgagactgggtaatttttacccagaagcatggcagcatctgctcagtttctggggaggcgtcggggatcttataatcacggcagaaggtgaagaggaagcaggcacatcttacatggccagagcaggagcaagagagagagttgggggaggtgctacacacttttaaacaaccagatctcacaagaactcactcactcactatcacgagaacagcactgaggggatggtgctaaaccattcatgagaaaccacccccatggtccagtcacctcccaccaggccccacctccaacagtggggattacaattccacatgcgatttgggtgaggacaaagatccaaaccatatcacctgctcaccaccagcacgtcgctctcttgttcgtttcgctcccttgttcgtttgcttttgctcttcctctctttcactgcctatttttctgtttctttgtatgtgtgtactttgtttgttttctttttctcctgtctcttcctctcctcctttatcaattgtttccccctccctctttg

SEQ ID NO: 8049 - DNA, 2300 bp, Homo sapien
tcagctgtagcaagaattctgcatcagtttagagaaaaacccataccctggatatctgatcaccccggccttttttagcacaaattctgttaagttggtgtagcaaaagtttccccattcttgatgtctcttcttagtaattttccaaccaccaacccctccaactttgctccttgactatacatccccactccttgctgtaatttggagttgagcctgatctctctcctattgtgatagtcttgacagctatcaaaatagtcctgaattaagtgttccttactattttaacaagtgtcagaatatttttcctttaatgtagtgacaataacgtagtaatataaactaatttccatttatcacccctgattcatcagaaacattttaaaaataaccccttcaagttttaataagcctctttaaactatttttgctttgttacagataatatgaatgctgtaaggcatttttctaccatatgtgtcctttatccaaatgttcagcacttttctaattttatgactagacgttgactcccacttcccagctcccactaatctctcacacacggagtaattttaatttgaaatgctttagtcaattatcctttacttgtagaactatatttcagaaacgtccttccctttgttgggaaagatgttcttaacaaagggaaggatgtttctgtctgctgatgaaaatgtcatgccaaagcacgtcttactttgtcaggagcttactctactccagtctcatctcttctcaccaactgaggagtgcttagtagtgcctggaacattggaagtactgaacaaatgactgccgtcattgagacctcaactttaattttttttcggcttctttatttcaaagtcttcactgcagaaacctctcattctgacctgcctttgctttacttccttttctcattctcaaccaagagttctctctttatctacaaaagaaagagtgacttgcaatctgcagataaggaaactgatgtcctggttataaagttatcatgcagaaataattcaagtatactagaattttatggatggtgcactctaggtgggtaatgaggtctagaagagaaaagatatacaacatcaagcaggtgcccaagaaatggtaggtccctttctcccttcctgcctcctcatttttacagatgaggacatttttacagaagcccgaatagataagtagtcacaatcatgttctaagaaaaacaaaaaaaaggtggcggatgccgtattttatttttcgtcatcactctccttttcctgctgctcattcagttatggtttcatgacccatataataattccacaaggctcaccaatgttatctggcacctgctagagaatagatatagtaacagaggcaaatattttggtgaagtttaacagttgtgttgccttctagaatttcattgtatctgatgtgcaaaaacaagcaaaacattgtcggttaagtatcacaatctcataatggagatgagcactgattcttaggccttggcgtagttcagggcctatcctttagcagctaaaaagagcactttggctgtaactcattggagtctagtctcataatgttaggatatttctatttaagtcttaaccactattggtagcaactggaaggataatcattcattacaataaatagtcaacagaataaatatccgacaagaatttacgaagcgtctagagtataattcggtagcgctttgaaatccaccctgggattcggaaaccgggtagaaaactacctggttcagcaaacgagaattcaaacagaggaggggcttggaggaggcgggtttcgacgaacccagcgcaagagtacgccacggcgcctgcgcatcccctgacgggtactttccattcgccagatgggggaagccagggggaagcaggttactgtttttgcatttctatcttcaaggaagaattaggttatgaatagttccgtgaatagtcaggaagcgctgtcctccaagttcaagattaaggaaacgtggcatgcacagctaaagcaagaggtgacgtcttgtatcttcccccgtttcctgggacattggtggtgtagcccattccacagactttcgctccctagcagcgggtcggagatcgaaggaacgggccaattgcggctgaaacgtctttggaaggaggaagggggtgagggagcatccctttgagtttcgcctcttctcgaggcggtggtgggaagggagacatacttaatactgccctcttaatccaacggaccttacatcgtgtagactgccg

SEQ ID NO: 8050 - DNA, 2300 bp, Homo sapien
atgactagacgttgactcccacttcccagctcccactaatctctcacacacggagtaattttaatttgaaatgctttagtcaattatcctttacttgtagaactatatttcagaaacgtccttccctttgttgggaaagatgttcttaacaaagggaaggatgtttctgtctgctgatgaaaatgtcatgccaaagcacgtcttactttgtcaggagcttactctactccagtctcatctcttctcaccaactgaggagtgcttagtagtgcctggaacattggaagtactgaacaaatgactgccgtcattgagacctcaactttaattttttttcggcttctttatttcaaagtcttcactgcagaaacctctcattctgacctgcctttgctttacttccttttctcattctcaaccaagagttctctctttatctacaaaagaaagagtgacttgcaatctgcagataaggaaactgatgtcctggttataaagttatcatgcagaaataattcaagtatactagaattttatggatggtgcactctaggtgggtaatgaggtctagaagagaaaagatatacaacatcaagcaggtgcccaagaaatggtaggtccctttctcccttcctgcctcctcatttttacagatgaggacatttttacagaagcccgaatagataagtagtcacaatcatgttctaagaaaaacaaaaaaaaggtggcggatgccgtattttatttttcgtcatcactctccttttcctgctgctcattcagttatggtttcatgacccatataataattccacaaggctcaccaatgttatctggcacctgctagagaatagatatagtaacagaggcaaatattttggtgaagtttaacagttgtgttgccttctagaatttcattgtatctgatgtgcaaaaacaagcaaaacattgtcggttaagtatcacaatctcataatggagatgagcactgattcttaggccttggcgtagttcagggcctatcctttagcagctaaaaagagcactttggctgtaactcattggagtctagtctcataatgttaggatatttctatttaagtcttaaccactattggtagcaactggaaggataatcattcattacaataaatagtcaacagaataaatatccgacaagaatttacgaagcgtctagagtataattcggtagcgctttgaaatccaccctgggattcggaaaccgggtagaaaactacctggttcagcaaacgagaattcaaacagaggaggggcttggaggaggcgggtttcgacgaacccagcgcaagagtacgccacggcgcctgcgcatcccctgacgggtactttccattcgccagatgggggaagccagggggaagcaggttactgtttttgcatttctatcttcaaggaagaattaggttatgaatagttccgtgaatagtcaggaagcgctgtcctccaagttcaagattaaggaaacgtggcatgcacagctaaagcaagaggtgacgtcttgtatcttcccccgtttcctgggacattggtggtgtagcccattccacagactttcgctccctagcagcgggtcggagatcgaaggaacgggccaattgcggctgaaacgtctttggaaggaggaagggggtgagggagcatccctttgagtttcgcctcttctcgaggcggtggtgggaagggagacatacttaatactgccctcttaatccaacggaccttacatcgtgtagactgccgggagggcggcgggaaaagggcaagacgggagttggggaagggaaggagccaggaagccgcgcgggagggcgcgcgcgcgcgcccctttttcagcagtgtggcggggtcgcacgcacgcccgcctcggcggctgggcgcgatttgcgacagtggggggggcggtggaggtggcggcggcagcggcaactttgcggcaagctcgggccgggcttgcttgacggcggtgtggcggaggccccgccccaggcggcaggaacctggagggaggcggaggaatatgtccgagagggaagtgtcgactgcgccggcgggaacagacatgcctgcggccaagaagcagaagctgagcagtgacgagaacagcaatccagacctctctggagacgagaatgtaagtgcagcttctggcagttacgagactgcggagtgaaagttttaaattcttttaaaacggggggcgcggggacgagcgggctgctgtggggggagggagaggtgtcactcaggaaaacgcgggc

SEQ ID NO: 8051 - DNA, 2300 bp, Homo sapien
gtgccaggctttcaagacatctttcattttctcttgtagtttcttttttgacccaataattgtccagtatatttcttacacagtgtcttaggaaagataaaaccagctttgatatgttgagtattatgtttccgaaaagacaagacagggttgtttttcttaactttatacttgaaagtttcaaacatatagaagagtgaagagagtagtgaatactatgaaccaagtcaagcttcaacaattatcaatacatagccaatcttgatttatctatacatctacaccagattgtttcgaagcacatcccagactttattttaactgtaaaaatttactctatatttccaagaaagactttaaacaaaatatcaataccatgctcaccctttaaaaagtaatttctaaattatatatgcagtttatttagaagtataaagaaaaaagtaaaaactacctttaatttttgtacacagaaataattgcttttagtgatgggatgtattttgtgtgtgtaagtttaaagaattgtgattgtctgaatatattgtttatatgctgcattttcagattcccagtaattcttaacagattattctgcttgcatatcttttaatacatttccatgaatgtaccattatctatttaatgccttgttgttggacatgttcatttcttccagatttttgctattataggtagtattttgaataacaggccagtacacaagtctttgtgtaactctcaggctcattttataattagataggatatttctttcttattaagtttgtaccaaattacacttgccccaacacatatggtagtacccattccagttttgttgttactagtttcctgtatattatctctgcagatcagggtgttttttctgtaaagagctagatagtacatattttaggccttgccatacagtctcgtcataactattcaactctgctgctgtagggcgaaagcagccgtagacaactgggtatggctgtgtaccaataaaactttacttaccaaaacaggcagtggtggagcatagtggctcatgcttgtaatcccagcactctgagaggctaaggtggacagattgcttgaccccaggagttcaagaccagccggggcaacatagtgaaaccccacctctactacaaatacaaaaaaaaattagccaggcatgatggtgcatgcctgtattctcagctacttgggaggctgaggcaggagggaaaaaaaagaacaacaaacaacaggcagttggctagattctgtccacaagccatagtttgataaccccttcagtggatactagttattaaagcaaaacaaacaaaataagtcttaaggaggcccctaaagttgttgaagatttaagtcaaccgaatagtttataatcaaagatcaccagattgacaatgaagcaagctctatggctgagggttgaaacaataaaaaataaaaaaataaataaaaatagaccaccaaagactttagatattgcaattttcaggtaatataaaacagccaccttattttaaaattgcaactctccttcctctctgtactttctccttgttttgttactctccatttcaattatcacctactatactgcgtaatttgcttatttggtttattgtatttcttctgctactgtgatgtagtctatatgagagcagggtttttatttcactgctataaccccagcacctagagcagtgcctttcatgtaacaggggtcagaattaaacagtcataaaaataagctaacagtaagaggctatgatgactgacgaggtgaatatgagagggaaacaaatagaacttttacaaatgaaaaatacatttgttgaagtaaaaaattcaacggacgggttagattagtcacagctgaatagaaattagtgaattggaggtgatctgtagaaattaccagaatgtggcacagagaatcaagaaaatggagaatatgagaggttaagaaatatagaggataaaatgaaaagatctaacaatatatttaattggagatccagaaaaaaaaaaaaaagagaatgaagtgaaggaaatatttgaagaggtaattatcttacttgctaccaggatacttgagtgccatgtgggcatgtatgatagagctaggagaaatagcaggtggttctggcatcttccttaccatcgtgtctcccactttgactgcagtcgtgaccactgatgtgccagtctgcttcagtctctaccaagcccagaacttcaccctctatcgggtcctgaggaaaagcagcttccacggt

SEQ ID NO: 8052 - DNA, 2300 bp, Homo sapien
ctggccacaattaaactataactggttcttactccatagaatcatatagtttgagatgggggggagtacctctgaggttttcagccaatttccccaattttccgtaagtctcctcaacaatgtaagtggatttcagcattggttacaatatcaatgtgaataggagcattcactctattccatgactatctattcttatttcagagagctctgattattggaaagatttttttccctgaaacattttttcacttcctcacactgtatctagttctgcccgcagaagttacaaagaactactgtatgtacaaataatatagtttggtagctggaatactggctactctagagatatgatactgtactcactgcctctaactctttgtacaatctataactaagacagttgaccagcaaaatggagaaaaagctcatatctcacataacagagattgagacaattaataaacatcatctgtaatttataaaaaaaattctaagctagctagttctcaatccactaaatataagattgctgggtaggagaagaaatgactatcaggtgggtcatagaaaggttagtgaagaaaagtgagaggatgtgtaagaaataaccaagtgaatattacagggagataaaacaagttgcataagcacatacaaatttaaaagtaggagttgctcagagaattcaaaagtatggctagtgcacaaggtgggtatgaagaagacatggaaaattagttaggaaaggcaataatgctaaatattaacatttattgagtaagctacattctggccactattgagtactttacgtgtaagaaccctcaaaacaactttatgaggtagatactactattacttcattttaaagatggggaaaaggaggtatgggagtgttaggttaacttgcctgagattatgtaactaataaatggcagagatgggctctgaacccaggtagtgtgggtgccttaatttatgaagtggtcttcatatgaatggcctttttattctgaaggttctaggactttttagatagtaagttggaaacattggtagatcctttcctacctcttcacctttggcacagctatctcaaaggagtatcggtgataagataggtgatcagtttagggatccacagtggaggccagaggactgttccaaacactgatcccccatatataaactgagaactgggaagacagacctgctttacggctggtggccaagctcagatatttcaaattggacagagaccctttactatcctattcaagaagaaaaggaattggagctgtgaaagggagaataagtattggtggcaatcggtacttaatgccagtatttttttttttttttttggctattgttttgtatttcctatgaaacttttctgcagatccacatagaaaaaaaatagacatttttacaataaaactcccactaattaagcacagccaagcactgttttaagtgttttatacatattagctcatttaatcctcacagcaaccctaggcaataggctcattatttgtcttttgcaaaggaggggcactgaagcacaaagacatctacaactcgtccacaattgtacagcaaatgaatgggagaactaagtgaagctggaaagaactactataaattgtagacaagtacaaaacaattggttaaagattaatacttctgagacactgtgtagcagaaagaaacccggatttggattaggacttgaattcagcctccaacatttactgctgtgtaaagatttgaggctgatcactcctataaaatttggattataatacttacctcatagggtttttgtaaagatctagtgacgtgattattgtaaaagtgcaccgttaatctctcagatgtcacagaaacgttagaagcatctcttcccaggattgtacatggaaatgaaggatccacagattttgtggctataaaacacccggactaccgatcccagtgtgcaaagcctccaggcttaccttcccggaaactggcgcggtgccctctgggacttgttctgggacttgtagtcttgtactggcgctggcccgcctttcttccttagtggggaaaaccgggtgtaagccccggaagtacttgttgcctgagcagtgggctgcttaggaagagaaggtcagagttcgcgggggcagaggcattcttgccgctggcccagtcactatgtagtggaggggcagacaccctcccgcaaattctggaaggttcttagtctcgactagggcagtagccccaggactcctagtcgccgg

SEQ ID NO: 8053 - DNA, 2300 bp, Homo sapien
cacagtggaggccagaggactgttccaaacactgatcccccatatataaactgagaactgggaagacagacctgctttacggctggtggccaagctcagatatttcaaattggacagagaccctttactatcctattcaagaagaaaaggaattggagctgtgaaagggagaataagtattggtggcaatcggtacttaatgccagtatttttttttttttttttggctattgttttgtatttcctatgaaacttttctgcagatccacatagaaaaaaaatagacatttttacaataaaactcccactaattaagcacagccaagcactgttttaagtgttttatacatattagctcatttaatcctcacagcaaccctaggcaataggctcattatttgtcttttgcaaaggaggggcactgaagcacaaagacatctacaactcgtccacaattgtacagcaaatgaatgggagaactaagtgaagctggaaagaactactataaattgtagacaagtacaaaacaattggttaaagattaatacttctgagacactgtgtagcagaaagaaacccggatttggattaggacttgaattcagcctccaacatttactgctgtgtaaagatttgaggctgatcactcctataaaatttggattataatacttacctcatagggtttttgtaaagatctagtgacgtgattattgtaaaagtgcaccgttaatctctcagatgtcacagaaacgttagaagcatctcttcccaggattgtacatggaaatgaaggatccacagattttgtggctataaaacacccggactaccgatcccagtgtgcaaagcctccaggcttaccttcccggaaactggcgcggtgccctctgggacttgttctgggacttgtagtcttgtactggcgctggcccgcctttcttccttagtggggaaaaccgggtgtaagccccggaagtacttgttgcctgagcagtgggctgcttaggaagagaaggtcagagttcgcgggggcagaggcattcttgccgctggcccagtcactatgtagtggaggggcagacaccctcccgcaaattctggaaggttcttagtctcgactagggcagtagccccaggactcctagtcgccggcttcaggtcactgccggctgaacggagctgccgtcgccatgtttggctgcttggtggcggggaggctggtgaggatgggaccgggtgatatcaggaaggggtcaggataccgagggcgaagccctacggcagggagggtgcgcaggcgctagggatgcggggaagcccacttattatattttgggtgggtatgtgaggatggagcgtgggaagctgggtgctctcctttgcccagctctattcagattctttcgaatagtagtcacagtataagttggcatttattaagtgtgcattttgtaccaagtactgggctaagtgcaatgcacgcctttggtcactcagccttatgtgtggcgcttatttggcactttgaacttaatcctcataactcgtgagatggtctttatctttgacattttgcagttacagaactaagttcaatcgccagtataaataccttctttattaacttgaggtagaggtgaatttgggattgaatttggtctatagcaaactgtttttcaaagattaaggtgctcagggaatgtatatcttttgggtccctttggaagaacccgagtaaaaataagcttaatttaattggaagttggctgaaacttaacgtgtgagccgtatctgagataaccagagaaggatgcgagtagtgtgtttccttatgggtcaaaatagataacttaccttgccaaattgttagagtaaatgagaacagcacctggaattctttaggaataatctggaaggtgaatcttgtttgtttccttagaaaccacacagacatcaattttcaggcctgattcctttcccctagaagtatttttccttcttttttctcctggctttttaaaatgttgcagtccctttgctgaattgtctttttttcccatcaagttttgataatgtattgtattctgtacatatacagttctaagaagccagaaagataagttggagatgactagcctcataaagtttgtctcttgaatgactgggagacccctgtggtgatggtggtaattcataatcctggtgagataattttgccctgctcttaatagggaaaaaggacaaacctggaatgattgtgtgactcagacgagtgagtgttattaatgaatgacatt

SEQ ID NO: 8054 - DNA, 2300 bp, Homo sapien
attgcaaatttctattctggtgttgtataatgagtattatgttttctttttcaatagtttttttttccaagttgcctttaatataagccacttaatattgtgtgtgccttggggcttgggtaaaaatgactgcccattcaatgtgggttttgcaaggcaagttggagcttgcagaaaagtaaatgtacattgaaatacttgggaacattttggccctgtttgtttccttcagtgtttgcataaatccctacactctacctgtacctctctctcttcctctctttggtaaattatcttaaatattataaagtaattcatgcccttgttaaacagtaaataaaggagaaaagtgaatataaaagttcttggaatgcctcctccaccatacaaaattttgcctgatccaaaattccactgttaatatttttgtgtatgtatctttcctcaaatatcccatatgtttacaaaaatatatatgaatacgtatgcatacttatatacttatatttgaaggaaacaggattacattatataaaaatactatgctgctactggttttcacttactatattttgaaactttttcaacatcagcacgtaaatgtgcagtttccttttaagtaaactcttgaaatgtattccaatgtatgtattcacaatttaaccagttccctatgatggtcatcttaggctaattctaagaattaacattataaacaatgttgcatatacatatatctttgtatgtatcatgctaatacatccaattttatatccaaatatatccaaatttgtagcagtggaagtacatagtttgcctgagttttaatagcaactgaaaagtatgtattttcaggatatataatatttatagctcattaaaagtttctagtcaacacagggttacatgtatctacacagcctcttttgtcaagagacctttgacaaaaggaaagtaaaaccttggaagaaaagtctttgtccttattctttttacagcttcctttagccatctacaattcactaataattagcatccaccaccatcttctggaactgaagacagcttttctagagattaaaagtaccactatatttaattcaaaatctaatgtattgtaaaacaattatttttataattccattatcttaatgtggaacaataatgctgatattgccactaaaaattagctggcattatctattaaaattgatcatatgcatttctcatgacccatgaatctactcctagttatatacacatcagaaatgagtacatctatctgtcaaaagtgttctgtgagactgtttgcagcagccttattcccagtagcctcaaagggaaacaacgcaaatgcccttcaacagtggaatgcataaattgtgccatactcataaaaaggaataatatgcaacagtgtaaatgaagaaattattaccatagaaactatggatgaacctcataaacataatgtgaatttgaatagagccagacagaaaaggatacatactatatgattccaaagattcaacaggcaaaatgaatctgcagtatgtgttggctaatgactggaggggtaatgaagtgctgatctgtgcaatgtgctagcattctattttttgacctggatgggttttgcataggtatgttcagcttgtgataattaccagcagaggggagagcatgcacgcaattcttcaggatgagattggtgacatgtagagaaaagggggaaatgactgtagtttaaaaaaagtcaattccctcctccccacttctccagctctccatttcctaggaagagagcccagggaaaagcaaaccaagaaacaaattccagctcaaactcaaactctcaaacagatctggagactcaaatatcgatctctctgggcaaaaggcattcctagatttgtccaaggtacaaaaactaccactctaaccacgtttcttcgctgcccggggtcagagaagtaaaaacccattatttatttatttttaagttacttccaacctcgctgcctcgagcttctgaatcgcctgggcaacctggaagccgcccatctaagggggtgaggtcgaatcccagccttgacgccttagcaaccgagcgagcctttctcgcgtcccagcaacgcgcccttccctctgccgggcctattctccctggtgcccctcccttcctcgaggctgcagctcacccctcattgggtctctcgttggtcaggagggcgcgggtctgcacactctcactcggtgccggacatcagttcctgcggctcttgctgtgggagctgccc

SEQ ID NO: 8055 - DNA, 2300 bp, Homo sapien
ttttttgagacagagtctcactccgtcacccaggctggagtgcagtggcacgatgttggctcactgcaacctccacatgccgggtttgagtgattctcctgcctcagcctctcaagtacctggaattacaggtgcgcgccaccatgcccagctaatttttgtatttttagtagagacaaagtttcaccatgttggccaggctggtctcgaactcctggtctcaagtgatctgcctgccttgacctcccaaagtgctgagattacaggcatgagcctccatgcctggcgtatggtttaaaaacttcttccacatgtattatttcatttgagcctcaaaatagcatacaagcagcattattatcatcctaattttacaattgagaaaagtaggggctcagagaggctatgtgggaatcccaaggtgaactagaactggaattcaagcccagacttcctaaccacttggtttttgctggttctactattttattttttaatgttggttctactattttattttaatgaaagttctataacaaaatctaatttgagtcatggagtttttgaatctttagcttttaatttgccatgttgtagaagaaatttcctaattggcatcattattgtcaaccattaagtagctggtgtgaccttcatgctaagttggatacagcagagtttaaacaaatgaaatagtcaatctaccagacttactgaatacttagtgtgcctcaggtactcctctggaaactaacaaagtagacatgaatgaattgaattattatggaatgttatataatcctatatcccataaagccaaactctgatttttttaatgaaaaggctattaatatcatctcagtctacccatttctccttttatgaagctttgggatggggatttaggaaatgaagttgtgcataatgaaactcctggtgttttctacacaatctggtttcatacaggattgctaagaggattgccaaccctgtgtgtggaaagtgggaaacacatgcaggaaaaacccttgcttttccatgaaaacacaaggcaagatttgcaagtccataagcaaggccaaagtggctagctcatctctaaccctcagggattctgctgaactttgtagcttcaatacgtgtttaaaagagaagacagcattttccttgacctgctgaactgtaaagcacatcttttacagaacgttttccaaaagaactagtcctgaaaaatactctatgaaaaaagggtttggaggtcaaagctgactgaaaactgctgatcgaatcagtcaccctcatggacagagggacagagcacatcagcatgttaaaggagctgagaagtctggctggaaagcagtcagtttaactgcctgaatgtatttaatcatggaattgtaggttaatccaatatctcattagctctgtaagacacattttggaaaactgctgtgaagtggtgtgagtgagagtttattcccaaatgacccgtaacttaaaactgtcttgtagggtagtccccttggaaagctgtgtgcttatttcagtaatgctgcttttattagaaatattttctatacttctttttgggaattcacttcaaaggcttttgtaagtgatagcattcatgcaaaaataataattttatatattattctacagttaaaatgtgacaatgtgactattatgtttacagttacatgagaattaaaatagtcatttgttcagtatttactatgtgctagctacttacatagaggacctcatggaagtgctattagatccttttattatccccagaaacctagtgcctaaggccacatgcctgttagcagtgtggggatttgaacatgagcccacctgactcgaaagcttttctcttaattgcctaattttagttatttgggtcaagagtggaattagacagcttgctcactttccagatatttttacaaagtctgctatcttcttaaagacatctaaaagaatctgtcaactctgaaggcaattccctaaaaggaaatggtttgagaaaaggcaacaccgaaagaattgctgtgcagctacccagggtgattgctctgatgaatgagatcattcctcattggatttttaagctctggacttataagcgcttaacataaacaacaacaagaaaagtatcgtggtagccttgcctatgagcctgcagtttttaatttgtctgagtcctggacctcagcctagatgtaaccttgctctgttgctgtcctctagaggcctggcactgtggactcggtgttgtctagcagagaggc

SEQ ID NO: 8056 - DNA, 2300 bp, Homo sapien
aatgactaaagttacctattagatatcctccaggggagggaaaggtcattgtattcagcaagggcaaactggttcaacaatcaatttccaaatatttgcatgcactagataccaaagatggaaacacacatgatctctgccccccaaagatgttgactggtgggaagaagtgccaatataaaaatagtgttgaaaggatttagttaatactattggttgcacacaatcacacatctgacacaaactggtttaaggcagaaaaaaagatcatttataagcttatgtaaatatgcagtccaagagtaaacctgacttcagggatgtaaaccctactggatgagaatcttcatggatggggcctggaaagctgtatttttgccccatccttatttcctaccaggtaattgtaattctgttttggaaataactattttacgtagatcattcaagttgaaaattagatattacacagggaggagagagactgcaggaggagacgattattcctgaagggatgagggaatcctgaactcaggcaggagcaccccttagcacattatgggccatgatgtctgcttggtacttacaacggggctaatgctggcaccgggagctttgaaggggtgtcagcagaggaccgtgccaactgtctgtcagtaagtctaagggttcacgatccttatgaaagtggctgccacttcccttcacctaacaactatttattgtgcaactacataccaggcagtgagctaggcagtgaggacacacaggttcacaggcaaagagcctctcttcatgaagcttacattctagacaggagatagtcagtaaacaatcagaaaaacaagcgcgctactgactgtgttaagttctctaaagagaaaaaccccttcactctatagttcctagtgcaggctgacattgaatgggatagaggaaaggccttcgagttgacaacttagtggagaactgagaggtgggaatgaagtagtggtttgcaaggctggagtatgagccttccaaggagaggcaatagcaagtgcaaaggccctgcagtgggagggaaccaagtggggtgaagacacaggaaggatcaagtatggccagagatcagtgagaaggaaagagtagagtaggataagtctgaagaggctggcaagagccagtttatgggaaatcttgtaggccctgaaagtttggattttattccacacacaacaaagtgtttgctttaaaaggaatctcctgactactgtgtggagaaagtataaaattaagtttggggctagatggaccccaagatccctgtctggccccaataacccatggcaaactccatggggtcctcagaagtcctcttagtaactgtggctcctatgtcaatgatgcttaatagaagtatccgcaaaaacagaaatgttctgtatctgcatacaagtggctcttgaactggaaatgtggctagcgtgactgcagaactggatgttaaattttattctatatagactaatttatttacgtttatatagccacacgtggcgaatggctattatattggacagcacaaggcaacactgagcaccgaatgcctgaggatttctactccaaatcctgaaggcacgcccttccccgaatgttgggagagtgcgaggatatgctgacccccaaacgcaaatccccctctgtgcatttagtcttgccaagatggagagtctcaggcgggcattctgagctgcttcttgtcactggggaaaaccacgtgcacgcagtgctgaggcgccccacgcgcgtcctcaggggaagccaggcactgagaacaaaggttgtgggaccgctctttgaggaactcaccagctccgcgagctcgcggccgccagcgcggtccacccattggcgggagaggactcacagaccgcagctcctcaccccgcctgctccgcagcgggaccgcgtagacctcagctccccgagcagcgcaggtgggccagggaaggagaggaccgaggcaagccaccacgcgggattaggggtacggggacccctcgccgcgcagtcgcctctttttcacagggatgggggcaggggtggcgccggctgtcacccgcaccggatctgcttccagggcttggtttcgctttgcctggctcttggctaggcctggcgccccgcgcggagccgagcaggtggcagccgaggagtggcgggggctggaacatttaaccctttgggagcacctgccctctcccagagggcgcgtccccggatcaggcccggtgccccgcagcgcgcgtgggtcctgg

SEQ ID NO: 8057 - DNA, 2300 bp, Homo sapien
ccaaagaacaaacacacacacaaaacaacattgtagaattatgcctgggttaagagaatataggccacaggtgaggacatgtaagagacttttatatgtaaactgtacaagctttagtgaattgatgctataaaaattatgttcgcttgtttggaaacctttgttgtttacatcctggtttcaaatgactaaagttacctattagatatcctccaggggagggaaaggtcattgtattcagcaagggcaaactggttcaacaatcaatttccaaatatttgcatgcactagataccaaagatggaaacacacatgatctctgccccccaaagatgttgactggtgggaagaagtgccaatataaaaatagtgttgaaaggatttagttaatactattggttgcacacaatcacacatctgacacaaactggtttaaggcagaaaaaaagatcatttataagcttatgtaaatatgcagtccaagagtaaacctgacttcagggatgtaaaccctactggatgagaatcttcatggatggggcctggaaagctgtatttttgccccatccttatttcctaccaggtaattgtaattctgttttggaaataactattttacgtagatcattcaagttgaaaattagatattacacagggaggagagagactgcaggaggagacgattattcctgaagggatgagggaatcctgaactcaggcaggagcaccccttagcacattatgggccatgatgtctgcttggtacttacaacggggctaatgctggcaccgggagctttgaaggggtgtcagcagaggaccgtgccaactgtctgtcagtaagtctaagggttcacgatccttatgaaagtggctgccacttcccttcacctaacaactatttattgtgcaactacataccaggcagtgagctaggcagtgaggacacacaggttcacaggcaaagagcctctcttcatgaagcttacattctagacaggagatagtcagtaaacaatcagaaaaacaagcgcgctactgactgtgttaagttctctaaagagaaaaaccccttcactctatagttcctagtgcaggctgacattgaatgggatagaggaaaggccttcgagttgacaacttagtggagaactgagaggtgggaatgaagtagtggtttgcaaggctggagtatgagccttccaaggagaggcaatagcaagtgcaaaggccctgcagtgggagggaaccaagtggggtgaagacacaggaaggatcaagtatggccagagatcagtgagaaggaaagagtagagtaggataagtctgaagaggctggcaagagccagtttatgggaaatcttgtaggccctgaaagtttggattttattccacacacaacaaagtgtttgctttaaaaggaatctcctgactactgtgtggagaaagtataaaattaagtttggggctagatggaccccaagatccctgtctggccccaataacccatggcaaactccatggggtcctcagaagtcctcttagtaactgtggctcctatgtcaatgatgcttaatagaagtatccgcaaaaacagaaatgttctgtatctgcatacaagtggctcttgaactggaaatgtggctagcgtgactgcagaactggatgttaaattttattctatatagactaatttatttacgtttatatagccacacgtggcgaatggctattatattggacagcacaaggcaacactgagcaccgaatgcctgaggatttctactccaaatcctgaaggcacgcccttccccgaatgttgggagagtgcgaggatatgctgacccccaaacgcaaatccccctctgtgcatttagtcttgccaagatggagagtctcaggcgggcattctgagctgcttcttgtcactggggaaaaccacgtgcacgcagtgctgaggcgccccacgcgcgtcctcaggggaagccaggcactgagaacaaaggttgtgggaccgctctttgaggaactcaccagctccgcgagctcgcggccgccagcgcggtccacccattggcgggagaggactcacagaccgcagctcctcaccccgcctgctccgcagcgggaccgcgtagacctcagctccccgagcagcgcaggtgggccagggaaggagaggaccgaggcaagccaccacgcgggattaggggtacggggacccctcgccgcgcagtcgcctctttttcacagggatgggggcaggggtggcgccggctgtcacccgcaccggatctgct

SEQ ID NO: 8058 - DNA, 2300 bp, Homo sapien
atggtgtgggcaaaggagatatggtagatggaacgaaggaaagaggtgagagaattgagtctgcattgggcacctcacacatcatgagagtggcagagccacagggaagtcaaaggtactgacgcctcagctgtcagtaccatgcaatgctgatagtagtccaggaaacgttactaatttcaattttattattctggaagaaaatttttataaatctgttttggttttatttgcgagttgttcaaaagctgtaacataagtttatatctggttttgtgtctgtgtgtgttttgagacagggtcttggtctgtcacccaggttggagtgcagtggtgatcatagctcattgcaacctccacctcctgggctcaagccatcctcccacctcagcctcccaaatagctgagaccacaggcgtgtgccaccacaactggctaggttttttgtattttttatagagatggggttttgccatgttgcccaggctggtctcaaactcctaagttcaagcaatctgcccactttggtcttccaaagtgctacgattacaggcgtgagccactgagcctggcctatgtctctatatattaatgtgacattttaaaagaaaacaattgaagctaagctaagaaaaatttgcccttaaaatggtggaaaatatcagtttcctttctatttaagaaataccaggccgggagcagtgactcacgcgtgtaatacttgctgagaagggaggatacttgagcccaggaggtctacgctgcagtgagctatgatcctgctactgcactccagaatgagctacagagggagtacttgtcttgaaaataaaataaaagaaaagaccacacaataatgtgttcagggctttctcatgtaaaagtaattgcaaacaccaacgtattaggcatatcagtaacaccttggtgtgaaatagcactttagaccttccctttctgagagtagactttgataggagaaaggaaagctaagtagcttgatagaaagcatggctcagtgcaaaatcttgtcctaccattcagtagctgtgtgattttgggcaagtcataaaacctctccaaacctcctgttccttataaaaattagtgtaatctctgcaccttcttcaccacaatggcctatatgtaaagctcttgaccgaaaacgctcaatacacagtaatctatactaaataggaaggctctaacactaggaccttaaatggcaaggtctccagcctggttaggagaggactccccgcacacccccctaccctggcccccaaccaccaccaccaagataacgaccgcttggagtgattcagggaagtaggcccactggacaaggaggtggctccaccagctggtgccccgatgaagaactgaggccagtgggctccccagccaccgccgctcagaagctgccaagcacccccggtgctttgggccccacgcacagcactgagtgctgtaaggaaatgcaaagcattggtggccctgccatgggaatacaggtttctgttctttggaggcaccggagaaactaggagttcggtcagcaccttaaggcgctaaaagtgtacgtgggggtggggcgcacacaggttctgaaccaattcttcaaatttgcccagggctccccatacaccaggtgtggcccgcgtccctagttctaggctgttgggggaggggtcgccttttgtaggggacctggtctttttgcgagctggcagcgtgctcccagcagcgaaggccgtagtctcgctcaggaggccgcgcgccagacccggggatgcgcggtgttcaaagggtgacggcgcgcgggtcccgggcaggagagcccgccagagccggtgctgcctggcgccgagaggcccggactggcgactgctgccgcgccaccggggcccacctgcgcagggacgctcggcctcaggccctctgggctgctccaccctgctccggccgcaggcgagcggcgaggggaggggggcacggtttatgtgcagtggggcgggcggcgtccgcgcggcttccccgaggccggaggcggggcgggcgggcctcgggtggcgcggggggcggacccgccagctgcctgcgctgctcgccagcttgctcgcactcggctgtgcggcggggcaggcatgggagccgcgcgctctctcccggcgcccacacctgtctgagcggcgcagcgagccgcggcccgggcgggctgctcggcgcgggtgagtgcgggcaccgactggggcatccgcccgggcgcgggagaggcgaggcgccgggaggagcgggac

SEQ ID NO: 8059 - DNA, 2300 bp, Homo sapien
ttaaaatgacctatgtaaaaacatgcacctagtaagtaagctgtatgtctgtttattatctctcagaagttacagccagaaccacagatttcttttcttttctttttttttttgatacggagtttcgctcctgtggcccaggctagagtgcaatggtgcaatccccgctcactgcaacctctgcctcctgggttcaagcgattctcctgcctcagcctcctgagtagctgggattacaggcgcacgccaccacgcccggctaatttttgtacttttagtagagacaggatttcgccatgttggtcaggctggtctcgaactcctaacctcgtgagccacctgcctcggcctcccaaagtgctgggattacaggcgtgagccactgcgcccggccagaaaccagatttctgaagcctggacaactaacgtctactttttcccacaacttctctcttttctaaatttctaaaaatcacccagcctcaccaacccaaacataaccaatgttaacactttaaaaattttcctgtcagtcttttattatcccaataaattttttattttgcaggattataatcaccctgtatatgcaaattcttattactgtggaataaacattttctctatcattagatatgctttacattttttaatgactgcaaaaaaatttcttccaatataccaaccaccttcctgcagcttcttctcaccctccaagcattaaacgtgccttcaactgtgaggataagaaagaactcaagccaacccaaccactccttcatgcatgacctctaaaacgctgcgggacgtcgtgagaaggggctattcagcagaaaaaggtgcagtagtgtttcatttaataacaccccaaaaatagtggggagaaggaagttcggtgaaggatggtctccttatcactccctccaagtcttagctgcagctggctccctcccactcgcccaccgagcagtggcggccagaatccttggcagagataaccctcagctccactggggttaggggtctgggccagacatgggtgggcaagagagaaaaacggaagggcggggtgtaagagtgggttctttcccaggccagatgacttacacaacgttttggcttccagtccctgagaaagtgggggtggggatggaaatcacttttccaggagagctgtctccttcgggctaggatgatcaacttggcatgggctctgcaaagttagtttggagcgtccctccccaaggggtcccgccaggggtgggggtgggggcgcccacctgcagctggctggagcagccgtactggatgagcggtgtgaaagttgtcagctgcagctcggcgtccgtctgcagctcgtgcccaaccaggttgggcatcttggtcacgttgtagccgaggttctggcacatggagatgcggatggggtcgcagcgccgctcttcctcgtccccgaagccccgcgccggccccaggagcagcagcaactgcaggagcaaccccagactgagaccgacgcccccgggcgcccccgggacgctcggccctgcgccccgccaggccatggccagcatcgggggtagcagcggcagcggctggggctgctctggcagacacccccagtttgcacgggggcgccggctgcccgcgctgctcccagctcccgggacgggagtgtgatgcggcgacgagggggcagcggccggctctccagcagctgcgcgcgactgtgtgggattttagacgtcccgggccgaggccgagggacaggctgcgagggtcatggctgcaggcggcgagcccacaagccggcgccggccgcgtccgttcggcgtctccgcgaggccagccagcagccagcgctgcgcagctctcaccgccggagccctgcgcggcgctggaggctcgcggcgcggcggcggggcgggacggacagcgggcctctccaatggccgggcgcggtgggcagctaggggcgaggcggcggggcggggccgctctcccgcaggaggagtcaggcccccgccctccggccccctcctccggccgcccctccctccctccctcccctagcgccccgccccgcccgcctcccggctcttgctttcctcccacccggatctaggcgcgcaggggccaagcagggacgcagcccagtggctccagccacgccgtcctgcccccttctgcaggtgagaagtgcgccctgttccatctgccccctttccttcctgtctcctttcagctgtaacctaggccggtggccacctccccgtcaggcagagaaacgtacacaaaga

SEQ ID NO: 8060 - DNA, 2300 bp, Homo sapien
atatattcatctctgtaacccaaatgattaatagatcatttgatctctacatctgatcgtttattcatctctgtaggccaagggttttatgcattactcagcacaggcacacagagattcaatcctattgctgagtacattgatttccagctgggaattttttctgggaaaatagccctgccttccatctttgaagagcctcttctgggccctggtttggttggtcttgtcattttctattactgtggttctagcctcagtttcctaatctctataaggagctaacggaacctccttcactgggagtttatgatgatgactggagacaatgcagcttctccgtgtccaacacagttctaggcacagagccaaataccaaaaaaaagttgattccatttttgccctcagtcaagtctcgttgccaatataagaagactaaaaatacaagacagaatatgagtgtcacatgagtggcacagacattcttccaacttgcatctagcctctgccatatgccacagaattggctgaaatgggaggataaaaacatgcataaaacagtggcaagtgttggacaaaaagatctcaggaagagggtgaaaagccttttacccagatcctcattccggggctgctggagctgtctttagcaccaggctggaaagcaggaggctgtcccataattgatctcccctagctgttttggaaacacatacacacacacacacacacacacacacacacacacacaccccaatcaccaagttcttcagcatttattatgtgtcagacactgctaaatgatttacaggtattatctcactgaactcttagaacaactgtgtgaggtggatatgaacttccccactttacagccggccactttgaggctcagagaggcaccatagcttcaacacagtcaagcaacaagtaaacggtggaggaatccacctgctgggagtttactggccgactggaaagcagagagagggtggaccagcacaaagccgcggggggctggtaatgagacaggaaagttgggttcaaacctgggtcacatgatccccagatccctaggagccgaagcagaagcaaagaaaaaaaggggtgcagcctggtggggagggggtgcccgggaggccgggagagaggagtcacggtggttgtgcgccttcctcgtccccagtgcacaggtcaagcctctcccctcccgccctctcaccctcccaaccttatttagaaaccgtgtccccgagacaggaagggcggcgggccgagaagcacggagagtcccggtctcatttcctttcgaatccccctgtggaatttcatttcatacggtgaggaaatcagagcgcgagaccgtcggcgggtctgcagctccgcagctctggggcgcctccccgctggcggctggaggtgggcggctccctgcgcaggtcgggcgagtctgggggcggggagaggccgggccccgatcgccgctggtccggagtgaaaatagctgtggactcacgcagtaccaggcaccatgctaagccttctacactttatctctaatcctcccaagtgactttacagaggagactgacgccgaggggttgagcaatttgctcaaggtcacacaaccgggactgaaagccacaatcggtgtaaatccaaatccccaattctttgtgtacgtttctctgcctgacggggaggtggccaccggcctaggttacagctgaaaggagacaggaaggaaagggggcagatggaacagggcgcacttctcacctgcagaagggggcaggacggcgtggctggagccactgggctgcgtccctgcttggcccctgcgcgcctagatccgggtgggaggaaagcaagagccgggaggcgggcggggcggggcgctaggggagggagggagggaggggcggccggaggagggggccggagggcgggggcctgactcctcctgcgggagagcggccccgccccgccgcctcgcccctagctgcccaccgcgcccggccattggagaggcccgctgtccgtcccgccccgccgccgcgccgcgagcctccagcgccgcgcagggctccggcggtgagagctgcgcagcgctggctgctggctggcctcgcggagacgccgaacggacgcggccggcgccggcttgtgggctcgccgcctgcagccatgaccctcgcagcctgtccctcggcctcggcccgggacgtctaaaatcccacacagtcgcgcgcagctgctggagagccggccgctgccccctcgtcgccgcatcacactcc

SEQ ID NO: 8061 - DNA, 2300 bp, Homo sapien
tagtttctgaattggagatttgaaaaaaattgtgattatcttgttcctattctaccattgtatattggatgtgttgaggcggatgataactttatcatgagatctgcatctggtcctgaggaatattctggactttggctaggattcagcaactgcatggaattttaggttgtctcccttggaaaagggaaggtatgtctatctgtagaaagaatggtgtgcccggatatttgggtagccagagacatagaactatggcagacactgctagttgcctctaatatctgttttttccattttgctcagtaataaaacctcaaatgttagctgggcatttgtcccattaattaaaaaagattgtattcaccatcctctcttgcaatgaagtgtggccatgtgattaagctttgtccaaggaacgtaagttgtagtagtttgtatggatcttctgggaagtttttttaaaaacaggaagtatgcccttttctccccgcccccgcccccccgttttttttttttttttttttttgagatagagtctctctctgttgccaaggcaacagtggtgtgatcttggcccactgcaacctctgcctcctgagttcaagcgattctcctgcctcagtccctgagtagctacgattacaggagcgtgtcaccatttctggcaaatttttgtatttttagtagagacagggtttcaccatgttggccaggctggtctcaaactcctgacctcaagtgatccacccgcctcagcctctcaaagtactaggattacaggtgtgagccaccgcgcccggcctctcttccccttttgctggtcttcctggctagcatgttgatgtcatgttattttctaagttagggtggaaatcacaggtagcagatggcatagcaaactgtcacaaagaggctgggatccctaatcgttatggagccaccattttattctaggactgcctacctttacctgagagaaagatacttttatctttttgccattgttgttttggacttttcatctgagtatttctcttttattttcttcaaacaactacacctatctgatattatcttgttcagttttctttgttattttctgtcttctccctctagaatactagcttcgtgaaaataaaaatcttgtctctcttgtttctgtttgtttccttagcacagtgcctggtaaatagtaatgactcagtaaatatttgtagatgaatgaatgaagactagaagattcgaatggaattcttctaaaggtagttcgtttctgctttaagagactatggaatttagaaatccaaagaaactggcaggtttgttacatgtgaggagattgacagaggggttatatgactcaagcaacacaggacccttgtcttgctaattgttggccaagttccctagccaggtctgagttctaacacacgactgccgcctctactgtgtgtgctgtttggttgataagcacctatcaaagatgctgtagacaggattgctccgtggcctaaggtttggacaggatgacctattgcccttccccacacacggtcggggtatgaacatagctgagacttttcaagccttcgcaggtatcacagagcttggaaagcccagcacttgggggtagttagttgcaactagcaggcagccctagctgtttattacctgggactctcgggaaggcaagctcccggtgctggggaggacgtttgtcccaggcattcctctggcaaccctcttcctccaccagctcccaacaaagacatttaatccctttcttccactaccctccgctctacttggcttgcagttggaagctgaagtacaatttgacccaagccaccccctactgcgcacctgccatagcgcttgcgccccggagccgggcacggcgtcgcgggggtggggaggcggctcgtccccgagctgcgctccctcgcgtacagcctcggctctgggtgcgaagatcctctctgcctccgctcacccagccgcgccgccgcgcgggaacgcgccccagcggatgccctcttgagggagcgcgcacgcgccgcctctccccgcctccccggtgcgcgtcccgcccccttgagctgcgatacgccgagcgctcaacatccgaggactttggcccagagtaaccccgctctcgtgacctttcccctccattccgcacctccgagtgctggccgggcgagaggctggcggctgggctctcgcgcccctccctgcagggctcaggctctccccctcctgtcttctccgcgctgttcctcgtcatggcggccctc

SEQ ID NO: 8062 - DNA, 2300 bp, Homo sapien
aggtctttaatagagaaaaagtttgaattttgatgaagttcagtttatcaattttctcttttgtgagttgtgcttttgatgtcaagtctaagaatgcattgtctagccttgtatccataagatttgctccattttttccccctagaaattttgtagttttatgtttcacatttgtgcctgtgatccattttaaattaatttttgcataaagtgtgagacttaggttgaggtttagtttttcttttcttttaacctatcatttaccacactggcatattatagcttactgctgttgtttgtgtctatttccctacggagattttatgttccttgaaggaaaagattgggtcttattcatcattgttttgcctgtgtatgagagttgaatcgaagtaatagatggtcagtttcagaggcttgaagagggagggagtaacagaagaattgagaagatgccattagatttgttgatcactgactttcggaaaagtattatctctagaaagatggagaataaatggagagttttatagtctttctgttctgaagttagtttttctctttcttacaccctcttactccttccctattatgttctaacctttttggttatgttgtttcattatgatggagaagtactcttttctacgactagtgaggagtctattattcttcccagttcagctcatatcccgttctccatgaaattcctgccttcccctgtattaaactgactctgctaaaattctgtggtactttctattatattactaacacttaatcagtcctcagtatctatatatcttgcacatattatgatttatattgctttatttcctggaacgttaatagtctgctcaataaatacttagatttcatgtctatccatataattgctaaattatttcagggccttttttggttttaatctagaaatcttcctttcatattcagagttcaccaaaaaaaaaaaaaaaaaaaggttttcaatctaaatttaaaagctaagtcatgaagactgataggttgatattttttataaaacagtcctatgataaacttctgcagtcttttgtattgggacttattcgtgtttctgtgttctggtcacaggtgatacatacttgtgttgttactagattctttcttttttttttttttttgagacagagtctcactctgttgccaggctagagtgcagtggcacaatctgggctcactgcaacctccgcctcccgggttcaagcaattctcctgcctcagcctcccaagtagctgggactacaggcgcccaccaccacgcccgtctcattttttgtatttttaggagagacaaggtttcaccatgttggccagaatggtcttgaactccagaccttgtgatctgcccacctcggcctcccaaagtactgggattacaggtgtgagccaccgcgcccggcctagattcttaatattattttttcaggtctttttttttttaatgggctccaggaggccagaaatcattattttttaaatttactaaatatatatatatatacacacactatgtatatatatagtaatatactatatatatgtagtatatatatatttttttttcttgccacacagaagtcaagtttgaataactgaatgaatttctctggtttctattagtgaagttctctaatagtaatagcctgataaaatctgtaatatagttttattataccatccagtttttatttgaaatggaatttttttcatttaaaaatatattccatttttcagtttaaaattgttttaaggcattacaaatatttacctcaatgtatggagattattcaacgtatgacccatatcgtaattccttggtgtatattttaccctcaataaattcaggtgtcttcctttctatcctgaacattgtatttttatagaagatccagtgaaatgccagcatttttactttaacttataaatatatgcttttatacagtagcttccacatataagctaatttaagtgggaaatgttggttggattaaacaaaaaatcctttctctttccagattgcagcaattctccggaaacggaaattagactattatttacacaaactactccctgagatcctacaatccgcttcatttctaactgctaatggggccttgtatatggctttcttttgcattttaaggttggtactcataatcaccatagatactaatataggttcttctattgaaatggaaacaagtatgtgtttacataaatgttatgtgggttactatccccgccccccctttttttaa

SEQ ID NO: 8063 - DNA, 2300 bp, Homo sapien
ttatttaccacctactatggacccagcattttatcaacaatttcatttgtatttatttatttatttatttatttatttatttagagatagagtcttgctcaggttacccaggctggagagcaatggtgtgatcttggctcactgcaacctctgcatccctggttcaagatagtctcctgtctcagcctctcaagtagctgggattatagtcacctgccaccacgcccggctaatttttgtatttttagtagagacgggtttcaccatgttggccaggctggtcttgaactcctgacctcaagtgattcacccacctcagcctcccaaagtgcttggattacaatcatgagcaaccatgccctgccataggtattatcattctcctttcgttgatgtggaaaccaaggctcagaggttatgtgacttgtcccgggtacacatcttcagcatccctctgcttgtttggggcatgtggaggctaaagtttagggagtgtcaggccagaagaggaaggcagaaagacaatggccttgccaaacctcctttctccctttcacacaggcctgtgtttaagtcctagttctaacacatactagttatgtgtgcccttgagaaagctgctgttaatcttggtttccttatttataaattgaagaaaataacccacttcataaagcaattgagaagatgaaatgatagaatgtgagcagagctccttcacagcacattcaggtacaaaatagctcattttggtataaactgctcaccccctagccctgaatgcccaatttctcattttctttatgtctttactaaattgtctccatcttactgaaaccttccctggccaccctatctaaaaggcaaaccccatataatctcttcacatcccctttctgccttattttattaccaattaatatatgacaaattgtatttattttgtcttgtcctgtctccacccacaagaaggtaaatttttcttaggccagtaggcattgtctgcgttaggaggatgatacagaaatcctaacgcagacaatgcctactggcctcaaaaaaatttaccttcttgtaggtggagacagacaagacaaaataagtacaatttgtcatatattaattggtaataaaatgtatattggtcaaatgaatgaaaacaaacaacaaaaacaacaaaaagaagttgggaacctaaagacctatgtttgaatttggtttttttccttactatttgactctgggtccattacttaaaatgtctggtccttagcttcctcatttgtaaaataggaagaaaaatggtatctattattaagacagctgggatgactaaatgacataatttataaaccctctggcatatagcgagtgctcaataaatgtttgccattattattatttgtaataatctgaccgattgttaaaactgtctttctgtgcagctctgagtttttaggatatgggaagaggctaaaagtcaccagtgcccttggcattttcggcccagttgtcctccttgttaactgattaccagttgaatgggtgtgaaagtgctcagtgttcccacctccaagctgctcagaggtcagcattgccattcattgagaaataacaggctgtgagagctcaaatgacttacttatggtccctcaacttaaaaaccagggcacgcaggaaccaagcccagccagtcttgggcttcctaatactgtaatttctctctacagtgtggggtagttaagagcctgtgacttcagacctgtggtcaacggggcctttcaccggccatctcccgcagagtactttttcacaatcagttttctcgcaagcaaaacgtggaaaataagatccacacctcacaagtttgtggccagggtcacaggtgaaaacagctcttcggaaactctaaagcgccggataaataagcgctgcaacaggcaaccacacgcgaacccctttcagctgccagtcccgggactcgctcctgtctcctcccctctccaagaccgcggagtaggaaggaggattaacccctaggggaggagttccgccccccagcccccgccccgccgcccacgcctctctctgcacctacacttgcgctccccaagtctctctcgtgcgcagagcccaggctgcgcttccctggtcaggcacggcacgtctggccggccgccaggatgcaggccccgcacaaggagcacctgtacaagttgctggtgattggcgacctgggcgtggggaagaccagtatcatcaagcgctacgtgcaccagaacttctcttcgcactaccgg

SEQ ID NO: 8064 - DNA, 2300 bp, Homo sapien
gagcaagtatctgagtgcctcattatgttttccaacacagtcatacttgaacattttacatgatgggatataacttattatactagaaatatatttaaaatatctgatttcttctttatattacatttggcattacatttctttttattaagtgtgtaagcagtttatatattaatttcatttcagaaagtaaaggatttggggtctgatcagtttgagaatcaattttttgtgtgtgcgtggaatggagagttagtagttatttttgagagagaacagtatgggaattattagattagtagaaataaactaaactgaaaatcaatgtgcctgaggttcattcttaaatcttactaagtggcaatatgacattcagcaagtgatttaactctctgaatctccatttcccaattttaaaatgaatccattagactaagaggtccacaagatctttttctattattcaatcattgaataaagactgttttaaactttctttacaattaagtgtgttgctttgattacattcatcaaagaaatttccacctaaactggctcttcaatattgatgacctaatacaaatttaatgttttaacaatcagtaacacaccttcctagagattcaggaagggaagcttaatctgtcagggtatctttaaataaatagtgtgttagcttaattatacaatgtcagctttcaattctaagaaggtatataaaacctaaaagcaaggtgttccccaaccccccgccaccaaccccgccccaggctttggaaatttgtgcccccattgaagagtattttcacctctgaactttcaaggacaactccttttgcctcattgaaactggctttcaagcttggcaaccaagataagaatattaagtacacttattttaacactcaaggacactttctgaataaaccagaatctagggagatataagtgaataatttggacctgctctctttgaatgtttataatctggtggaaaaaaaatggacatatgaatattgatttgtgaccagtgcaaagggggcaaaaattcatatcccaaagaaaacggggacacatcaggtctgtcttgttcatcactgtgtccacagggcctgacacctagtaggctcagtgggagaaaggagccccaattaccaacaaaagccaggaaagaacgggaggctcttacggaaaagggtgatacttaaactgagcaaggaggcacctggaaatagtgccacctaataatttttggcgatcagactgacacactagaacggttcataagaccagccttctcccattggctagcttccttcctcacccttctcaccctgggcaagccgcttcctctctctgggcctcttgcttttcctctgtaacataaaaggggttgagcaatatcatctctgagagcgccatgtgtgtgcgtgccagagggaaaacccccacaacgctaatacatcaaaactgcaggtttgcacaaaaactgaattctgctgaatgcaaacaggcaaacagcatttaccaggaaacaaaacaaaatcaagcacataaaaaagtaggaagagttggaaaacggaaggaagataagttctcaaacagctggaatagttgatgttagctagcgaagtttttcagaggaaaaaacaagaagttggttatgaggcaagtggacctgagaaaaaagactaaaggggaagaatagcaagtaaaacagaactccacttgctagatctctccctctgtcgcgctctttcacctgacccactcccttattccccccacaccctttccttctctccctacgttaccgcacaggaacgaagtctgggtcatgtgcggaccgcttgtggctcttaaatcctctttttgtcaccctggccgtgcaaaattttgaaacgtccctcggcaaaaaaaataaaaataaaaaaaaaaaatctgtccctggcctcttccctagttctgggtccagttgcagccaagtgaggggcagcgcgcgctcccaagtccccgtttcagagacgcgcacgcgcctggcgcccaacccccaatcccctgctgctcagtgaccccgcccacgggtttccgggccggcgtagctatttcaaggcgcgcgcctcgtggtggactcaccgctagcccgcagcgctcggcttcctggtaattcttcacctcttttctcagctccctgcagcatgggtgctgggccctccttgctgctcgccgccctcctgctgcttctctccggcgacggcgccgtgcgctgcgacacacctgccaactgcacctatcttgac

SEQ ID NO: 8065 - DNA, 2300 bp, Homo sapien
aagaccttgacttaggaaaggtaagtatctttctaattgtaaaaaacagagcagataatttgatgaacaattttaaaattgactttttcctttttttttttttttaacagactagaccaagcagtaaaaactgaattttaattatctactggaaattcctccagaataaagggtctggttcagtttctatattgactctatgggttccagtctgtgaaatgccaagggttggactgactagaagtctccagattacctctctcttctttccacccctactgcttcttgcctaccatatgccatagtgccggccggcaaaatgtacctgtttaattctctaggttagaaaaaattccctagatttttctccttgtctttctatgtccaaatgctacctactttttaaaacaaagacaacaggccaggcatggtggctcacgcctgtaatcctaacactttgggaggccaagtcggatggataacttgaagccatgagtttaagaccagcatggccaacatggtgaaacccgtctctactaaaaatacaaaaattagctgcgcgtggtggtgcactcctgtaatcccaactacttgggaggctgaggcaggagaatcacttgaacccgggaggcggaagttgcagtgagccgatatcgcaccactggactgcagcctggacaacagagtgaggctgtctcaaacaataaataaataaataaataaataaaataaattaaaacaaaacaaaacacagacaacatacctccttcatcatgaagcctcctttaattcttacaaacaaacaaaaccttcctaaactttcaaagggcgtttaagaatacatactagtgtttcattaatctttaaggagaatttagtgcatgctaggttctgggttaagcattttacatttattaacatatgtaggtagatacaacttttacttcaattttgcatttgagcagaaaggtgcaaagatgataaagtgacttgctcaaggacatgggtaaatggctgagccacttatttgctgtattaatagagatgatgtccttcatcctttactgatgtttttaccatgtcttatccatacctcgttaagtctttacattttacccatttatcagctaatttatctcaagaacattctagtgatgtggctattaccattttcttcattttatcaattttttcctctgttttcaggctataacaaaatataataaactgggtaccttagaagcaacggaaattgatttctcatcgttctagaagctaggaagttcacgatcaaggtagcagcagagttggtgcctggtaaggacccatttcctggttcatagatgatgccttttagtggtgacctcagatgatggaagaagtgaaagagctcaattgggcctcttttataagggaaaaaatcccattccctagggctctacccttatgacttaatcacctccaaaatgtcccacctcccaacaccattacattggcgactaagtttcaacctgtgaatttggagaggacacaaatattcagaccatagcaatcaatgagtacagctttacccgttcatgggaaatatgttgcagagcaaaaattgggccaggtaatttgactaaggattgcatccttcccatgcttctgagcagccttgcctagcctcagtcagggtcagcatgaccatgcttttgtaggccagaccttctcctttaccacagccacctgaaggtctaaattgtggagatgggcagggcatggcccacactggcccaggcttaattgaaaagcctgaaagagagtgtgggcagttccttctgaagttatactacttccaacagaattgggggtatcactttattactggcccatcatagttggtcatagaatattaggaaccaggtcaatatagagattatccaatggctttcactggcccacgtcttggtattggttcacagaatggttcctcctcttctctgagaatggaaaaaaggttcagtcccatttggccaatatacactgtcttagcttggggtgttataataagatgctaccaactatattgtttaaacaataaaaatttatttttcacagctctggaggctggaaatccaacaacagagtgccagcatgatcaggttctggagaggaccctcttcctgtttgcagactgctgacttcttattgtatattccaatggtagaaagagagcaagagaactctctggagtcttttttttataagggtgctaaccccatttaaggaggtttcccctcataatctaattatctctc

SEQ ID NO: 8066 - DNA, 2300 bp, Homo sapien
tcataaaacaacttaaatgaataaaatgcatgggattgatatttcagccacacgagcctgacaggacaccaggtctctcatatcactttgatgttcttacataaaaaatgagtcgtgttttgttatttgttcactcgctaacattctgatttaataagaaattgtgctttctttaactttagatatttctttttgtctgcagcagaattcacatgaccatgagaataattattttaagcttgggtctaaggaaagtgaaagaaaggtttggtaatattcaaatgacttgccaatgaaaaatctaacagtcttcatttcttcctctgtatctacaatgccaacttttgtaccaaaactatttttttctatatattcccaaatgtctagttattctggaacatctggttatttgatgaaatattaaaaagtttagcttttgtcactgtacataggaagactttctctgttgccataggaaacagtagaaggaaatagtgaaaatgatggtaggagtgattagaaacatgattcaagttacattcattttgtgtctggacttaactttttgtagatttgatgacctttgaaaccattagtattcttgtaaaagtgcgatatttacatacattcctgaagaaacatcacctgtatttgaaagttggtgcttagaaagttagtcactttaaaataatttgagatccttggctggcaaagttgataacaaagtaagtctcttacacaattcccctaagtgatcaaatcactaatttgtcaattctcttttacaaattatgctagaatttgccatggaaaatttgggacaaaatttctttcttcccaggaatttaaattgaaatagatgatgacattcatagctatactaaatttctacctggcagaatagttccaaacatacatccttttagcctttgagccttagtgatgtggaatgtttttctggatcagggctagaggactgattactgtgaaatgtattgcaagactgtgtaattactttgaagactctctggaggaccaagtaggttgccagagaattttctgtcttcatgacctagccacaaaatgcccttgaaaatttaataacaacaagatgttgttttgaatatatatagcactttttaacttgtaaagcgtttatttcgttgatatcttgtattgattcccataagggacagcctagcacatagtatccccatttttcaggtgagcaaattctggtaccaagaggttaaacagtttactaatacttcttaatataagaacagggattgaaatgtgaatattcttttctctaaaaattggtgctaatttgactcttccttgcagcctatttgggggatgttgtactctataattccccaaccttttcctttctcttctacagtttatttaacatgaaacacccacctttcttcatttgtttttattatatcttccacattaattagacaatacttatttattcctgagaagattattcaacttgcttgacattgtatttggagagagaatatgtgaggtatttttgaaaagataattttatttttgtaattgcataattaattacatgctcaaggctaaagatttcaaaagaaaagaaagcctaatgaaaatttaacaacagttatccacactttcattaccaagagatcaccaatgtttaatattctggggtgcatacttcttgaagttttctgttcatggcgtagttttgcttctaggatgctctgtcatctctgcctgagattacaatacagttctgcctgccacactcaagatttagttttgtgtattgcaggtgaacaaaaaaagactattaatctaagcaaggcagggtcaagaagctacatcagctgcttcatcaaatcacaaaggaagcagacaaaggaaagtcagaaacgtttttgaattttttttcttcgttatctgcatcatcaaaatattttctctgctaacatggattatagaacttccccaaactagttgcatttatgtttgttaaagacccatgttattttttttttttcaggtttagaagatcatgaccacatggatcatctaactaaatggtacatggggacaaaatggtcctttagaaaatacatctgaattgctggctaatttcttgatttgcgactcaacgtaggacatcgcttgttcgtagctatcagaaccctcctgaattttccccaccatgctatctttattggcttgaactcctttcctaaaatggtccttctgttgatcctgtcagtcttacttttgaaagaagatgtccg

SEQ ID NO: 8067 - DNA, 2300 bp, Homo sapien
gcaggtaaaagatgatagttgatggattcaacaggttctctttgaaggtggttagaagtggtaagattctaggatatattttaaaggcagagctaacaggatttcatgacaaattctcacatataagaaaggacagaaataaatggagatttcgagttttaagcttgatcaattctgagaatgaccgtgttttccattctttttttctactgttctacataagaattaaaatattttgttcattaatagatcatcctaaggcaaaatttatacccttgagcaatttataatcagaacttactattggaatgtaaaacattgtttctatattccttttaattttaattttgcctaattcagcactttacaattgtgagatgaagctatattttaaaatgtcactgagcaattttaagattatataatcacattttccttctcatctgaaaattttactattgttcaacatggagaatgtccttcacattttagcctttagagcataggaagtcaatatttattggtaagtaggtattacatttgtggagtgctttgtcattttttttgacatgctttgacatgtcttatgtcatcccactctcatcatcacactggaagacaggagagaaggaaatttgtgtaggaaattgaaaagtttaagtgactgagtggccaacatgatatctcctcctttcccattcactaatgtattttgatccagctccaactgttggagaaaaactgggagcttggagtgccctatgctcactcaaagctaaatgtctcatacaaaaacccaaatttgaccttatctttattgttaacgcttcagaaaattggataaacaaatcactgtattcatcagacttaatcacatcaccagagtcatctagtcatgtcaccctccattttcttgcgaactcactattttatgtattttctcacctatgccatctttctattttctcatctatgccatctttctttctttcttttttaattaaggaagctcactcacagctttcctggcctctctccaaagtactaaaacttgttttgtgaattgcagtcaaagaaatacaaaaagtaacaatgatcccatcagtagacgtgaaaatgcaagaagaaagatgccattgtaaaacccaacaaggtgtggtagatacatctctttttcttgttgttaaatcctgaagctatcaaacaaaaacttaccttattgacaagggtctagtggaaaatctaatgagcattagtaatgaatgcaccagcatcaatccccttgtctgtagtgcactcatcttttaatctttgacccagctgctgcaagcacctggttcccaaaattcagctagggaaatacaatgggaataataatcatattactgcaatgtctttcttttctttaaattaagctatgcaagtaatttataccaatcgccttttcagaggcagaaatgaagtctgcttttgtacttaaagataacctcagcatagctgacaatcctgggcagttatgggggtggtgaaggaagggaagcaaagtcatttgagaaagtaaagacattcaactgccaacgaagaataaattttaacggatgtaggaagaatcgtttgtaagaagtgcagaaaatgcaaaatggtattattaataagtaacatcattagaggccgttctttctaaccagtcacacctctgaatcatctcgggcttccctgacttcctagctttctgtaccctccagcagtgacgccccttctcccaatcattgtcaggggtttcagtgccatagtcaaaaagaaccttattatctacctgctcccccagcttctctctgagtgacacaccacccacgcctcctccgcacagctttcctcctcccatggctcccagagggaacgtgaggagcaggagagagagaccaaggctaccctcgcctgaaccccgaaacgacgaggctttaagacccttattcacccactgagtctatgccctggccgttctgccaacccccgccgcgcgctgcgggagtataagccagccctgcgctgcgcttccagctgcgtctgcccgagcgcggcacgtgctcccggcgctggcgcgagagagcgagcgccaccgccgcgggccccgcagccgttctgcctgctgtcaccgctgcctccatcgccgacactagcgctccagctgcagccaaggccgctacgagagcgcaggaagccctcgaggagcggctgcctgggggcgcaaggctcagggcgcgcacctggtaagcacagcgcctttttctttctcttgg

SEQ ID NO: 8068 - DNA, 2300 bp, Homo sapien
gtctgcaagtaaatacttgcagagtatttactgaacccctaattctactttatagagcattgcagtaatttcatgtcaggtcatacaataatctcccaaaataggataggaccctttcaaatcccacaactgaagatacctaaagaatgtacatctagagtcaggaagaaagcactctaaatgggatttaatatttaggaacccaagactggcaataagactgaagactacaacacgtgtaggccagaggagacagtggcctatactggggacaaataaagaggtctgtcctatttaagaaaatcaaccctgtaaaggaaattaataggactaagtacattttagtaattcctctaagcaggctctaaagattatgaaaaatagacgggacagcagacacaaaagcccttaaagagcatgatgaagactttctaagttatttcactggaagcctgatagtggggcaagtgtaaggcaaaattcttaattaaattgaacatgataagttgaattctgtcttcgagaacatagaaaagaattatgaaatgccacatgtggttacaagtaatgcagacccaaggctccccagggacaagaagtcttgtgttaatctctttgtggctctgaaagaaagagagagagaaaagattaagcctccttgtggagatcatgtgatgacttcctgattccagccagaggcagcatttccatggaaacttctcttcctcttcacccacacactgctccatgtacctgcaaagcctgttctgtctcaaaaaagttgtttggatgagccgtgacttttttttttcttaaataatgagacaaactccagaaaaagagaaaaaagcagagcagtctgacattccggcatcatcgaaatagtgatggcttttcctagaatgcttcagctaaggacccaaatactaatgatctcctcaaagctttcactttcttttactttttcattaatttcagtggacccccaaactttaagtatggaagaggacaaagaaggaagcttcagaggggcaactttgatttgactactctttttgtcactcttcagctcacaaaagagctcactttagttcaaaacacaaagtctttaagcccctccatagattggtcccaggtttaattttctatgatgtgtggaggcctcagtttaatgctccaacttgatagatgaaacacagttcccacctctacacatttcccctgtctcaggagttgtatatattctcagttgtctgtccaacttatgcccactctttgagatattaatcaaggcactcccttgataacacttgcatattattatcaaaattatgcaattctttctaatatcagcccacaaatacatctcttccattaaaagtttgacttaattatctatactactcatttgaaaactaacatagttaagttgtatttttagccatgaatttcagtttccctagctcactatacacagagaaggaacttttgaaataattgagatgatcaaaaatatttgctgaagaaatatatttctcctttttcattcactcactaattgagaatgtctttgcacaaaacacattgcaaaaacattttcaaaaaaattcctaatttctagaattgataggaaaaacaatatggctacagcattggagagagagagaaaggagagaggagaaaggagagagagagaaaggagagaggagagagacagaggagagagagagaggatagaggggagagagagagaggagagagacagaggagagagagagaggatagaggggagagagagggagagggagagagagggagagagagggagagagagagagagagagggagagagagagagaaagagagagagagggagagagagagagagagctctttaacgtgagatatccccacaatgaagcaaatcgcccagttatcaaagtgagctatccttaggagttgtcagaaaatgcatcaggattatcagagaaaagtatcagaaagatttttttttctgatacgttgtataaaataaacaaactgaaattcaataacatataaggaattctgtctgggctctgaagacaatctctctctgcatattgagttcttcaaacattgtagcctctttatggtctctgagaaataactaccttaaacccataatctttaatacttcctaaactttcttaataagagaagctctattcctgacactacctctcatttgcaaggtcaaatcatcattagttttgtagtctattaactgggtttgcttaggtcaggcattattattacta

SEQ ID NO: 8069 - DNA, 2300 bp, Homo sapien
gcgtaacaggacactagctctgtcccttggggatggcttggagtactgtttcctggtaaagcaacataaacagatctcagtcccctcttacagagttatgaaataatagccataagtaataaccaacatttatataagcattccatcattttacaaaataattttacaaaagtaactgattataggttgttttaattggaagcaaacccagtttcattacctcaagcaaatttcttcatctcttttagcttccgtttctcatctcttttttttttttgagatagagtcttgctctgtcgcacaggctgggttgggtgcagtggtgcgatcttggctcaccgcaacctctgcctcccaggttcaagcaattcttctgcctcagcctcctgaatagctgggactacaggcgcctgccaccacgcccggctaatttttgtatttttagtagagacggggtttcaccatgttggccaggatggcctccatctcctgactccgtgatccacccgcctcggcctcccaaagtgttgggattacaggcgtgagccaccgcgcccggcagtccgtttctcatctttaaagtgagagtgctaacacgcacatggagggctactatgagaatggagtgagattttgtatatgaagtagcaaagacagagcctgggacttagtaggtacattattaagagttggagccattttttaaaccttttgtctttttgttatttttgctgttctgaaagtctctaagcttttaaaaatggtctcttattttactattcttgaattgtttcacgcttctcaactcatgacaagaacctattctgccaatgaacctcctgcccccatctattgaaattaaagcttaggagcaccagtgcatcccagaatttgacttccttccagtggagagaccccttgggtttttcgtgtgctctttccctgatcctttaggtgtcacatggtcagaaagaacatagtattatttataaacaatatgctctctaacttcagaaagatttaggacagctttctggatttggtcatgcatgaaacaggaaaaacaggctattagaaaattgtgtgaagtctaacagggacttgatatgaattcattttgatttttaaaactgaggactgcaatcattaatcagttcattaaattaattggaataagtatattgcatgtagtgagagtagtagtattttttgaaattttagttttaattatatcctatggcctgtgttgtaagattttttattttaagagtttaaaagccattcgattaagcaactagtagtaaacttttctgtctctcattagttgttaaatctagaaaagttattggtttaacaaacctttattggatatctattttgcatcagatttttttctacatgaatgacatttttttctctctcttttctaatactgatttgttgcagtgtcgaataggtacctgggtcaactccacacacttctcactcttcactggacctctggtacaagattgagaggattcctattacttacaaacagactaggtattaaaacaaaaagattcccgaatagagtgaacctaacctagagcccctaagaattacatcagctttaaccattaattccctgggttcttcttattcagtaatgtcttaaaacctttttatcagtatgggatgggcgggcaaggggataaagaaactggcggctggtgggaagccttaggtaaggctgtcaggggggctttagtttgggagtgggataatttgctgaggaagggtgggagaaacgtgaactagcacacaaaaggctgtttccggctcaaatttcgttaccaaggctctttgagatgaacttttttgggggaaaacaatcagtctaaaagagctgtgtcttcttgtgtgtgtgtgtgtgtgtgtgtgtgtgtgtgtgtgtgtacaagggggcggcgagggtccccacttttagtatgagtagcattgttcacatgtttgccagtattttggagcctggcaggcctgggtagaggctgcgggggacgcctccaagttcccacccgggacatcctgaacagcagcagccacaacaacaggctcgcccctagacaaaggggccggcgcggcggagcagactggtgcagcctgggccgcgcgctcagagcgctgggcgtctgggcagctgagtgggcagagctgacccggtgcgggtgggagtcagggcgcccggaaaacccggctctgggtagcagaccccgcccgggctggctcggcgccgggccttcgggcttccactcagtctt

SEQ ID NO: 8070 - DNA, 2300 bp, Homo sapien
tgtatttagaaagcttcctaaaagagatggataattacactgggttgtgaaatatgtacaatggcagaatgtttgtcgaagggaggaatttcagagaacacaggaacaatacattattggaaagagaaactagtaggagcactgacagattatcaaattaccgagaaaattttcaatggctagtgaggccttgaatgagggataggggagggagaaatcaaaactaaatagctattagtgttgagggagctgtgaggtggaatttgtggccacactcccctttccctccatgagccacttggtctataaaaagactggcaactaaggtttattcaagcggaattcattggtatccacactaagagttttaaaagccacattgtgacatacagagaatttggatggatggcctgacaacaggcaaacatcaaggaaatttatttgtttattagttggtcagttagtttgtttgtttgaaagttgcctttctctgtcttttgacagataaaaagatgggaacatatataactgagagtaagagaaagaaaaaattaaaattcgcctacaatgtggatgtggtaaatgagaaggaaactgatatgttttaagtacctaatgtgagccagaaactgtactattttttttttttacacattgattcacttaatccccataacaaccataagaagtagatgttacttaaagagggggcactaaaatttaagggattttttttttttttttttttttagttatacttcaagttgaagaaagaatttacagaagtttaatacctggcctaaagtcatatagttaataaaaaataaagtatttaaaccagttctcactgatatcaaagtccattgtctctcattaaatgaatctcatatttaaaaaaaaaaaaccttaataatttactgagatgaagcattcttaggaaatttaataagcaaaatattcagataaaaattagtatttaagtcaagcatttctgtgcaacacatcaacccaataaagtggtttaaaacaacaaattttctttttttttcttttttttttcttgaaatgaggtcttattttgtctcccaggctggagtgcagtggctctattaccagaaaggggtcctgagccagaccccaagagagggttcttggatctcacacactctatgactccatagagtaaagtgaaagcaagtttattaggaaagtaaaggaagagagaggggctactccataggctaggcagcagcataggctgctcagctgcttatacttactgttactttttgacatatgctaaactagcagtggattatttatgagttttccaggaaaggggtgggcaattcccagaactgagggttccacccctttttagaccatacagggtgacttcctcatgttgccatggcatttataaactgttatggtgctagtgggagtgtcttttagcacgctaatgcattataattagcacataatgaggagtgaggacaaccagaggtcacatttgttgccctcgtgattttggctggcttgggctggcttctttacaatatgctgtttcatcagcaaggtctttgtgctctgtaccgtgtgcggacctcctaactcatctgcaactaagaataccttaacctcctgggaacgcagctggcttcagccctattttacccatcccctattcaagatagagtagctttggtttgatcgcctctgacagcatgattttggctcattgcagctttgacttctccccggctcaagtgatcctcctgcctcagccccccaagcagttgggacaataggcacatgccaccacacccagctaatttttgtattcttcttgtgtgtagagatggggtttgccacattgcccaggctggtcttgaactcctgggcacaagctatctgcctgcctcggcctcccaaagtgctggattactcgtgtcagtcacagtgccctgcccaacaacttttaattatctctcatgcttctctatcaattaggtcctcagctgagtcgttctgctatattgcatcagatgtcagctggttctgcagtcatctggaggctctgctggtagaactcccagcacacttcactcaaatggctggctgcagctggtgctagttatggtctgggatctcagatgaggctgctaagccgaatgtgttgttactcctttacatcgtctctccacatggcttgaacttctcacagcatgcctgctggattcgaagagatggcattcaagtgcttaaaaatgtaagcaaatctcttaatattcagtctt

SEQ ID NO: 8071 - DNA, 2300 bp, Homo sapien
acacaatctgtcacaaaaataattttttttaaaaaattgacttctatagatatactgattcaaggaaatttgacagtgattaataaaagactttcaagcatacccatatttaaggtaatagattctgaattgaaatttagaatgctagttgataattatggagtgctctcttgggatcaacatctgtgaaaagcagagctggattgggcagagggagaagtcaccctgcaatgccagctgaaggataaccttggttaagcctataaggaggtctggaatagtttctcagaattttcctacgttagactgagatgtccaggtctctgtaccctcacatcaatcagtcactgaatgtgtagcattctaggaagggacatgaccttgagaaagggggctgtctacagctgaggcaatccttgaaggggctgacagatgaagattgtctgcagagagcctcccctgcagctggagcaaaaagtccttcgttgaccatgaatctggacagctcatctggtgcccagcacaaatacattttactttagagtaaaattctgtgggggaagatggacaatatacaagttcaagaaaaaaaaagagatgacaaaattttgactgtaaagaagagcatgttcatgtaatttttaaaattgatgatgttgaatagtaaataaatacagtatttaaattgctttggatcaatataaaagttgtatacaatttcttctaaaaatgttaatatttatagtaagctagatattgcatgctttgcagctacttaaaggtatgataaaaaattttaaattttagatgaaggggtacattgtcaaaattaatttagggaataggtgagcaaaaaaggttggaagatcactgatttaatctagcagatcattgagccaatgagaatattgagactcaaatatgttataagatttgcacataatcacattaatgattgaaatcagacctgtaaagcagtgatgttacctgtgcttttttctttacttggtagttgttaagaaccattaagctactccctgtgaacacacactgaagagagaaaaggtctcattaagggcttcttagcctagggtatctggaccccttcaagttgcgtgcagcaatgtgtatatgtatatgcttttctgtggggggatgcttctgtagcttcagcttcatagccactaaatatgggacaaatacaaacaaatattactttattcatgtgcttctagcccaactaattccattctcaatttcaattcatttttcccttgaatctcttctttggagctcatgcatttctgaccctcctgtgtgctctgacctcttccctctttcaaaaatgcccaacagtccccatgcagaaaaacctccttgttttatatctgattcatattaagtcattcctgatctcaacagggtgatctagtgcatgttaactatgcacgaactgaagacttctttaaattggaacgggacatgaaaatcaattgctctgggaaaattgtaattgccagatataggaaagttttcagaggaaataaggtaaggtaaaaattatctcttttttttctctcccccaatataaaaagttatagtgggttttacatgtgtagaatcattttcttaaaactttatgaataccattattttcttgtattctgtgacatgcccaccttacagagaggacacatttactaggttatatcccagggttaaatttgagcattggaatttggacagtgtagatgtttagagtgaacagaacaaatttttctgtgcttacaggttatggctgtggcctacaaagaagcatgcactgggtttattattaactttcagtatctttgttttaaatattttctacaaaaatgtttactaaattaaattgtagtatgaattgttataaataatgagtgaaaacaatttacacatagccaatttaaaaattactgtcatttgatttgttaataaatatatttttctctttagtgggaaattaaattttgaaaaatgccctttagactgtagaacaaataggaatttggcctgtggggtctacttgcttattatatttctaagctagtggaaggaaatagcaaatactcactaccacaaataagaacatttccaaatctgatgttctgaggatttttagagcttatagtagcaaaaagaaaagggaaattctctctgagatgtccttttttgtaggcctaatgacaaaaggttgaagataaagttctagtactcatttaagtgtaatattgaaaattgatattaccaaatctggaaca

SEQ ID NO: 8072 - DNA, 2300 bp, Homo sapien
agaagctacctaccttcctttctctccttgccctaattccttcctgatacacagcatcatcagaccttgtaatggagtaccagggccccgccacggagctccagaatttaagcagagaatgtccacaggatcaagtccatgacccagggtttcacaagtttcccactctggagtccaggactgagccaagagggcccccacacacaaccagcgcagatcttacttctgtgtggacactttggttaattacttagatttattgaggtacagaatgtgcatacagggtggtcagtcagttggtggtcttggatagtaaactgacaatagaacaagaaaatctattgttcaattccttgtatttaattaaatataaactctggatgattttatgatgtgtcaacttgagtacatgtatgtacaaagagggaaatgagggcagtagccattttgtggcatagacataccttattattcttcaatgaaacacttacttaggacctgctggaaaggcattttgcagatgcgagcaaaggtcctaatcctgtaactaggaagtgtacccaagtaagcctgacttcatcagtgaaagtcctttaaagaaacacataggcattccttgaacaacattttaaatggcaaatgggactctaatcttccagttgccccctattgactttaaaccaaagctttgattcatgaccactgggatccagccagcgggggatttcttttcctgatggactgtacccaggatctcacatttgcttaagcagctcccacaattgggtaagtcaagtctttgcacttaattcatatgtgaatctccctaactatacatatatcttatgggttctgcttttgtctttgaacctggacagacctgggtctgatagatttgtcttcactgttttgacagtcttgaccataagtcttctggaccattggcaaagaattcctctatcagaagatatttgagtagtcccttctgaaatctcttttttaaaaaaaataattttcatataacaacaaaaagacttggcatagaaagaaaaatatagtccatctctatcatttggattctgtatttgtgaatttgcctatatgctaaaagttatgtgtaatccccaaaataattcccgtggtgcactcctagtcattgtaggacatcatgcactatatggagaaaaacgttaaaatcataactcatctttcacccatgagactggtgaagttttgtaaattcaatgagagaccccaggttagtgggtttatttggttaatcagtgatttctcttagagtggtagaaaacagaaaacaaaaaggaaagttttatcttccattggacttctctggaaatatcctataaatgtactaaagcagcatttaagctggatgaggtggtttatacctgtactcttagcactttggaaggccgagaccagaggaccacttgaagccaggagttggagaacagcatgggctacagagtcatacactgactttaccaaaaatttcaacaaaaaaaattagccaggtgatatagtgtgagcctaaagtcgtagctacttggaaggctgaagcaggaggattacttggaattcaaggctgcagggagctatgattatgctactgcactccagaaggagaccctttctctagaataaataaatgtgcacttagaggaatgcctgtatcatggaagaaactcaataaacagtataaaatgcatcttagttaatttctagcctatgtatgctctgacaggatttatgttacatatgattcattcaggcactggtgttcagaatgaaagtgtgatgataatttaatcagagctgcaaaggtgtgttctaaatactgcataaacctaatcatctttgtctccacctttctgaatgctctaaatacccataaagaggtgggtgtggtcttcacaggttcttataaaaggacacggaagagacaagctcagttttctctgaaggagaaggactgcacttagaactgcattttggcgacctctgaaattcagtactgcagtgaatgagcttctgatcttgaggtgaacttaacaaaattatttttggaaaaatcgttgtgggaaccattaaaagaactccagggtgagtgaaacatattgataaaattatatcatctttcctttacacaataataaattagagtgttaaaaatatctcattatctgaaatctacacaatgataccatttgtaactcatgttcttactatagattttatgaattataaggatactaattgttgttattttgtgctttcta

SEQ ID NO: 8073 - DNA, 2300 bp, Homo sapien
ttgagagatttgaggatttatggagttgacgacatgtaattgatccctgaatccatcccatacaggaaacaggaccataaaaagattgcttacgaccgggcgcggtggctcacgtctgtaatcccagcactttgggaggctgaggcgggcggatcacgaggtcaggagattgagaccatcctggctaacacagtgtaatcccgtctctactaaaagtacaaaaaaattagccgggcatggtggcgggcgcctgtagtcccagctactcgggaggctgaggcaggagaatggagtgaacccggcaggtggaacttgcagtgagccaagatcacgccgccactgcactccagcctgggcgacagagtgagactcggactcaacaacaacaacgaaaagcttaccttttatgtgctcatatgtaaagttgggacaatgctacacatattgcatgttttctgtggagattaggaacaatgtgtgcatggagacagcacagtaactggtacatcatagcccatgtatcacattgtccccttcctttttctaacatatttctctccactcaaatagataagaggtttcaagagaaaatgactggggtttgtagaaaaatagacaataaacgggtaaaacaattgagaagaaatgccaaaaaaaaaaaaagcgttaaagaaaagatagccctggacattcaggatccacaaagcaaaatataaatttgtggaaaattaataaattttgttagcatgggaaaaaatatgcagaattctctccatgtgcgcaaataaaacaaacaaaatgtcaaagtagttataatacctaggttttaaatggtatttatcatagaatggcatttttataaaaatttaaaaatttccagaattaaataaagtcagatttctacatatgttaaggaacgagaaatagatcaccaactttcatacaaagattttccaatgagttttagaacccagatgaacaaaagagtctattaccagattctcaaaaatagatgtgtaattcaacagaaaactttgtggtagaggtaggtttcagatgctagaatggaaacagtctcatgtacaaaaaagtatcttttttattaaaaggagaagcactgggaaataaggaaatattccaaattggctggagtgtcctttatccacatcacggattgttcttgcctatacccacctctactctctcttctggattgggtaggacttttggaacctacaaaatgccaactctaaagagaattactttcttatatttgtttcatggtctgagactcaagtaggaaaataggttgtttccttgataatgccacagtagacagaggtaggtctgtaattgaaagctcctaatttccagtgctctaggcttcaactgcctaaagctgagtgtttgaataagtgaatgatgtggtgcaaaaagtggttgaaataaaatcagaagctacctaccttcctttctctccttgccctaattccttcctgatacacagcatcatcagaccttgtaatggagtaccagggccccgccacggagctccagaatttaagcagagaatgtccacaggatcaagtccatgacccagggtttcacaagtttcccactctggagtccaggactgagccaagagggcccccacacacaaccagcgcagatcttacttctgtgtggacactttggttaattacttagatttattgaggtacagaatgtgcatacagggtggtcagtcagttggtggtcttggatagtaaactgacaatagaacaagaaaatctattgttcaattccttgtatttaattaaatataaactctggatgattttatgatgtgtcaacttgagtacatgtatgtacaaagagggaaatgagggcagtagccattttgtggcatagacataccttattattcttcaatgaaacacttacttaggacctgctggaaaggcattttgcagatgcgagcaaaggtcctaatcctgtaactaggaagtgtacccaagtaagcctgacttcatcagtgaaagtcctttaaagaaacacataggcattccttgaacaacattttaaatggcaaatgggactctaatcttccagttgccccctattgactttaaaccaaagctttgattcatgaccactgggatccagccagcgggggatttcttttcctgatggactgtacccaggatctcacatttgcttaagcagctcccacaattgggtaagtcaagtctttgcacttaattcatatgtgaatctccctaactatacatatatcttat

SEQ ID NO: 8074 - DNA, 2300 bp, Homo sapien
gagagatttgaggatttatggagttgacgacatgtaattgatccctgaatccatcccatacaggaaacaggaccataaaaagattgcttacgaccgggagcggtggctcacgtctgtaatcccagcactttgggaggctgagccgcgcggatcacgaggtcaggagattgagaccatcctggctaacacagtgtaatcccgtctctactaaaagtacaaaaaaattagccgggcatggtggcgggcgcctgtagtcccagctactcgggaggctgaggcaggagaatggagtgaacccggcaggtggaacttgcagtgagccaagatcacgccgccactgcactccagcctgggcgacagagtgagactcggactcaacaacaacaacaacgaaaagcttaccttttatgtgctcatatgtaaagttgggacaatgctacacatattgcatgttttctgtggagattaggaacaatgtgtgcatggagacagcacagtaactggtacatcatagcccatgtatcacattgtccccttcctttttctaacatatttctctccactcaaatagataagaggtttcaagagaaaatgactggggtttgtagaaaaatagacaataaacgggtaaaacaattgagaagaaatgcaaaaaaaaaaaaagcgttaaagaaaagatagccctggacattcaggatccagaaagcaaaatataaatttgtggaaaattaataaattttgttagcatgggaaaaaatatgcagaattctctccatgtgcgcaaataaaacaaacaaaatgtcaaagtagttataatacctaggttttaaatggtatttatcatagaatggcatttttataaaaatttaaaaatttccagaattaaataaagtcagatttctacatatgttaaggaacgagaaatagatcaccaactttcatacaaagattttccaatgagttttagaacccagatgaacaaaagagtctattaccagattctcaaaaatagatgtgtaattcaacagaaaactttgtggtagaggtaggtttcagatgctagaatggaaacagtctcatgtacaaaaaagtatcttttttattaaaaggagaagcactgggaaataaggaaatattccaaattggctggagtgtcctttatccacatcacggattgttcttgcctatacccacctctactctctcttctggattgggtaggacttttggaacctacaaaatgccaactctaaagagaattactttcttatatttgtttcatggtctgagactcaagtaggaaaataggttgtttccttgataatgccacagtagacagaggtaggtctgtaattgaaagctcctaatttccagtgctctaggcttcaactgcctaaagctgagtgtttgaataagtgaatgatgtggtgcaaaaagtggttgaaataaaatcagaagctacctaccttcctttctctccttgccttaattccttcctgatacacagcatcatcagaccttgtaatggagtaccagggccccgccacggagctccagaatttaagcagagaatgtccacaggatcaagtccatgacccagggtttcacaagtttcccactctggagtccaggactgagccaagagggcccccacacacaaccagcacagatcttacttctgtgtggacactttggttaattacttagatttattgaggtacagaatgtgcatacagggtggtcagtcagttggtggtcttggatagtaaactgacaatagaacaagaaaatctattgttcaattccttctatttaattaaatataaactctggatgattttatgatgtgtcaacttgagtacatgtatgtacaaagagggaaatgagggcagtagccattttgtggcatagacataccttattattcttcaatgaaacacttacttaagacctgctggaaaggcattttgcagatgcgagcaaaggtcctaatcctgtaactaggaagtgtacccaagtaagcctgacttcatcagtgaaagtcctttaaagaaacacataggcattccttgaacaacattttaaatggcaaatgggactctaatcttccagttgccccctattgactttaaaccaaagctttgattcatgaccactgggatccagccagcgggggatttcttttcctggtggactgtacccaggatctcacatttgcttaagcagcccccacaattgggtaagtcaagtctttgcacttaattcatatgtgaatctccctaactatacatatatcttat

SEQ ID NO: 8075 - DNA, 2300 bp, Homo sapien
agaagctacctaccttcctttctctccttgccttaattccttcctgatacacagcatcatcagaccttgtaatggagtaccagggccccgccacggagctccagaatttaagcagagaatgtccacaggatcaagtccatgacccagggtttcacaagtttcccactctggagtccaggactgagccaagagggcccccacacacaaccagcacagatcttacttctgtgtggacactttggttaattacttagatttattgaggtacagaatgtgcatacagggtggtcagtcagttggtggtcttggatagtaaactgacaatagaacaagaaaatctattgttcaattccttctatttaattaaatataaactctggatgattttatgatgtgtcaacttgagtacatgtatgtacaaagagggaaatgagggcagtagccattttgtggcatagacataccttattattcttcaatgaaacacttacttaagacctgctggaaaggcattttgcagatgcgagcaaaggtcctaatcctgtaactaggaagtgtacccaagtaagcctgacttcatcagtgaaagtcctttaaagaaacacataggcattccttgaacaacattttaaatggcaaatgggactctaatcttccagttgccccctattgactttaaaccaaagctttgattcatgaccactgggatccagccagcgggggatttcttttcctggtggactgtacccaggatctcacatttgcttaagcagcccccacaattgggtaagtcaagtctttgcacttaattcatatgtgaatctccctaactatacatatatcttatgggttctgcttttgtctttgaacctggacagacctgggtctgatagatttgtcttcactgttttgacagtcttgaccataagtcttctggaccattggcaaagaattcctctatcagaagatatttgagtagtcccttctgaaatctcttttttaaaaaaaataattttcatataacaacaaaaagacttggtatagaaagaaaaatatagtccatctctatcatttggattctgtatttgtgaatttgcctatatgctaaaagttatgtgtaatccccaaaataattcccgtggtgcactcctagtcattgtaggacatcatgcactatatggagaaaaacgttaaaataataactcatctttcacccatgagactggtgaagttttgtaaattcaatgagagaccccaggttagtgggtttatttggttaatcagtgatttctcttagagtggtagaaaacagaaaacaaaaaggaaagttttatcttccattggacttctctggaaatatcctataaatgtactaaagcagcatttaagctggatgaggtggtttatacctgtactcttagcactttggaaggccgagaccagaggaccacttgaagccaggagctggagaacagcatgggctacagagtcatacactgacgttaccaaaaatttcaacaaaaaaaattagccaggtgatatagtgtgagcctaaagtcttagctacttggaaggctgaagcaggaggattacttggaattcaaggctgcagggagctatgattatgctactgcactccagaaggagaccctttctctagaataaataaatgtgcacttagaggaatgcctgtatcatggaagaaactcaataaacagtataaaatgcatcttagttaatttctagcctatgtatgctctgacaggatttatgttacatgtgattcattcaggcactggtgttcagaatgaaagtgtgatgataatttaatcagagctgcaaaggtgtgttctaaatactgcataaacctaatcatctttgtctccacctttctgaatgctctaaatacccataaagaggtgggtgtggtcttcacaggttcttataaaaggacacggaagagacaagctcagttttctctgaaggagaaggactgcacttagaactgcattttggcgacctctgaaattcagtactgcagtgaatgagcttctgaccttgaggtgaacttaacaaaattatttttggaaaaatcgttgtgggaaccattaaaagaactccagggtgagtgaaacatattgataaaattatatcatctttcctttacacaataataaattagagtgttaaaaatatctcattatcttaaatctacacaatgataccatttgtaactcatgttcttactatagattttatgaattataaggatactaattgttgttattttgtgctttcta

SEQ ID NO: 8076 - DNA, 2300 bp, Homo sapien
ctggattttctagtgtagagtggaaaacctaatacatatcttcactttttttgttgttattttagaagataattaacggttgattaattcttgttaattattatagttgaaatattggctatttcagaatgtgaaagtgttctctctaatcatctgaattgacaatgggaaaaaactttcctaaattaaaaataatagatattaattacatttaatgtattgaaaggaagagttttgatattaaagttaaaaggacaaatttaatggttgataattttaggagttgacggtccactctgattactcaatcttagataaaagctactttatttataattgtctgagcaaacttcataggtgagtttggaggcagggagtatagaataataccatagatactaagtgtctttcatatattatcatcatggaattattgagagagatagaatgacagagacaggatgacattcagaatgtgcttcttcatcaattagcttatataagtgactcagaaatcatcccagcttttaccctccgcccaggctttaagcttgtctaggtaactgggaatgactgagagcacggcttgtttaacaaaaatgccatgaggactctcgtctcattttatcatttgaatcatggttgttcatatccatgtttcatacccgtggattcaactaatctcagataaaaaaatatttacaggaagaaaaaagcaggtatactgaacatgtacttttttttgagacagagtctcactctattacccatgctggagtgcagtggcacgatctcagctcagtgcaacctccacctcctgggctcaagtgattatcctgcctcagcctcccaaatagctgggactacaggcacgtgccaccacgccctgctgattttttgtatttttagtagaaacgagatttcaccgtattagccaggatgatcttgatctcctgacctcatgatccgcctgcctcggcctcccgaagtgctggaattacaggcatgagtgaacgcactctgccaaacttgtacatatttttaatcttcttgctgttcctaaacagtgtggcattacaagtatttatacaacatttacattgtattaggcattcaaagtaatctagagataaagtattcaggaggataggtttacgttacatgcaaatcccacaccgcttactaataagagacttgaacatcttaggatcttggtatgtcagggagtcctgaaccaaatcttcaatggctattgagcgaaaactttataaatccagcatgtttgcatttactatgtctcagtttgtactggagctaacttattcgacatgttggacagagctcaagtagacaaagaaaattgtccaccggcctttttttccttttcatcggggtaaataaaaataagagaaagaaattctcacttttttttttttaattttcagaaacatggattctgatgccctgcgagtcttccagaatgagctcatttgctgcatttgcgtgaactacttcatagaccggtcaccattgactgtgggcacagcttttgcaggccctgcctctgcctctgctcagaagaaggcagagcaccaatgcgctgcccttcatgcagaaaaatctcagagaagcccaacttcaacaccaatgtggtactcaaaaagctgtcttccctagccagacagaccagacctcagaacatcaacagctcagacaatatctgtgtgctccatgcggagactaaggagctcttctgtgaggctgacaagagattgctctgtgggccctgctctgagtcaccagagcacatggctcacagccacagcccaataggatgggctgctgaggaatgcagggtacgtgatgcctctaaggcagtttgaattatacagaatcccaaataagaatgatgagggcctgtgacaatgatggtgatgagaatgcagatgatggaggtggtgattattccatgtcaatcataacacatgaatgtgtcctttcaatgttgctggctaatttggcactctaatcacagctgtgttgagacttcgctaaaggaggtttccttaaaaacattgttcaaacatatagaatggagctgtggagctggtggccagcaccaagaacacttttcaaagtcaggttatataaaagccagtttctcagaaaattgatgatattatctgaagggtcccttaaaactctctattatgtttctatcatttttcacatccaaattattagaatcatattcgtttaacttggaaaaatctgaccgcttcactctaacttaatttatg

SEQ ID NO: 8077 - DNA, 2300 bp, Homo sapien
acatttgatattgtttgagacctttgtgtgtcacctgttaaacactggagagttattaaaatcccagtattatttcataatgtcacacataaaaataattctgagtgctcttggaaaatgtttcttaagccatatttgaggggtttagttacttcactggatattgaaccttttgaataattctattctaattccctatatttggtgttgtgtgtatgcatataagggggaacaaactcactttgttatgaaaatgttttttgaaagatgtttctctctaaaataaaaaacactggaggagtcagtcaaggaatgtctaacaggctagtagctgaaaaagctgaagttagttgggacttaaattgcatgcaaacatttagaaatcaacagttcattaaggaggtttgcttcaaagttaagtaccaggtatgctacaaaagtttcaagaaataagttattaggcatacctatcaacaattatgttcaattgatagccattgaaatacaaggacaaaaaaaagttatgtcccagaaaaataaatttcactcttccagtcacttgttaggagcaaaggtgcattacctaaagctatcagggctgcagacaatgctgtgaagtttatcctagatatactaccatctttgaaatcaacatagcagttttgctttggctgaaaaaactacttttggttagatacgtgaagccaatcataaattcctaaaatttttctctgagatgagatggttggatgaaggctatttacaatggccactattttgcaaacccatctttaaagagaaatgcttcatgaatgtagcatggtgaggacaggggaatgacagggaccattgctaatgtaggggtcaatggaaagcttccccttcaccctctgaagttttgctggaaaatcaactcacaaaaggcagactattagaaaaaaaaaaggcttacaaatttatgaataacatagcataagggaatcgtagtagaatgattacccaataaccaatgaggtacagatgataatatacccatctttttagaggaaaggaagatgagaatgtgtgtataattttaagagggtagtaaatgaattttagggaaattcaatgggcttgaagaatatgcaatggcctgggacaaagtctgttggccctacagggcagacgagagtttgtaacagaaggctgccagttgtattgacagactgcagtccttcttcctgagatattagttcggttaatgaaaactcaggaaagaaactctttttttttttgtttgtttgtttttgcctttagtagttctggactttaggcagataagggaactttagagaacagctttattctgtgctatgggagagacaaaggattgagagagaggagctggaagagaggggtatggtcagagagaccccctggcttcttcggtttagcatgtcaaagcaccatattttgggaaattggtgtctgagctttagcattaagaacagactctcagtaactactggcagtgcaaggtcctttcagtgattacttttactaatgtgaacctaaaacattccagtgaggtaggtaaaaacctcagttaaatgagtggaaacagaattacagaaatgtggagttttgtttaagtaaaggggaacaaaaaaacgcaatcccatcgattttgatgctgacagtgattgcggtattagtgatgttaacagctttaacagcggagcacccaggaccagaaatcatttccgagtctgacgagtgggaaattacagcagagaatctggaagaagaataaccaatagatcaggaaaagcaatacttaaattcacttctgagccgaaactgggcattttgggggatgggcatggcaaacagcagtagagttctttaggaaaaaattagggacgttttcagcagctcccgccacctactatgtccgggttactgcgggatccacagaatggaagttgcccgccaacaggaagaatgtctcctccctctgcagggcttcctttcccccatcgagggcccctggggaccacaggtccccagcgggtagggcggaggcgtggccttgcgaaggtcagcggaggccacccagagctcacagcctcctgccagcgcgctctctgtttctctgcagccccgaagctcgcgaatgtagcaggcgccccaagctcggtcctcaagaagccatggcggaatccaggggccgtctgtacctttggatgtgcttggctgctgcgctggcatctttcctgatgggatttatggtgggtaagtgaacaaaacactctacc

SEQ ID NO: 8078 - DNA, 2300 bp, Homo sapien
tttgtatatcctcttgtgaagtgtgcagaatcttttacctatctctaatgtctcttgcttaccagtttgtaagaattctttatatattttagctgtgactcttatcagaaattctatgctttttcactgtcttaatgacgactttgataaactttttatcaaattgctttttaacaaaatccaatttgtccatcattttgtttatgactagtgctttccatgttctatttaagaaatcgttgcttacttcagggctgtgagtgttttctcatatggaggcacatttaaatatgtaaatgacctggaactgattattgtataaggtgtgacatggatgtaattaaagaactttaaacaaaagggtgatagtaatttgataattagtagaaaatagaagtcgaaggctgagaaatagtagaaacctgttagtatagtctgattgcttaaaatctgctagcttatgaggaagattaacaaattaatatattcaagtcaaattgatgagatttcattatagactgcctatgggtggagggagaggagatgctgaagaggaacgaatggattttgctttgagaaactgagtctgtacggtgccatcaaataatatggggaaaagaatggactgtgggggcaatagcattaagtttagtagatgctaacatactgagttttatgttcttgtgaaatatcttaaggagaaatacacatctaatactgtactttggatttataaaagataaacacagaattttattttctgtttgtaggtagtgctataaatacaaaaatagaaaatatactactggctacatccatgttttattaacataattttttgtgaattcatctgtagagcctccatctacagcagcaatggggcccggatcttccagacaaaccctggatatatatataggtctgcagctcattttaccctttatagggataagaaatcaccatcactctagaacttccagaattgcttattagatttctcatattatttgacaatacttacatggagtttactgtacacataagtcatgcagtaactgtatttttattgagagtattaatcccttggtttcaacattgtttttgaaattagtaactaagtaagtacttgaatatgattggatgggatctcatactcaaaaggctgaaagcatcttaatatgactttctcaaaggaacctaaaacttaaccaagtccaaaagggaatcatttttcattttttaacagaatggcgtgggatggatttatgaattttctaggtaattgtcatttaagtattttgcaaagttcgtagaggtcaccaatactgcaaatatgtatgagatgtaactgtaagatacgcagctaattttttttctctttgtttcctttttagacataccagggtctagagagtctagaagaagtctgtgtatatcattctggagtacctattttccatgaggggtaacttatgcatgacttattaaaatagtttatggtagaatttagaaagttaaacctttctgtctttaaacattgtttgccatgcagtgttattaggcattttacttacattgccattaacatcttcacaatagcctacacaaacacaggggtttgtatgttgtgtgtttatacatgagaaaacagaaacaaggttacagttcttaagtggtcattgtgatataaactgcctgtttttcttcatattctgtatttaaaagtgatgctatttgggctaaatgttttgtttgaaggactgtcctacacattgcagggcatttagaattttgggccctggggcactaagacaacattatcccaagacgacccatatttttccgcatcctgcagttgagagcctctcttctgtattatgctctagtttatagaaatgcagcactgtgtaaaaatcttccactctgtttccacattcttcctgatatactgtacattcatttttagtaacttagacacttgtaaaatgctagagtttgtacacttactggcttattaaaaatcagatttatccctaaaatacttgtggatttaattggttgtgagattttatttctgaagtttttctgtgataatttaaaggatgaaatactggagctgttgtagaagaaaaacttctgattttaatacattcttagcccaagagggctgtacaaaagggaaacacatgtggactaaaaaagatgctgtaagtaactcttccaaaaatagcacactgggtttatattcatctgagtcattttttaaagatttgaaattattctgtctttagattttaaaa

SEQ ID NO: 8079 - DNA, 2300 bp, Homo sapien
gataaacattcattttgcaccaagaataattgacaattgttttaagttaacatatttatttaagtcttttgttaataacaagatagtcaaagttaaagcatattttgatatgtatgggggtaaagaaggaagggaagatatattcaaagtgtatataaaatatacatgtaaattctagaaagtttttcaaacagtgggtgttagtcagcactgaagtgttggaatggaaatgtaagtggaggtgggattgaaacaggctgttgctgtaacactgtttttcttaatcataagaatgatttaattttatagtttctcaaaatacccaagggaggaacataaactcctatatataacacgactctttttaaacatatatatctataaatgcttggggtgtcaggaaacactgaaaataaatttaccaaagagttattttagccattcagtacttattgctgggtggtggaattattgttgactttgttcttagtatacttctgcgttttccaaattatctaccataagcaattatattctgattgtaaaatgctacagatgaaaaactagaaataaacattaaaattatttaaaaggtttagttcactaacaatcctggtaatgttgcattgatactaggatactcaagacaacagatttggtcacaactaaaactttttagagctctccacttactcatttccaattgtgtatgatcaatttctacggtctattacattcacagccggtgcaattgtaaattggtaccacctttcggaaagcaattggctctatatatctttaaaatcttaaagttatttaaaaagccttatgccctttaccccagaactgtcgctttccaaaaattttcctaaagggggaaattcgaaataagaaaaacaatacacaggttgagcactgtaacttatatataataaagttggggaaattagagaaaggttaaattacagtgcatttattcaacagaatactccgtcatttgtaacaatgactatgaaacaaaatagaaaaatactcacgttaggttaaatgaagaaaacatacctatctatggtggatcacaatatgaaaatttaatacttctaggtagaagaagagaaagagaatatgaaaaactaaaaagtctttaggggtaggaggacgtgagcagatctctaaataaccttgagatcaatggaaacagtgtatagatttttaggttcacttataagctgctgatcttattttaagatccttcagtatatgttatcaaaaagtgtttgcttttcttgcaaacgcccatgtttgggaaatatgcaagttgaagccaatgcattactgtactttttataatgcacctgaagttttactagctgttccaagagtggtgtactgagtattgataaatcgtttaagtggaggctcacatgaaatattaactattaccccagggctttagagcaactgtgatcaattctggcacagcatcagatccataattttctttgctactctgatttctacgttttttgtattttcaaagtaatgtgaccgcaactgttaagttattaaaattgctcctgagatgagggcactcgagacacaaacacacggagaggttcgtccgctattcctctcatttactaagctcacacgtctaccctgaggatttggaaacactgtatgattctgcacttactgtgcacttatcccttagtgctaaggggtaaacagatacccaccgggctgtctaaggcgcagcctcaaggcaaggaagaagggtgctgggtcgcaggggatgagagggcggggcggccactttgctgcaggagatacccaaagccagttagcactgaggaagtcagaagagaattgtcagtctctcggacaccttcattttctgccccggaaatttctcctccgctgttgtctgggctccacttccgacccccagttgctaccagctgtagtccgacctatcgtggcccgggctagtgccagcctcccgccgctacctccgcctcgtcccttctcctctgcgcctgcgcgaccggaaaattcgcgaaggttcctgaaacgcaacggatcgtttccggaagccggtagccgcctcagtcgtcagaccggtgctagcgacacgggagtggcaaacgcatcctcttgccgttcccggtgtttgggccttgcctgtgacggtgggaaaagaaaatggccttgctgtgctacaaccggggctgcggtcagcgcttcgatcctgagaccaattccgacggtaagaggaacgcgccgccagccctccctcc

SEQ ID NO: 8080 - DNA, 2300 bp, Homo sapien
tcactaatataattatttattttgatgctcaaattgacccagatttgctccatagtagtccttccaaactggcttctctgcttgcccccatatttttttttaacacttccttacatttttggtagagcaggatgttctaggtttattatgcactctcccaggtccagctgtggaatcagccatattttaaatgggcctggatacctgatagtggaggatgtgactcagaattcaaaatctagtgttttctatctttatctaaatatctatctatctatctatctatctatctatcatctatatatctatcattctatctgtttaagcatgagtttatactaatacctcaaatttcaatcacatattgcaaggttcattcaagtattccccctttccatctttgcaattccctacttgacattgaaaaatctggctcccactatccaaaaatattttctcatttgctcaatcttggaatactcattgaactccagaagtgctaacccataccttatgaaaaaagaaacctactcataagtttaaatggtttatagtttgactaatctttagcttaatggtatatcattaacataatagttctagtcacttgaggaagttcttgccttcatcctttacaggggtgactaaattatacccttgaaatacattctgattcatttgtttctctttgcaatgttgatttcatatttttaaaggcataaattggcttagtcaaaactgtacagaaatttcactcagagaagtgagtgatcctccctttcctgttcctccagcctttcacctcatttccacatacctccattagttttagatttatcgttcctgtgtttctttttgcacaaatgaataaatatgtgtatatttcctcattcttcctgttttcttatattttcttttttcacttaataatttatcctgaaaatcactctgtttcaatcattattttttcttactgtttcattttcattgcggtttttttaaccttgggttttagcagtttattacaatttcaaaatactggggattttgaattatgttttagttttctttttaataattgatttctggcttaattacatgctctcagattctttattctaaatttttataaccacttaaaatataaaaattatttgcgggctgtacaaaaacaagccatgggctgaatttagtttcctcatccctgctttacacgtatcttttatttgtcagagttgaatattaatttaccttcctcttcaacaattacatttatcccactctaacttagaaactatccttgctatctgttttgattcttcatgtattttaaacttgccctaaatacttactcagtgaacaatcacttagacttaatgacatatttaaccttttcattgtttattccttcctgcattctgatcttcatctgggatcattttccttctttttaaagaaaccactattgcagtgccaccagtgataaattctctcaatttctgtttgatacttcattcttgagaacaattttactggatatagaattctacatttgcaattatttttctttggctatctaaaaaagataattctattgtcttctggcctccttgctttattgagaagctattaatgtaattgttgctcttttgaaagtaacctttcctttttttgtaacttcctttaagattttctttcatattggttaaatcagttatattatactgtgcccatttttttttaaatgctatatttatactttttttaaaattttattattatactttaagttttagggtatatatgcacaacgtgcaggtttgttacatatgtatacatgtgccatgttggtgtgctgcacccattaactcatcatttagcattaggtatatctcctaatgctatccctaccccctccccccaccccacaacaggccctggtgtgtgatgttccccttcctgtgtccatgtgttctcattgttcaatattgttcaattgcctatatggttttattttgtattttgaactttttatatttagataattgaaatttaaatgcatttattagaaataaaacctagaggaggagccaagatggccgaataggaacagctccggtctacagctcccagcgtgagcgacgcagaagacgggtgatttctgcatttccatctgaggtaccgggttcatctcactagggagtgccagacagtgggcgcaggccagtgtgtgtgcgcaccgtgcgcaagccgaagcagggcgaggcattgcctcacctgggaagcgcaaggggtcaggg

SEQ ID NO: 8081 - DNA, 2300 bp, Homo sapien
tggagagagcctgagctctaatctagagtctgctagactctatcaatgactattaaatttagacagtttccacagtttcatgactatgtgggttaaaaggtaaaaactttttcctattttagccagtaaaattaatcaaggagaggggagaaaggaggtattcaacaagaaaaagttaagtctatttagacttaactaataaagtcgagataggaaaatgaggttttatattatcattaacaaaaaggttataataatatgtgccttgctaaccttggatatgaaagggttttataaaccatacaatttgtaatattttaatatgttaaactcctgtagggatttttttttttttcagtttgcagccaataactagaactacattaaaaccagagaggagataaccaaaaagatatgctgggggcagggatgggttgtactttttaaaatcaatgacatatgttgactatttcattagaattaaattatgtcatatatgcttctaggatccttaattatttcattcttgcttgcaggtaattttgagagagtgattgtgtgatggggaaaagcatggattttagagaaagattaaggtctgagatcctgctttactacttgccggctggggaacattgtttgggcaaatgtctcaactaaatagattaacttctctgaccctcagttttctaatatgtcattgggtaaaatagtacctattacttaggattatcatgaagattaaatacaacaaagtggaaaaatgactgacacagtgcctacatcattacatgcctgcaaagaaattcattttccatctcctctcatcttcacgttccctgtaaaggaagaaaaggagaatgtcaagggcttgcagagtataagactggatggaagaactcatatttgggggttctaaaaatctgatcctttgggtatgaatagacttaactttttcttgttgaatacctcctttctcccttctccttgattgattttactggctaaaataggaaaaagtttgtatcttttaacccacatagtcatgaaactgtagaaactgtccaaatttaatagtcattgatgaaagtaattggaagtatctcttgtaatttctaaagtttttcttgcaagtaatcactcttacctcccttgttctgaatagttctggatatcactccagtcatataactccttagggattattgtctctgctttgtaacttgacactttgttcattctcatggcattgcattattcataaaccttgatcagtttaaaagtaagcacaataaaagatggtaataccttgaagcattttaaaaagattataattataaaagtaattatgtaactattgatgaacaatgttcattgaagaaaagttagaaaatgcaaatatgccaccaaatcccaaaacacagttaatcctttttaaatataaaaattcatttgcacatataggtgtttatataataatagaactcatgctatatatactgtttgatgaccttttttccttagcattacatcttactgcatctgaaaatgcacatcttttatgtctctatttttaatgactgcataatattttattttatgaatacaccatgaattattcagtcctctattgataggcatttagcatctcttcattttttttttactttaaactgtgctataacagataattgtctaaatgtttctataggataattactgcaaaggcagttctaagtcaaaggtaaatgcacttaaggcttccaatatatctctaaattgaccttcagaatgtaagaaatcttgtaccaatgaacaacgctgtcagtagtataaaagtgttatttaaaacaaagtgtcacttgaaaacaattcttacaagattgggctaaattctagtaatcttaagttccttattacctagtagtggcaaggtttctaattttttcttatattgctgttttagtaaaaagattttgtgataaagttttaaaaagcatggcttcctaatagttatttcccactctcccccttcttctaggatggttaatttatcttttctctctctctttcttccctccaggatggaagtatgatgtgatggatataattatgggacactgtgtgggcacacggcctcctgcttgttgcctcatcctcctgcttttcaagcttttggccactgtctcccaggggctgccagggactggacccctgggcttccacttcacacattccatttataatgctaccgtgtatgagaactcagcagcaaggacctacgtcaacagccagagtag

SEQ ID NO: 8082 - DNA, 2300 bp, Homo sapien
agattaaggagaggaagcagattgactgggagagctttccctatggctacaatctcactcttcaagcaaaagacaagggatctcctcaaaaatgttcagcattaaaggcagtctacattggcaaccccacaagagacactgtccccattagatttgaaaaagaagtgtacgatgtgagcataagtgaattttcccctcctggtgtcgtggttgctatagtaaaattaagtcctgaaccgatagatgtggaatacaaattatctcctggtgaggatgcagtgtactttaaaattaatcctcggtcgggtctgattgttacagcacggccactgaatactgttaagaaggaggtttataaactggaggtgacaaacaaggaaggagatttaaaagcacaggtcaccatcagcatagaagatgcaaatgaccacaccccagaatttcagcaaccactgtatgatgcttatgtgaatgaaagtgtcccagtgggaaccagcgttctaacagtttcagcttctgataaggataaaggagaaaatgggtacatcacctatagtatcgctagcctgaatttgttaccatttgtcattaatcagtttacaggtgttattagcacaactgaagaactggattttgaatcctccccagaaatttacagattcattgttagagcctctgactggggttcaccataccgccatgaaagtgaggtcaatgtgactattcgaataggaaatgtcaacgacaacagccctctctttgaaaaagtggcttgccagggagttatttcatatgactttccagttggtggtcacatcacagcagtctcagcgatcgatatcgatgaacttgaacttgtaaagtacaaaatcatttctggaaatgaacttggcttcttttatttaaacccagattctggtgttttacagcttaaaaaatcactgacaaattctggcattaaaaatggcaattttgccctcagaattacagcaactgatggagagaatcttgcagaccccatgtctattaacatttcagtcctacatgggaaagtgtcttcaaagagcttcagttgcagagaaactcgtgtggctcaaaagctggcagagaaactactcattaaggcaaaagcaaatgggaaactgaatctggaagatggatttcttgacttttattcaattaatagacagggaccatattttgacaagtcttttccttctgatgtggctgtaaaggaggatctgccagttggtgctaacattctgaagattaaagcctatgatgccgactctggcttcaatggaaaagtgctatttacaatatcagatggaaatacggatagttgctttaatattgatatggagactgggcagcttaaagtccttatgcccatggatcgagaacacacagacctctatctccttaatatcaccatctatgacttaggtaatccacagaaatcgtcatggagactgctgaccatcaatgtggaggatgctaatgacaatagcccagtttttattcaagacagttactcagttaacattcttgaaagttcaggcattggtactgaaatcattcaagtggaagccagagacaaagacttaggttctaatggtgaagtgacttactcagtcttgacagatacacagcagtttgccatcaatagctcaactggaatcgtttatgtagccgaccagttggaccgggaatccaaagccaattattctttgaaaatagaagccagggacaaggcagagagtggtcagcagctgttttcagttgtcactcttaaagtttttttagatgatgtcaatgactgctccccagctttcattcccagtagctatagtgtgaaggttcttgaagatctccctgttggcactgtcattgcttggcttgagacccatgatccagatcttggactggggggtcaagtgcgctattctttggtcaatgactataatgggagatttgaaatagataaagcaagtggtgccatccgcttgagcaaagagcttgattatgagaaacagcagttctataaccttactgtgcgggccaaagacaaagggcggcctgtctctctgtcatctgtttcctttgttgaggtggaagtggtggatgtcaatgaaaacctccacactccctatttcccagactttgctgttgttggatctgtaaaggaaaactcacgcattggaacaagcgtgctgcaggtgactgctcgagatgaagactccggaagggatggagagatccagtactccatcagggatggcagtggtcttggaaggttc

SEQ ID NO: 8083 - DNA, 2300 bp, Homo sapien
cctgcaggctgaattctgccccagactttcagattttgaatttcaggaccttttgacaggcagcactctccagtccttctctggccacaggtccattcctctctcaccttatacccagcagcttcatgcctttctttcatctttctggcctctgacatgtgaacgggcaacctctggcctataaagtctaaacttgtcactctcctttgaagcactccacagtttgacttcaagttcagtctcatctgctaaagttatatccttctccatgaattttacattccagcatctcttgttcacatcatccatcaaataaagcatgtgatgatggcaataataaaaataacaacagatggacacagtggctcacacctgtaatcccagtactttggtaggccaaggcaggaggattgcttgtgctcaagagttcaagaccagccttggcaacatagtgaggcctcatctctacaaaaacaaaaacaaaaaaaaagtagcctggtgtggtggtgcacacctatattcccagctactcaggaggctgaggtgggaggatcacttgagctcaggaggttgaggctgcagtgagctgtgattgtaccaccactgcactgcagcctaggtggcaggacgagaccatgcctctaaataaacaaaacaaataaacaaataaaaataacaatcacatgaaacatcaagtactaagtgtgtctatggattagccttgggtttagtgctttgcactgactctcttttaatccccacaatagaaggaccctgtgaagttgatgctgctattttactcatattaaaaatacaaaaactgaggcttagagaagttaactaacatactcaaagccagatatgtagtgggtgacagagacaagattcaaactcaggtctgtgtgatgcccaggcaccggctctttcactggcttccacatacaaggacacatctctccccagatcccacctggtctgcagggttcactgcagctccacatcttcagatacctgctccataaacccagcccatgggaatctgcccttctcctgaagctctgcactactgaatacctccaccttgcatgcgatgggtgttcagtaaagacctgttgccagagtggatgttctgttcattcttacacatggaaggaagagaaaaagggtttttatcaagctacttagcttttcttttcagtgtattatattttatttgaaaccttaccatgatataattcccacttaaactatgtcatttcttaaatatgcagaaaggtgctatctgggtccagtcaaaaggaaataatccaacagaaaacagaaatttctcctccaagtggaaagaccactttatgaggtttcccctgtggttgctgcatacaattaaaacaagctcagcctgttgtgggcatgttgagtcttgtagccctctgtcctccttctctcttcaccccagccggctttattgtgttgatacattttattgtccataacagagtgtacatatggggatagaaggtgataaatcactcctcttacttaaacgcacatcctcagcatttttcagaatagtggcaaggaatgaaggaagaagcaaacgtaaaggtacagacgtcttctatctgcgggtttttaaaaacttactatgattagttttcttcctttgttgccttttcacctcttggttgttttaggcaaaggattcaggcaaaccccagcaagtttctcacacttacatccgcgtgcgagtcattgaggaaagcacccacaagcccacagccattcccctggaaattttcattgtcaccatggaggatgactttcctggtggggtcattgggaagattcatgccacagatcaagacatgtatgatgtgctcacatttgccctgaaatcggagcagaaaagcttatttaaagtgaacagtcacgatgggaaaatcatcgccctgggaggcctggacagcggcaagtatgtcctgaatgtgtctgtgagtgatggtcgcttccaggtacccattgatgtggtcgtgcatgtggagcagttggtgcatgagatgctgcagaacactgtcaccatccgctttgaaaatgtgtcccctgaggacttcgtggggctgcacatgcatgggttccggcgcaccctgcggaatgcagtcctcacccagaagcaggacagcctgcgcatcatcagcatccagcccgtggcaggcaccaaccaactggacatgctgtttgcggtggagatgcacagcagcgagttctacaagccagcctacctgatccagaagctgtccaat

SEQ ID NO: 8084 - DNA, 2300 bp, Homo sapien
ttcggaggcagacatactacccatttccgcagaatccattaactggactctacggcctattgttttttgatcattctgagatactgaaacttaccttccctttgcaaacctttctttcataagaaagaaacaaaattaaatatttgccaaaaggaaagagaccgttttaaattcctagtaaaatgccactttcagccatccttgatcgttttagaagtatatgtatgtaatctcaagcaagtgatattctaattacagatcagtcttacttattcattagagcaaatctcccgaggactttaccaggaaatacttaactgattttgaatcgttggatgtaatttaaagtaataaagcggcatttatttttaaatactctgtgattctgactaatttccggctgtcctcacctctatctgttcaaattaggtttcgtttggctacattttaaaaggtagattaccaaaaatataggtgattggaccttttaaatatcagaaaaattgctgaaatagagaaaagtgaaaaagaaggtctatgttctcaaataatactaagctaagaaagaataagactgaaacacttgccttataattatactcaaagtgagtcatggattgctttaaagagaataaaattgatttaattatttttcattagaatgctttagtcattcttcctgaaaatctacatgagtattagcctttaacataagcacagaatgttgaagacatgtagcccttcacccacccacctgcagcccccagcttcccagagggaccaaaaattactgtagccattagaggaaaatgtcagaaccaaagactttcctctggggaaaacctataaccgatatatagattcacagctctttgtctgcaattctacaatcccaaaagctctgagaacttaaagggtttggagtatgttagtggcaaactaatttggtggcaaaacctgttcaaaactgttttgaggctctttctactctttatttctctcatttagtgtgaatatccatatgtttcactgcagaaacactggtatttttgattatgggatactacggccagcaccaatttctgtgagggggaggagtattttacataatgtgaaagatatgtgctgcatgtccttgctaaaactgcacaattttaaattctgagatgcatctgctcccgcggatttggagtccagtaccttttcaatagcatctgttattctttctctttctcctcctctcctctcccacctcagtctcttcctttcccccaacccaggtaggaaaggaagacctgggagagattgggttgggaggaacaccttaaggcaaggtgatgacttggggaccacagtggccacagaaatgcctaaattaactccccctccccccccccaccaaccatctttgtcctgcttcatctgtaccctttaggtgcatcgttttcttttaaagatgtctgtgttttctcgagttcccgtataccaacgtgtgtgcactggtcctgacggtggggaggggcttctgtgtcgccgcaggtgtgaggaggacatcaatgagtgcgaacgagaggagtgtgagaacggaggctcctgcgtgaacgtgttcggctccttcctctgcaactgcacgccgggctacgtgggccagtactgcgggctgcgccccgtggtggtacccaatatccaggctggccactcctacgtggggaaggaggagctcatcggcatcgccgtggtcctcttcgtcatcttcatcctggtggttctcttcatagtcttccgcaagaaggtcttccgcaagaactactcccgcaacaacatcacgctagtgcaggacccggccaccgccgccctgcttaacaagagcaatggcatcccgttccggaacctgcgcggcagtggggacggccgcaacgtctaccaggaggtggggcccccgcaggtccccgtgcgccccatggcctacacaccctgcttccagagtgactccaggagcaacctggataagatcgtggacgggctgggaggcgagcaccaggaaatgaccacgtttcaccctgagtcgccccgcatcctgacagcccggcggggcgtggtcgtgtgcagtgtggcccccaacctccccgccgtgtcaccctgccgctccgactgcgactccatccggaagaatggctgggacgcgggaactgagagtgagtaggaagtggtaatgctcacccctcggtgcttacagggaacctgcaggggcgctgtgcgaggacgctacgggaagggagagagaccccgcatgcagagca

SEQ ID NO: 8085 - DNA, 2300 bp, Homo sapien
tttctcatcacccctcattaatgtaaaccccaggatccatcttctcaccaggcccctgaactttcttctgttatttgctcctacccagcagaccccaatcctgactgaaattcactctgccttctccatgcctgtcctgagtagctccaagttgctgattaacaaccactggccaggctgagtggcatcatttgaagccatcatctcaagctgcagggggacattcatgctcctgacacgcctgttatactttactagttaatgtttccactttctgaagtgctccttcatatcttttttttgtcttcaaatctcctacactgttcccctgaatcctggctaatgggtagcctctatctccctgagaatacagaagccagacaagagttctcttctttcctcacaccagtttagaagtgcatctgaatttgcatctggcttctgattcctttctactacaagaaagaaagcctccctctcctaacaaataatatttcttccttgggttttggatgagctcactttaaggagttctggattagctcacttcaaggatgagctcacttcacctctcccttccctctcccttcccttcaacatccactcatgcctctgcatcatcagcccctccgtctccactgcatccttccttctttttttcccccctttaaaggagaggggcaatataacttacgtaaaataacatatgtaaaaataacaatccagaaattttttggtgtttgtttctcaatacccaccctcaaatgtaaccacttttctgatttctattagaaaatagattaattttccctgattttggacttcctataactggaataatatggtatatattttttggtatctggcttcttttgttcaatacaacatatttgtgattaatccatgctgttgtgtaggtcaatcatctttattgctgagtagtattccattgcaaggtcataccataatttgcttatccattcttctgttggtggaaattgcaggtgttaccagatttgagctcctataaacaaggctgctctggacattcttgtacaggtcttttggtggaaatatactttccttttcatttggaacttctggtcatagaataggtgtatatttaactttattaggagctaacagacagctcttcaaagtggctataccattttgcattctcataaaagcagtgtatgagggttctggttgcttaacttcctccacaaatataggataatcagtcattttgattttagtgattctaatgggtgtgaaaagtgctttggggtcataagattagcccccattagaagttatctattattattatcaccagatcacgactcaaacatttttaataaagggcacctgagttccttctttattgtaatcatgcctcaatcttcttcttgtcctaacccctccaaaaaccacatcataacccccaatattggccatacatctatttaagtattatgtgtaaatatatgttggtaaatatgttaaagtattggctttataaagaggacccagtagagacatcatcaatgccccccacaatacccagcgagtgcttggaaaatggctaggttcgtatttttctgcagctccctagaatataacagtctaccctactttgttctgggctctgtccccacatcttaggagttgcattctctttcgggctgcacagccctatgggacgtcaaaccttgcctttcttgacaactgatgggaggtccctaccatcagcaccttctccagtctatcaacctgggttggacgtccctacctagacacagcttctcttggggacgctgtggaggaaatcggggtctcgggtgtggctatatactcagggacagaagctagacgcgctccgcagcctgaggtgggccaggcacctgctgggctcggggtggcagagacagctgtgcggtcccagctgttcctgagcgcaccgctgagggacgcactcccttctacaacggctgcaccccaagtcctcctcccattcctatatttttctccatcccctgcccacgcttaattagttatctcctccagacccctccccactggcctcctcccttgcacacgcgagctgggcagggaagagagcgcccggctcagtactgcgcgcgccctgcggctgtccggggccgcgcggtggccaaagcacagcgcgggagagtctgcgatgtcagagaacggctccttcgccaactgctgcgaggcgggcgggtgggcagtgcgcccgggctggtcgggggctggcagcgcgcggccctccagga

SEQ ID NO: 8086 - DNA, 2300 bp, Homo sapien
aaaaggtcggccacattcattcaacaaaaagacacaggggcagaggacagacagcacagaaagcatggctttgcccctgcacctggcgatttttaagtatcagagctctaatatgggtttttctgtcaattcattcattcattcaacaaaattttttgagtgtctgctatgtgcctgacatccttctaggcactgtattttcagaattgaacataattgatcaaactaccttactcatagagctcatagtgtctagggaagggcagagaagaaatgaaaaaaatgaaggaatatataactcactccaggtacaggtaaggttgtatgtgaaggcttcctagtagaagagcctcctaaactgaatcttaactaagaattgaccaggaaaaaaatggaggagcgagaaggaaatcattttagtatgagaaggttctggagtcatgcagatgaaacagagtgtgtagtgtgcttgtggtgctggcagcagtttggtgttgctgtaacttttggggtgagacagggagtgaggccagctatggtaccacattaaagagctcggtctttgtacagccaagactggagaagacaatagatttaagaaagtgacaagatcagattttcaagcacttattctgtgctcttgtgtggtactgctgggtgtgggaactacaaagataggaagacactacaggtccatgatctgaagtgctcacttctgcactgcccacccacctctttttttctttttggtctactttactttcttattcaactctagacctgctctccctcaatccacgcccagcacacccttcctatcccttaagtgcaagttgggcatttggtagccagtccctgtccttttgcacagagatccagcatggagaataacaaaactatttcataactcctcggcaaggctgacatattagctttagtttctatcatcaatacctgctagtcccatgattcatggcaccagaaaactgacgaccaaaagacccaattccctcacattttaagccatcaaacaaatctacctttacaaggaaacttgaaacggtatctgttctttaaaaaccaatgcacaacagacacataaaccaatggaacagaatagaaaacacagaaacaacaccacacgtctacaaccatctgatctttgacaaacctgacaaaaacaagcagtggggaaaggactccttattcagtaaatggtacttggagaactggctagccatatgcagaaaactgaaagtgaaccccttccttacaccatatacaaaaattaactcaagatggattaaagacttaaatgttaacacccaaaactataaaaaccctagaaggaaatctaggcaataccagtcaggacataggcacaggcaaagatttcatgacgaaattgccaagagcaattgcagcaaaagcaaaaaatgacaaatgggatctaattaaactaaagagcttatgcacagcaaaagaaactagcatcagagtgaacaggcaacctacagagcaggagaaaatttttgcaatctatccatctgacaaaggactaatatccaaaatctacaaagaacttaaacaaatttacaggaaaaaaacaaccgcattaaaaagtgggcaaaggatatgaacagacacttctcaaaagaagacattcatgcagccaacaaacatggaaaagagctcatcatcactgatcattagaaaaatgcaaatcaaaaccacaatgagataccatcttatgccagtcagaatggcaattattaaaaagtcaagaaataaaagatactggtgaggttgcagagaagtaggaatgcttttacactgtcggtgggaatgtaaattaggtcaactattgtggaagacagtgtgcaattcctcaaagatctagaaccagaaatacgatttgacccagcaatcccattactgggtaaatacccaaaagaatataaatcattctattatagagatacatgcatgagtatgttcagtgcagcacacttcacaatagcaaagacatggaatcaacacaactgcccatcaatgatagactaaagaaaacgtggtacatgggggaggagccaagatggccgaataggaacagctccggtctacagctcccagcgtgagcgacgcagaagacggtgatttctgcatttccatctgaggtaccgggttcatctcactagggagtgccagacagtgggcgcaggccagtgtgtgtgcgcaccgtgcgcgagccgaagcagggcgaggcattgcctcacctgggaagcgcaaggggtcaggga

SEQ ID NO: 8087 - DNA, 2300 bp, Homo sapien
cagagtccttttctaaatttgaattcaacatgcttaacatctggtttgaaatagtaaaagcagaatcatgagtcttctatttttgtcccatttctgaaaattatcaagataactagtaaaatacattgctatatacataaaaatggtaacaaactctgttttctttggcacgatattaatattttggaagtaatcataactctttaccagtagtggtaaacctatgaaaaatccttgcttttaagtgttagcaatagttcaaaaaattaagttctgaaaattgaaaaaattaaaatgtaaaaaaattaaagaataaaaatacttctattattcttttatctcagtaagaaataccttaaccaagttatctctcttttatgctactcttttgccactcacttgagaacagaataggatttcaacaataagagaataaaataagaacatgtataacaaaaagctctctccagatcatccctgtgaatgccaaagtaaactttatgtacagtgtaaaaaaaaaaaatctcagttatgtttttattagccaaattctaatgattggctcctggaagtatagaaaactcccattaacataatataagcatcagaaaattgcaaacactagaattaattttacactctaatggtagttgatcttcatagtcaagaggcactgttcaagatcatgacttagtgtttcaatgaaatttgaaaagggactttaaaacttatccagtgcaactcccttgtttttcgtcagaggaaaaggaggcctagaaaggttaagtaacttggtcgagaccactcagccttgagatcaagaaaacctaatcttctgactcccaggccaggatgttttatttctcacatcatgtccaagaaaaagaataaattatgttcagcttaattttagtgttgaatctatttgattatattttaatactttgaaaatgaatgtgtgatttttaatagtatatgtgacctgagcagaaaatcagggaactccaagaagcctacactgtggccatataaacctcagcaagagaaagaagctatgttcttttaaaacagaatagagaccgcttgctggtgaaactcctggctagtaagatgtgtgtctagctatactatttgtggcttgagcttttttaattattaccttcctttcctgagttttgtaggcaccacattcctgaatggcagaaaatagacacctcagaaaacggaggatttgtggactctttccagccctgtggcttttcttatcacagccttttatttattatgagcagaataaaagaatcagctaggtgtggtggtctgtgcttataatcccagctactctggaggataagttgggaggatcacttgagaggccaggagcttgagaccagcctgggcagcatagtgagacctcgactctataaaacataaaaatttaaaaaaaaattagcctgatgtggcgtgtacctgtagtcccagctactgaggaggctgaagcaggaggatccctcgagcacaaaagtttcaggctgtggtaagctatgactgtgccactgcacaccagcctgagttacagagggagatcccaactcttaaaaactaaaacaacaataaatatatacaagaatcataacataaagggattcatgcttagaaaaaatccataaactcccttctaaatattgagacactccaggcttctttcagacaaataacttctaattattccatatttttcaagttattaaccaagataaagaatctctcagttagtggggaaaatgaaaattattaagaatagaattgtcttctgactttaaaaacaatttagactttaaaacatgaactgtttactcaggctggtgatactctagtttgttagtataccatacttgaagatatcatcaagatcactatagttgtatatattctctatttttatatgtaaatgttaacttagttcaagtattttttgcttgtatcgttaactgatcatcaaatacaatcctaaagatatatcagaagctttattttggtacaaagtcataagaatcaaaacttttttaaccattcacattaggtatcaacagtaattgtttgagatacttttatatcaattctgttacactgagcctttagtcatactaagagaatgcagaagaagttataggaaaacgaatcttcactgaaactagtattatataatcttgaattagatgtttaaaaaactttatagcttgatataaaatgagttgaaaattattatttaataggaagcagcattagatttttgtcac

SEQ ID NO: 8088 - DNA, 2300 bp, Homo sapien
acttgctttatctccacatcactgtaaagacattgggcctcctacctcagcccaaccctcttcaaaagatttcaggcctatactacaagtcaaacttttcttccttccatattgccagatctgctttccctgaagctgagattaggggacaatgacttttgatcccttttaactctcaaaggataatgttcttttaagatgctgtcccacatgttctcattataatgagtggtttatggaaaattaccttggtcctataatttctgtctgatgcctatcttctctcctgctgatctttaaccaggtgatccaccccaacacaggttagggaacattgctctagctatgttccagaatagatttcttcttcttcttcttttttaaaaaaaatctcctttacccctttatttgtcaggaacacttcaaataaaaccttcttttgggatttgcatgtgtatgtatgtgaacaaattgggttcacttaaaggaaaagaaagggggttggcaaactgtcattatcactagttatctagtgaaagcctacagaggatgcaacaggaggaaagatgtagatagtatgtaactgcgtacctttttaatctcagaattttaaatatttaacaccattgccatatagttacatcagtgactgttaatcagacccactcccccccaaaaaaaccctttcctaaagcaaccccactgaatgaaacggacacaaataaaaaggattgtctggtgtactgacttccaagaactatgaagtgaaaaaaaaaagaaagcgattttaaaattaaaataaatattttccttttaaaccaaaagcttgcttcatccattgattcatcgaatattcattggtacccatctgggaggccagctttgcatatttttcgagagctccagctctgaaggcagaaggattctacttctgccatgtacaagcttcctgtccccagacacgttacttacctccgtgccttaatcccttcatctttagcgttaatgtaaatattagaattatctcacaaattgtagtcagaattaaagataatgtatgtatggtgcttaggagtacttgaaactacatcagtacacttagtctttaccttaattttctttcagcaccacggtcaacgtcaaatatctggaaggacattgaaatatcctgaaagtgaaattgtatatgacttaattaaattctatttaagtgtctcctgtaactctaactatagaaacagggagacgaataaccagagtagtcagaacctcagcatgggtaggggacaaatcccgtccttcttcgcattctccaaggtgacttacagaacgctaacgccttgcatacggacaggcgccccaaatttaagttcgccgtcatctttaaaacccccagggagctatgggcccgggtctcggctagctctaaggtcccaccctcgctgatctcaggttacccaaccctcctctcgggttacccaacccggcctcgcagcagtcctcgggtcttcggcccctcccgcccctcgccggcggtgcccgccgagccgggctgtcccactgcgcatgctcctcgccgcgcggttggggagcgccggggcagggaggcgggcaccaggcgcgggtccctccgggcaggggaggtaggcctgggcctgacgccggccacgcagcggcgggagagtgagcactcgggcggcggcgtcctggagacccgcgagagatggaagcggcggcgacgccggcggctgccggggcggcgaggcgcgaggagctaggtcggtgttgtgcgtgggcagggagccggggctgacgtgggcgggggtctgtgcgggagtcgggtgcgcccacacctccaggggccccgcgcttggcctgagttgaggcccgattgctaactgaccccgtggtcagcatccgcaaaggaaccggttatctgaccccgagaacttggtcagacgaagcccaggcctgaatagggcgttaaaatatgtgtgtgtgtgtttgcgcgcgcgcgtgtgggtgagtgtgtgtgttgagtggggcggggccctgtgggtacacgtcaaagacgcaagagcctgcgccgtgactcacggtttttttcccaatgatgctttaaggaagttatcattgttctgcttttcaaatgctgcagccccattcggaatctccagatgaatcctcattttactccttgttatcccagagtttcgaacaggtcgtgctgaccagaatgaacaggagatacctgtagcttgctcacttggcaaagtttgtttgttttttgctgctttcct

SEQ ID NO: 8089 - DNA, 2300 bp, Homo sapien
taaagacttctaaatgtttcctttcatatacctatgaggctatattcagtaactttcaacaactgttcattgagtgactggtatttgtaagtcactgtgctaggcctgtttggacaaagacaaatacagttaattcctcaacaggcctagcacagtgccttgcacataatagtatacagcatagtataaagcccagaaagaggaataattataagtggagaagtgttgtaacagagatacgaacaaagtgctgcagttgcaaagaaggaagtagttaagatgtgatgcaagaagttaaagtcaggaaaagaaatgaatttccagggttcaaattgtcacattctgtataatgtctctattttgatacagctgtactttatatctgcttctaatttataagacctggagtagaagtcctagtaaatatgttctcaagtagagatgcatgaaaaacatatttctcttgaatcttatgatcattgttatcacttgctttatctccacatcactgtaaagacattgggcctcctacctcagcccaaccctcttcaaaagatttcaggcctatactacaagtcaaacttttcttccttccatattgccagatctgctttccctgaagctgagattaggggacaatgacttttgatcccttttaactctcaaaggataatgttcttttaagatgctgtcccacatgttctcattataatgagtggtttatggaaaattaccttggtcctataatttctgtctgatgcctatcttctctcctgctgatctttaaccaggtgatccaccccaacacaggttagggaacattgctctagctatgttccagaatagatttcttcttcttcttcttttttaaaaaaaatctcctttacccctttatttgtcaggaacacttcaaataaaaccttcttttgggatttgcatgtgtatgtatgtgaacaaattgggttcacttaaaggaaaagaaagggggttggcaaactgtcattatcactagttatctagtgaaagcctacagaggatgcaacaggaggaaagatgtagatagtatgtaactgcgtacctttttaatctcagaattttaaatatttaacaccattgccatatagttacatcagtgactgttaatcagacccactcccccccaaaaaaaccctttcctaaagcaaccccactgaatgaaacggacacaaataaaaaggattgtctggtgtactgacttccaagaactatgaagtgaaaaaaaaaagaaagcgattttaaaattaaaataaatattttccttttaaaccaaaagcttgcttcatccattgattcatcgaatattcattggtacccatctgggaggccagctttgcatatttttcgagagctccagctctgaaggcagaaggattctacttctgccatgtacaagcttcctgtccccagacacgttacttacctccgtgccttaatcccttcatctttagcgttaatgtaaatattagaattatctcacaaattgtagtcagaattaaagataatgtatgtatggtgcttaggagtacttgaaactacatcagtacacttagtctttaccttaattttctttcagcaccacggtcaacgtcaaatatctggaaggacattgaaatatcctgaaagtgaaattgtatatgacttaattaaattctatttaagtgtctcctgtaactctaactatagaaacagggagacgaataaccagagtagtcagaacctcagcatgggtaggggacaaatcccgtccttcttcgcattctccaaggtgacttacagaacgctaacgccttgcatacggacaggcgccccaaatttaagttcgccgtcatctttaaaacccccagggagctatgggcccgggtctcggctagctctaaggtcccaccctcgctgatctcaggttacccaaccctcctctcgggttacccaacccggcctcgcagcagtcctcgggtcttcggcccctcccgcccctcgccggcggtgcccgccgagccgggctgtcccactgcgcatgctcctcgccgcgcggttggggagcgccggggcagggaggcgggcaccaggcgcgggtccctccgggcaggggaggtaggcctgggcctgacgccggccacgcagcggcgggagagtgagcactcgggcggcggcgtcctggagacccgcgagagatggaagcggcggcgacgccggcggctgccggggcggcgaggcgcgaggagctaggtcggtgttgtgcgtgggcagggagccggggctga

SEQ ID NO: 8090 - DNA, 2300 bp, Homo sapien
gacccctgggttagactgtatctcctctacagtttcttacaattctatgattatttcatcataattgttttaaaaaaatttttaaggtatgttctatgcataatggtatacttagtttttaaaattataatgaatatatataatttttaaacttgctttttaaaaaatataaaaataaatatttccttgttgatacaaagacagacatgaagttattttatatagccacgcatatgctaaagttgcacattcatttactatattgctattataaattttcccatgaaatgattttgttatgaaggtttttaaattttaaaggtttagcctattgctttattatttattccctataattggtcccttagcttttcttccaaaggtcatccttattcttcatccatttatgccccctatattctcctttgaccatttccggttacattttatcttatcctcattttgccatgtcctccaattttctttcatgactaagctctcttgtcaactctcactaaccctgtttaggaagatttccaccctggccacactcttcctctcctttagactggagctttcctggtctcatccctttcaaaacaaacttacctgaaaatatctaataataaggacatttcaaggtgaattcaagtctttactgttacttcttactagcagggtagggaacaggtatttgcattttaaatcttaactctcatcctgaaatgaaaacctttattcgtattaaattgaatgggatgttcctattctatatttaaattttcctaaaatccattatagtatgtgtcttcttaaatgtttttgcaagcattcccctgcacctattcttctatgtgaaaacatgaaacctggccgggcgcggtggctgactcctgtaatcccagcactttgggaggccgagccgggtggatcacgaggtcaggagttcgagaccatcctggctaacacggtgaaaccccgtctcttctaaaaatacaaaaaattagccgggcgtggtggcgggtgcctgtagtcccagctactcgggaggctgaggcagaagaatggcgtgaacccaggaggcggagcttgcagtgagccgagatggcaccactgcactccagcctgggcaacagagcgagactccgtctcaaaaaaaaaaaaaaaaaggaaaacattaaacctacagtttgctaaggaagatcctgactgctaaagaaaccgactcaaccttaatgtttggagaacactggatttggagtaagatgatctaggtttacatcttgatgtatcatccatttcaagtgcaaatccatggacaaatccatggacatatccttcattctctctaagcctgggtttcctaatcttctgaaagaagctattaataacacctgatacacttgctgagtgtatttctgagcctctaaagaaataatgaacatggaagcacttagcaatgttacatagccttagtgatcttgggcatcctgagatttcattaaatttcgttcctagttccattttcccttccttgggttagaaaaaatacattgacccattcaattcagataagaataaagaatatacgcgttttcagaataatgaaaagtttcaagttaagataacacagtcactctcttcatgcaaacatgagagctatgaaacacctgttagaactgatatcccaggtgaccgtatacaattcatctatgaagctcaatttgtcaagaaacagcataatggttttataaaattcagatgggacctggacggagggatgtgggtgcgcattaaattcatagaatattaaagtagcaaattagcgttaaagtgatgaaagtaaagtgcaaataaaagactttaagaattaagtagtcgactccatgtgttaggaaggaattatttggttaaaataaatcaaatacaaaattcaagtgcttaaaacaaatcactcaagatgtcagttggaaaacatatattctttcctattatttcctctatgaaatggagacagaaaatctgtcatcaatgactcttggaatttggtggaaaaaggaaagaatctggaatcagtcccgttgagtttcgttccagcttctcctcttagaagctattctcttctccctgaagggaggcaacactgtccgttcgcctgactggcagtgttttaaggacccatcgcgcttgacgggaaagtcaggtacaagctgatgctgttatcaccacaggaaccaggggctgagcggtgaaatccagctcctcccagctggaagacgctagggtgaacggagataaaa

SEQ ID NO: 8091 - DNA, 2300 bp, Homo sapien
ttgaatgggatgttcctattctatatttaaattttcctaaaatccattatagtatgtgtcttcttaaatgtttttgcaagcattcccctgcacctattcttctatgtgaaaacatgaaacctggccgggcgcggtggctgactcctgtaatcccagcactttgggaggccgagccgggtggatcacgaggtcaggagttcgagaccatcctggctaacacggtgaaaccccgtctcttctaaaaatacaaaaaattagccgggcgtggtggcgggtgcctgtagtcccagctactcgggaggctgaggcagaagaatggcgtgaacccaggaggcggagcttgcagtgagccgagatggcaccactgcactccagcctgggcaacagagcgagactccgtctcaaaaaaaaaaaaaaaaaggaaaacattaaacctacagtttgctaaggaagatcctgactgctaaagaaaccgactcaaccttaatgtttggagaacactggatttggagtaagatgatctaggtttacatcttgatgtatcatccatttcaagtgcaaatccatggacaaatccatggacatatccttcattctctctaagcctgggtttcctaatcttctgaaagaagctattaataacacctgatacacttgctgagtgtatttctgagcctctaaagaaataatgaacatggaagcacttagcaatgttacatagccttagtgatcttgggcatcctgagatttcattaaatttcgttcctagttccattttcccttccttgggttagaaaaaatacattgacccattcaattcagataagaataaagaatatacgcgttttcagaataatgaaaagtttcaagttaagataacacagtcactctcttcatgcaaacatgagagctatgaaacacctgttagaactgatatcccaggtgaccgtatacaattcatctatgaagctcaatttgtcaagaaacagcataatggttttataaaattcagatgggacctggacggagggatgtgggtgcgcattaaattcatagaatattaaagtagcaaattagcgttaaagtgatgaaagtaaagtgcaaataaaagactttaagaattaagtagtcgactccatgtgttaggaaggaattatttggttaaaataaatcaaatacaaaattcaagtgcttaaaacaaatcactcaagatgtcagttggaaaacatatattctttcctattatttcctctatgaaatggagacagaaaatctgtcatcaatgactcttggaatttggtggaaaaaggaaagaatctggaatcagtcccgttgagtttcgttccagcttctcctcttagaagctattctcttctccctgaagggaggcaacactgtccgttcgcctgactggcagtgttttaaggacccatcgcgcttgacgggaaagtcaggtacaagctgatgctgttatcaccacaggaaccaggggctgagcggtgaaatccagctcctcccagctggaagacgctagggtgaacggagataaaagcagttctctttacccgaagtttatttctttttcatgccacttcaaatttgggtaagaggaaagagggccaaggggatttaaggaacctggatgatgaactccccagcggtttacagttccttcgtgatctatttggttcattcattcaacaagtatttccgggctgcagcttgggtgcccagccttggggtaggcagtgggactacaaagaggaaaggacccagaatagagggggcactggacgtataactgcgggacagcgaggtcgcgctcgcgcggggtgaggttggaggcagccgaggagccgcacagggcagcgcctgccgccgccgccgcgcccatcccccactccgacggccacgagttcgggccgcgacgtccccatggcaacacgcggcggcgccgcgcgcggggagggagaggcccaactgcctcgttggtcgcgcggcgggagggcccaggcggcgggagcgcggcggcgggtggcggggccccttggggcgggcctggcggggcgggaggtgacatacgcggtcctgcgccctcgcctcagacctctcgggcgagcgcggcgcagcgcaggtaatggctcctggccttcccggccccgcctcgcccctgaccctcacccaaaggccaggctgcgcgggtcctcgagcgggacaggggaaccccaaaagggcggccgctctgcgggaggctgggcttgaaccgagcgcgggtcctggaggggcgcgtggcgcgggga

SEQ ID NO: 8092 - DNA, 2300 bp, Homo sapien
ttttcaggtgcacagtgcaagttgttggatctaccgttctggggtctggaggacagtggcctcttctcacagctccaataggcagtgccccagtagggactctgtgtgggtgttcctaccccacattttccttctgccctgccctagcagaggttctctgtgagggccccgccccgaagcaaacttctgcatgggcatccaggcatttccgtatatcttctgaaatctaggcagaggttcccaaaccccaattcttgacttctgtgcacctgaaggttcaacaacatgtgaaagctgccaatacttggggcttctatcctctgaagccacagcccaagctctacattggccccttttagccatggctggagcagttggaacacagggcaccaagtccctaggctgcacacggcatggggaccctgggcctggcccatgaaaccactttttcctcctgggcctctgggcctgtgatgggaggggctgctgtgaaggtctctgacaagtcctggggacattttccccatggtcttggggattaacattaggctccttgctacttatgcaaatttctgcagctggtttgaatttcccctcaaaaaatgggtttttcttttctactgcatcatcaggcagcaaattttctgaacttttatgctctgtttcacttttaaaactgaatgcctttaacagcacccaagtcacctcttgaatgctttgctgcttagaaatttcttctgccagataccctaaatcatctctctcaagttcaaagttccacaaatctctaggtcagaggaaaaatgcctccagtctctttgataaaacataacaagagtcacctttactccagttcccaacaagttcctcatctccatctgggaccacctcagcctggaccttattgttcatatcactatcagcatttttgtcaaagccattgacaagtctctaggaggttccaaaatttgccacatttttctctcttcttctgaaccctctaaactgttccaacctctgcccattacccagttccaaagttgcttccacatttcggttatcttttcagcaacgccccactctactggtaccaatttactgtattagtctgttttcacactgctaataaggacatacccgagattggggagaaaaacaggtttaattggacttacagttccacatggctggggaggcctcagaatcatggggggagccaaaaagcacttcttatatgatggaggcaagagaaaatgaggaagaagcaaaagtggaaacccctgataaacttatcagatctcatgagacttagtcactatcatgagaatagcacaggaaagactgacccccatgatccagttacctccccctagtttcctcccataacatgtgggaattctgggagatacaattcaagttgagattttggtggggacacagccaaactatatcactgcctgatccaattccttagaaacagacaccagccatatcatgccaaattcctctccttgaggagccatactatagcccagttggtacccttgaatctcatcctacctagcccaggcttgctcttctgtccttaacagacaggaatgatatcccagtttgcctctgtcaaaccttctgaagttatgatagacataggtatatgtatgcctatatggaagagcattgatcctgaagctaagtcttataatttttcctaattagcatattccttagaattagcctactctaaacaatgttattttaaaaaattaagtatatatacactgttagttctgaaattggctttattaattttaaaaattaaccttcagcttttgaacttattcctatttaaataattgaacaatttcaggaaataatgttcaagctatgcagagcaatgtaataattttttttgccctcacatttcactactttaaaatgtattttactttcctacaattgccagaacttctccttgtgaggctgagcttcaggaattaatggaacaaattgacatcatggtaagcaacaagaaaatggattgggaaagaaagatgcgggctttggagacacgattagatcttcgggatcaagaattggcaaatgcacaaacttgtttggatcagaaaggtcaagaggtactgaatacatatgttaacaaattgctaattcatcagactgttacatatagtattctatcagaatatgtttttattatacatactttttatcaggcatcagcaacagcatttattgcttgaaattctgtcagcaaattataggctaaatgtattatatcaaat

SEQ ID NO: 8093 - DNA, 2300 bp, Homo sapien
atcatacacataaatgcaaaaagacaacaatttacatctgaattactgtcatttcttatatgtaaaattctctttgtttatggcacactttaatagcagatgcatctcaattttcacatgaatcacatctcatttgtctttccacaaccttgaaatgtgtcagtatgcttattaatttcattgcatatatttattcattatgctacactctacatgttttttaaatgtgcaatatttttcctgggaagttaatgacaaaaatagattgctctgcatttttctaatatctatgacagaaaagctaacctttttttgtttgcttgttaatgtgtcattaaggtgctagagcaacattgtccagtagtaatataatgtaagccacaaatataatttaaattttcctactagccgaattaaaagaagtcaagaaaaatgagtgaaactaacatatcataacaatatattttattcaacccactatatatccaaaatattatcattctaaaatgtaatcaacatataaaaagttactgaggtttttactttttttcatactaagtcttcaaaatctggtgtgtattttatgcttccaacatatctcatattacatgctaagtattcatctgaagtacctgatctgtgtttagatcccatacaattttacagttaaaaaagttgatttacatacttaagttgttccaaacaaacttgaaaatgttccagtaactgagtcaagtaccaaagaatcattttcctcaatatttgcacccacattcacaaataattgatttgactttcatgcagaagcatactaattttaaaactacatctcagttaaatcaattcactaattcttgtgttaatttagtattaatcttgaattcaaggtcaaaaaacaattttagatttatcaatatcaagaaagccttcaaatttttcttgtacttttgcagccaatttacatgctgtcatttgtaagtaaaatactttgcatattcattcacatgtcaaatcattattactcatttgtattatgaaaagtttgaattttaacatatatgcttgtacctgtgtagttaggtcatgaataagcttttttcctgtcaatggtgtctccaaatttcactcttacagatattattttctaataacagtaaacaaatatattctattattaccatattttacagagtttcagctaaccctagcctgtggcaacactatattttataggcctaaggttagagctttttgtggactccccttccccaagtgaaagcagatgcacttttctacatgcaacttcatatttgattgctccctagtggcaaatttgcaaaccagggagcccacatagtgccttcttcaactgggcaaagttatgggagacattcacattaagtcaatttgtatttctgattggtaatctattgttttgcatttcttttattattgaaatgtttaatcttgcctgaaaaatctccactgttcaaaacggaggctttatccaaacaagtctttatccaaacaagtctattaagtcaccaatttgaatctttttatatttatttccaaggtggctgggaagttctggggctaaagtaatgctactatgcccctcactgaacacaggcctcctggaaaacagcatatatttaaggcttggtaaaaataaattatctgggaactcattatatcctatatattctatacaattattcttctaggctttgtgaacttctgtataagaattaataaataagaaagcatatgtccacataagagcttatacattaattttcataacagcattattcataataatcaaaaagtagaaacaacccaaatgtccatcaactgatgaatagataaacaaaatgtggtatatccacatagtggaacattattcagccataaacaggaatcaaccactgatacatgctacaacatggatgaaccttgaaagcattatgctacattaaagagggcagtcacaaaaggccacatagtgtatgacaccatttgtatgaaacatctagaataggcaattccatagagatagaacatagattagtggttgctaggagctggaggaaggggaaaatggggagtgactgttaatgagtatcaggtttcctttggggatgatgaaaatgctctggaataaagtagtggtgatgttcaactttgtgactaaattgaaaactgctggattgtacactttaaatgggcgaatttatggtatgtggattatatttcaatgaatattattaataattcaataatattgattatatttc

SEQ ID NO: 8094 - DNA, 2300 bp, Homo sapien
gaagttggaaatcatcattctcagtaaactatcgcaagaacaaaaaaccaaacactgcatattctcactcataggtgggaattgaacaatgagaacacatggacacaggaaggggaacatcacactctggggactgttgtggggtggcgggaggggggagggatagcattgggagatatacctaatgctagatgacgagttagtgggtgcagtgcaccagcatgtcacatgtatacatatgtaactaacctgcacattgtgcacatgtaccctaaaacttaaagtataataataaaaaaaaaaaagacagaactgtggcttggatagcagcaagacaggcagatccccacactgctactgctcagacccaaggcttatacagcttcaggaaagcagatgcgctcttcagcaagacaattaaaggcaaccttccagaacaggcaagaatgtgctgtgtgtcatagcctgtactttgtatgatagcatcaaggttgctttgttcttatgctagttgaagtaaacattaataaagtgaaaaccaggaggcagtcatggggctaatcagaagtcaacatggcagattagcattcaaagtggagtcacttttgcctcccctggtgctgacattgaaatgggtcaaaccacctagttttattttctaggcaccaccaactatgagttgcatgactttgcacaaggtatttagcctttctcatttccgtttccagagatgaaatcgatctcaaggggcattttaaggagtagtttcaagttttaaaggagattaaatatattaaagtttttcaagaactgcaaagtactgtataaagaactattactgtttgtgtttatgtcaacagttggacttctttactctttatgttggcatgagaaattttccttctcatgttttccattttctgggaaaaaaataaaaataaacaaaacaccttcaaaaaaataataaaataaaataaaataaaataaaaattaaaaaaaaaacaggctctgaaattgtggcaataatcaatagcttaccaaccaaaaaaggtccaggaccagatggattcacagccgaattctaccaaaggtacaaggaggagctggtacccttccttctgaaaccattccaatcaatagaaaaagagggaatcctccctaactcattttatgaggccagcatcatcctgataccaaagcctggcagagacacaaccaaataagagaattttagaccaatatccttgatgaacattgatgcaaaaatcctcaataaaatactggcaaaccaaatccagcagcacatcaaaaagcttatccaccatgatcaagtgggcttcatccctgggatgcaaggctggttcaacatacgcaaatcaataaatgtaatccagcatataaacagaaccaaagacaaaaaccacatgattatctcaatagatgcagaaaaggcctttgacaaaattcaacaatgcttcatgctaaaaactcaataaattaggtattcatgggacgtatctcaaaatcataagagctatctatgacaaacccatagccaatatcatactgaatgggcaaaaactggaagcattccctttgaaaactggcacaagacagggatgccctctctcaccactcctattcaacatagtgttggaagttctggccagggcaattaggcaggagaaggaaataaagggtattcaattaggaaaagaggaagtcaaattgtccctgtttgcagatgacatgattgtatatcgagaaaaccccattgtctctgcccaaaatctccttaagttgataagcaacttcagcaaactctcaggatacaaaatcaatgtgcaaaaatcacaagcattcttatacaccaataacagacaaacagagagccaaatcatgagtgaactcccattcacaattgcttcaaagataataaaatacctaggaatccaacttacaagggatgtgaaggacctcttcaaggagaactacaaaccactgctcaatgaaataaaagaggatacaaacaaatggaagaacattccatgctcatgggtaggaagaatcaatatcatgaaaatggccataccggatggccgaataggaacagctccggtctacagctcccagcgtgagcgacgcagaagacggtgatttctgcatttccatctgaggtaccgggttcatctcactagggagtgccagacagtgggcgcaggccagtgtgtgtgcgcaccgtgcgcgagccgaagcagggcgaggcattgcctcacctgggaagcgcaaggggtcaggga

SEQ ID NO: 8095 - DNA, 2300 bp, Homo sapien
caagtagctgggattataggtgcctgccaccacgcccagctagtttttgtattttcagtagagacggggttcatcgtgttggccaggttgatcccgaactcctgacctcaggtgatccacccacctcggcctcccaaagtgcagggattacaggggtaagccaccacgcccagccaaggatggcactttcacagacacaatatctatgttattactactataagggagcatgtggagtcaccttattaagggactgagtcctacatcagtggctctgcttgcctcataaaattattcattaatttttagcagtggccttgggaagttgtgtacataatatttagaggaaaatggcatttacaatgataatgaattaaagcaattcacacggcagtaccactgccccaatttaaaccttgaggcttgctaatttcatatttagctgcatcccatatgctcccaatccctctgccctagtgtggagctacagctcaaactcctttgaaggtaggaaacttacctcacacacgcgtgttcccctcattctttcagcgcatagaacactaaaaagatgctccttaaatacatgctaaataaactgatcaatagttgccttttattaaatatctttgtgtttcaggtatttccttatttccttcacagaccggatcatgaatgatctcccaatgtgacaaggtcttattctccacagtttaccgttgaggggactgaggtgcagaaagcccaaggtgtatgcagcccaatcccctctgatcccactctactgcattgctgccttttgtacgcagcaggaaggacacttcctgtaaaaatgaaaaaaaaagccttaagttgtttgagagagggtcaggaagaaaacaggaagagccagtagactgcaggtgctttcaaagggctccctgtctttgacatccctaaaataaaaacttgttaattaagagattggccacagaaatccaggtggaaaacctgcagaagagtgggttccacaattcttcaaaacagaacaaaaaaaccccaagacttgttatatttttaccggtggaggggaagaggttacaggagtggccttgctccccgggctggccttgctgagcaggtgacaataccacacatataaaggttttaaggtgaaaaggtagtcaatattttacatttcgaagatagtttttaaaatcacctactgcatcagtagtaatacaacaataactaccatttacataccaccgcacacatcggggctgcgtaaagaactttatagtgcaccatctcaattaattctcacaactctgtgaagtaggttttattattcttaatttatagacgtgttcactgtgggccagggagatgagctttcccgcgattgcccagcttttaagaggtagatctcaaacctaaacgtgtttgaccaaaagccctgaataacatttagccgtgggcctcttgcggatttggcgctggtccgaggtggggaattgtgaatctcatttatttatgctgagctgcgcacacatatgcacgtgtaagttacaaaaaacaaatccaggtcaggatctctgtccgcttgaggtttcaaagcctacttgggtagacagcggtaaaagtctcaactcattcatctactcgtttgctctcttcacaagtatttattgcgcacttcagtattccagacagggcgctaaccttgccctggaggagagaatggtgaacacaacagacatggcgtttgcctccaactatcccctttccgattctgctatctcacgggcgaggcgttcaaagaagcaggaaatatatcaacaagggggtgacttaagcacccgctgcgcgggagccggaggaagcgcgctgagcctgcagaggtggtcagggcgaacttcctggaggcagcggcagcagcaggccgggcgagaacccaggtcgctcggaagcgacagtctgagccgggaacggggaagagggggcgggagccgaggcccgggcgggggcagccagcgagttagggttaggacgggaggattcggcttcccggcggcagagggcgcctggcgctgcggtctggcgcgccagagtcgcccgcgcgggcgccgagaggagaggcgaggcggggagcgcaagcggcggcggccactgccacgtattcccggcagtggtggcggcggcggcggcggcgcccgcgggcaggtgggctgggagcggcgcggcggcggcggcggcggggcgggcgagccggcgggcgggcgcggggcacggggcaccgggcaccgggcgggggtgcg

SEQ ID NO: 8096 - DNA, 2300 bp, Homo sapien
gaactcctaagtgccatggggcagcatgtgcaggaacccatgtccaggcactaaacctagcccaagggatgaaataatatgcacatgttttatcgggtatggaagagtatctccgtgcctgtatggaggatgctgaaaaaatgtttaaaatgaatacaaatattcttcaagataaatgtgacaggaaatggggagagaggctgagaagaaccctaatatttgggaaggaaacgtgaattctagtcctggttcacccttgactgaaatgtgcccttggccaagttgctgaatctctctgtaactcagtatcctgatctgtaaatctgaggtggaatcacactatttcttcctgtaccttccttcctcctactccatccctttaagttttggtgttcctcggagtttggttctttgctcattgctcttctcactctgcaaattctccctaagtgatctcatccattccgctagcgtttgttattactcatgtaacaaggaaatccctttatgcttagcctagttctttctgtgggctatctaccgatgtattcatctgcttacagtacatcactggatgttctacaggcacatgaagttcaatatacacagagcttggctcatcaccctacccacttaactgccatttctgatttctccctttacaatcaagaatcaacactgctacccaagctagtggcctatgaaatcaacttcactttcccttttctctcaatctcacatgcaattgtttgtcaagtactgctaattttgtgtcctaagtttctgaaatgcatccctttgtctagatatctcataaacagctcaaattcaaaatattcaaagcttaacttattacttctccctcctggttctcttcatgtgtgttccaggaggatgttatcactatctacccaggtgctaggtatctgggacttgggcatcacccttgttttctcctcttgtgcctcccataaccaggtaaccaccaattcctgatgtttggcttcctattcaatctactcacctctctccattctcattgctattatctttcactttctgtagtagtatacggccttctgtcttcactctctctgaccttttccccactgtgcagccagatctgatcgtgtcagcaacttcccatccccaccccccatttttaatcctttgattcctgatgtttaacccccatgacccagactgcaaaatctagtataggcatcataatccatccagagtaacataatgtactcggcacataacagatactcaataggtattaacctgtgctcaccgcctgattattggttatttacagcagataaatccgtgaggtgctctccgtgcgctgtacctctggaggcacagggtaacatacggctcattgttgttatgagctggaggccttaaatgaaagctataagacgttaactgcgcataatagtaccaatgaattccgtagtcagtacagaaaaggatgcatatcccaagatatcttcatgatggggccttaaaacaaaagtcaccctcatggctctgcactttttttttttttttttagacaggctttggctctgtcgcccaggctggagtgcagtactggcgggatctcggctcactgcaacctccacctcctgggttcaagcgattctcctgcctcagcctcccgagtagctgggattacaggcgcccaccaccacgcacggctaatttttgctgttgtcgtattttttgtaaagatgaggtttcaccatgtttttaaaaggacttggtcttgaactcataaccaaaaatacataacctcgaactcttgggctcaagtgatcctcccgccttggcctcccaaagtgctgggattacaggcgcgagccaccgagcgcggcccatacgggaaaacgtcaaagcctgacaggtgtgacaaataatgggcccctaggcaggctggggctggcgcgtgcctgtgcgcgtgcgcggggcgcggggtttttaacaccgcgcagccttcccggcggcccccgaggaaggcgggacagggcctattcccgcggtttggtccggccattggcgggcggtttgaatgacggaagtgacggcggctcggcgatggctctcccgcaggcgcagaaacggctgctgggcagctgatgggcaggagcttaccaggctggcttgctctgagctgcggttactgtgtccaggccccgggttctcaggtgagtcagggatgcactggcttcccagtcgccccgtaggagcatgactccccgaggcccaagagctgggattgtattccggag

SEQ ID NO: 8097 - DNA, 2300 bp, Homo sapien
taattccgtgagccagtatttcttctcagataaatactttctcaggccaggtgcagtggctcatatctgtcatcccagtactttgggaggcttaggcgggcggatcacctgaggtcaggagtttgagaccagcctggccaacatggtgaaatcccatctctactaaaaatacaaaaagtatctgggcgtggtggtacgcacccacaattccagctactcagaaggctgagacaggagaatcgcttgaacccaagaggtggaggttgcagtcagccaagattgtgccactgcattcgcctgggcgacaagagcgaaactatctcaaaaaaaaagaaaaaaagaaaaaaagaaaaatttctcatcaatagtctagaacagtattgttcagtagcactttctgtgatgatggaaatgttttatatctatgtacagtatgtacctgttagccacatgggctgttgaataaaatagtgtaactgaggaactaaattttaagttttatttaattttaattaaatttaagtagtcacataaagctagtaaccactctatggacagtacagttgtagatgtactacagaactgtaaacagtctaaattcaggggctcctatgagtaagggaaagtaaggaagaggaactgtctgggaactcagttgaagccactgttgcctaactaggaataggtaaagaatcaggtcaaaacattttttattttgaaaacaagatcattgttcattatctctagtagaagtgctgctctttatataagaaaacaacgtgcattcctttttttacttattcagtaaatacttgtctgtttatcagggactgtagagtagtccctgcttatccacagtgtatatgttccaggacccctagtggatgcttaatagtaccaaactgtggataatattgattcctgtatatactatgggtgaatttatttttccttctttataattccactgatagaagatttacttttaccatagatcttagcaatcagcgtataattttttttctttccttattgagaactttcagcttttcactaaaaggaagcactttacagcctctctttgacatatcaaaattgccagcattactactcttatgctgtggagccactgtgaagtaaaataagggttatttgaacacaagcactgtgatgctgcaacaggcaagtttttgtaaccaagatggctactaagtaacaaatggcctggtccagtttacagcatggatatgctggacaaagagattattgatgttttcagcagtacagagtaggacagtgcaagatttcatcacactacttagaatagtgcataatttaaaacttatgaattatttctggaattttctatttaagattttctggctgctgttgaccctgagtaattaaaccacaaaagctaaattgcagataggaggggactaaggtgctggatttggcaggctagttttgtcctcatgaaactcatagttactcaaacatgttcatattacttagagtgtgagtgtgcttgtatagtattagagtttatgtgttatctttctgccattttcttctgttccatgcctgacaaaaaagacacagaatgttgttcattgcttctagataactatccctcttaatgagcatggttaagaagtcaaagtattttaggaggccttgatatttaatttctttagtcattatttatactattaaatgtgtgaacatagaatttggctgtacatcatttgctacttcaaggtagttcttcagtggtgatcagggtttcactgtgctctcagaaagtagaaatagttaatgtatttattctttcttttccttctgcctttttttacttctatccctttttctctttttcccatttcccatcttttactcccatcctcagtctgtcagtgataacaacagagataaagcatcaacacttacttctttgaaaattggtacccttggtgaagaaacctaatttcttttaaatggaacgtgtgttatctttgcctttgtatgagtttgttgttaatagatcaatagtattttgttacctagataatggaaatagaagagcagaagcaaaagcaattggaattacttgaacaaattgaacagcagaaattaagattagaaactgactgcttcagggctcagctggaagaagaaaaaagaaaaaaaactcaaccgactggggtaggatgcagaaaatctcatcactacataaatcatttggtaaggggggcaagaaaatatgagcacttgtagcgtttagaaaagtaaaatggatg

SEQ ID NO: 8098 - DNA, 2300 bp, Homo sapien
gtctcatcatagcctttaccatacttcttagggtaatacttctatcatcatattacatgcaagtaatttaaaaagggaaatagcgctgaaaggtataacataaaacagcagttcttcctgcccctacacaccctttaataccactcactagaggcagttacttttcaagtattttaagtatttcttcttgtatttacttccatagttgcagtgggtttaagcaaaaattaagctaaattgtcattatggtgatacatagaccttttttgctgcggagtccattagtatattatgttattatattttatttttctaaactttttttcatgtagtaaattgtcttatttatttaatttgcttaaagtttttagagtgtctgtctttccactctctactacttcagttaaatacctctcaatataatgtagtttgtactattttctctttttgtggaacaccttttagttggaagttgtatgggccgtgctatgcattcttaacaagggtgttttttcccccagagggataaaaattggttcttggggaggtgaaaaaaaacttttactatttatatgtacaaagcacaaatatgcataaatagatatacagtatatttgtggttattaaaactgaacgggggtagaggcagtttaaaaaggaaaagtctaaaaagactccttaagggatgataaaaataaggttgagaaatactgatctatattgatctttccattttttcttctctttctttttctttgggttttgttttgtgggctaattttcttaattttgtgttctgacttttcttttgaacttttgatgatcaaattgtagtttctaaaaggttactctttttctctgattattttctttttttatagcatcctgctattgtttcatggatgcagaatgttgtctactttaaatatttacagtggattttttggtttgggtttttacattttttagttctttcatttttttgttgtctctgtcttatactttagaacctttcctctaatgtcttcatatttgaacgggatgctaaaaggccaattggaggttctcttggggtgaggggctatatgtgctgttggactttattggaaaaagtatggctttgtagtgaggacgctcaccttagtatctgtagttccattccttgagagaagtttagtttcttcaaagaaataccttttaagcttgatataagcctggctgttgatattattgagccagacctaggagatctggattgaggatgcagactttaacaccctctgatttccttatggcattctgtcacccccttccactcttgcctgctttctgtgcctgatcccctggaccccagagtgtatcagattcgttttctccagagaataaacctttagtttcctctggggatgatgttgatggacagggatctcaggagagggataactcttccaagtgcatagtcttaaatgttctgtttttagtttcctgctgcatgtattccttttgtagtagtgcctagcgcccttaattcccaatttttggggcgatgctttatcaaaatataaccttcaaagaggtgcacaaatcatgtttgtttcatgtaaacaccaccaggtcaagaagtggaacattagagaacccagtaaacacttctcttttaccttcccagttatcatcccctgtcttctaaaccatatcttgattcctataccacaaattagttgtggttatttttgaactttatatataaattatgaatgcatgttataatggctggtaaattctccacgaattttctttgtgattagtcaatactgaggcataatctgatgtggtgaggtagcagcatcattaaaagcttagtaaaattgaatacaaataatataaaagcttgactgtgaaaggtaaggaattattgctatatacagtaagtctttaagagcttagatttctacccataatataaattggcactttagttctagctattaatagttccagaaattgaagtggaaatattttttcccccccaggtaaaccaggtatttatgaagacagagaccccctgcgagtctcaataagccgagaacaaagtttctttgggagcccactggcccatgatccgtttagttgtcttcaactggttggccaagagaatgtctgtggtgatgactatgatgaagcaggtgagaaataaatggaaagtggaattgtatgcacaaggatatgtggacaaaagatatttattattttgttatttgtaatggtgaaaaatggtaaataaacttagttactgctgt

SEQ ID NO: 8099 - DNA, 2300 bp, Homo sapien
aggtggaggttgcagtgagtcgagattgcgccactgcattccagcctgggtgacagagcgagagtctgcctcaaaaaaaaaaaaaaaaactgtctctaaaaaaatgaaataaaataatagaaggcactaaaaggtacagtacaagtaaaaattactccttgtgctaccattaataaacaaccactggttacattttggtgtggttttttgagacggggtctggctctgttgcagaggctggagtgtggtggcacattctcggttcattacaacctccgcctcccaggctcaagcaagccaccctcccacctcagtctcctgagtagctgcgactacaggtgcctgccactgccccaggctaatgtttgtaatttttgtagagatgaggtttcactgtgttgcctaggctggtctcgaactcctgcactcaagcgatccacctgcctcagcctcccaaagtgctatgattacaggtgtaagccaccgcacctggccctggtgttttctttattgtctcttttatatgcatgttttcgcatctttaggaccacactgtgtttatgatttaatattcttgcttttccacttaaaacagtggcaaaagcatttctcatcacactggttcttttctaggttttagacctaatattcaaatttcttaaagcattttattcataaaataacaatagctacagttttccaggaaaaagtatattgtgctgactagtgaatgtttttaacaaatacggtgaattttttctttgatctaagacaagacaactttaagaagcaaaatgagaaagtagattgtaggaaagcagggaatggtgtcctgtggtgctaagaatttgatttgtcttatcccaactatatttttctcccatcttgaactccaaaatccatttttcagttaagctgaaggaatctgttgttgaaaatcatgcagtgttaagttatgctgtggaggaagaacatgcatatttgggtccaactgtgaagccagatgataaggttagtaatgtcttaatgttcactcgatttttagagctgtttggcttcgtattctcttttgtttagtttacagaagctatgttataacattaaagtcagtgctttctgagatctgcttttagtgaagtggatcaatgatgaaactagccaaatctgagcatcagaagtctttccagtctacctgatgcatgatctctacagttctgagaagcaaaactataaaacaatgtaaaacaataagggcatatgtctggtgtgtgtgtgtgtgtgtgtgtgtgtgtgtgtgtgtacgcacatgtgtttataaagataacagctgtaggaatgaatgagattgagggtgggggggtgcgtatgtatgtctatgaaagcctaatcatttctgggcaatgatgaaaaggttttactactgatctttgtaactatgatggtttctacacttgacctgagctcagaagtgacaactgctggggttggtgatttggggttttcttacatactacttgctacattgtggtatgatattccccttaatttctaggctaaaacactgtcttatgaaccattatcttcagcaactgtttccactgggagccttttaagttatgaaaacacagatttgagccttacagatccaggtaataaggtcaaaatgtttataaataagttgaaagaccggcaccagttgagttgcaatacagtgatggaaggaagcattgggttttcatgatacaccatggggaactatttctctaaatctcacaagtaaagtatggccaggcgtggtgcctcacgcctgtaatcccagcaccttgaggtgggaggatcgcttgagcccaaaagtttgagaccatcctgggcaacgtggtagaaccctatctctacaaaaaaatacaaaagttagccaggtgtggtggtaagtgcctgtagtcccagctactcaggaggctgaggtgaggggatcgcttgagcctgggaggtcaaggctgcaatgagccacaatcacgccactgcactccagcctgagcaacatagtgaaaccctgtctcaaaaaaaaaaaaagtaaaatattcacacccagcaaaacattggcgcatatggtattctaaatattactggaagtaacagggatgctctgtagatccccaacaatacttttgagaagcagttgctgatatatttttccattcagtggaaacctatccgagcaaatttcatggttgcactgatctcttaacaatatgtattaccatgcttctccactaaaatatgtctgtaaggaagtaccc

SEQ ID NO: 8100 - DNA, 2300 bp, Homo sapien
aaatgagatagtgcacataaagcacaatgtctggcccatagtaacactgaatacagtgagcctttttccttttttaagcttatactgaagcagtggttacatatgtcctgttgatcctcattagcctcataaggctgtggaaatggaaattcgtatttgtcaaaagtttgttcatacctgtaatcgtagcactttgggaggctgaggcaggaggattgcttgagcccaggatttcaagaccagcctgggcaacactgagaccccatctctattttaaaaaaaaattttttaaatttaaaaaaattaaatttctctaaaaataaaacttaaaaagttttggtcactgagaggatccatattttggacctttgaaataatcatgataggacttaactttaaagcatctgctgatcatgggggaaaaactgaagtttttgttacactggagttacctgaaaataagcgtttatgaatatgttcttaatactccttttctagtgtttaccttaaaaataaatttatgatttttttccctcaaaaattctaacagttgaccttgactttccagaattggaacacatttttcctaatttgcatcatcagctgtttaaacccttagaaccacatccagattttgacttatcatcatcatcctctgggatttctccagacaacagagacttttaccaggtatattaaagtagatgtcccattgcagtgaatatctaaaaatagttttaagccatttcttctactggaacaaaagttcttctaaacccttacctagaatcacatggaagtctgggcacagtggctcacacctgtaatcccagcactttgagagcccaaggcgggcagattacttgaggccaagagttcgagaccagcctggccaacatggcaaaaccctgtctctactgaaaatacaaaaattagccaggtgtcgtggtgcgcacctgtagtcccagctactcgggaggctgaggtgggaggaccacttgagcccaggaggtggaggctgcagtgagctgagatcgtgccactacactccagtctgggtgacagagccagaccctgtctttaaaaaaagaaacaaacaaacaaacaaaaagaatcacatggaaaacttaaataaaaaataaaaataaatcctattgtccagactacaccctagaccaattaaagcagagtttctgggagtgctcagatagtactaattattattattattttttaagctccccaagtgattctaatgtggaaccaactttgaaaacagctgcattgggccgggtgcggtggctcatgcctgtaatcccagcactttgggagtctgaggcaggtggattgcttgaggccaggagtttgagatcagcctggccaacatggtgaaatcccatctctactaaaaaacacaaaaattagttgggtgtgatggcatgcctgtagtcccagctactcgggaggctgagaaccgcttgaacctgggaggcagaggttgcagtgagccgagatcgtgccactgcactccagcctggacaacatagtgagaccccatctcaaaaaaaaaaaaaggaaaacagctacattagaattttgtttgtcccatccacctgtctccacctagggagtatgatgccataaaaggcttaataacaacttttagttgtggaacatatttaaacagtaaagtaaatacaattttgcaaaatttaaagtatcctcctacacagtcaaaggagctgagatttaaacctgagtctttttgcttccacttcctgatggcctgacattttaaagtctctttcatattgattgaaaagaactggatttgaaaaagcaaatcattgctgtcatagtgaagtgataattaaggaagagtaataccaaaggaacacaatgattattgtttcaattgttaatacctaatcagtatttcagcctttcccttttgtttcctgccagagatcagattcttcatctgaaagccactgtgctactggattatccaaaagtacagtttatttcacagcactgaggaggaccagcatgcattcttctcttaacacaagtccgaatcaacaacctgacactaacttggctcatgttggagctcacagttttgctacagaaaatattattgggggtatgtatgactaagttagaaaaagttaatttttccatgattttttacatccatttccttagaaattaagcctagcacctcttggtttgtcttcacccctgctctcacccctatcctgggtgttaaaaaatatttaaattacagaagtaataca

SEQ ID NO: 8101 - DNA, 2300 bp, Homo sapien
tttttatgtgctgtatattgactgaaacattgtaatgtggtatacattactgtgtcttggatcaggtgtcaaaatgtaactgtactttgtacaattcaacttctaggaccctaaagtaaattggttgaagaaattagatcccaaagattcttggtaagttaattcattacttaaaaggccatgcaggttattttgttgaatactagcttttctccaaatgttattttaggttatttatttatctagcaatgctattgcaacatctatcaccacttaggagtaaaaaaaaggactaggcttacgttattatgtgtttaaacttcattattaacgatgttatgatgatgggcgaaatgttcaactgctctgaaggggctgaatgaaaatggcctttctgaacatccatttacattaaatattgcattgtatttcagaagattataaaagctcaaaggtaaaagttaccagaaacatgatcatagagcaaattcggatatgaatgggcatgggatcattgatttttaaaaatacctattagtttaaatagctattttaagcatagaattttcaataccttacttggggtgccgggtttcaggatactttggaacctaagcaacctcattcttgaaagatagatttatgtacttaatagtaaatataaatttgaaatacacatttttccacaggtgaattttgaagtcttcatcagtatatccatattaaaacgagatgacagaagccaaagtaattatggcaagtaatggtttttatcttaactataagttatttgctcaagggtgtaatggtcattaccaaggcttttagaatgcagtttctcatttgctgtggacatgaccataaaaaaatttcccagtaggttttctatctgctactttgctagcaatcagcttattgggaacagttgattaactgtaatagaaatgcaatacaaataaaatgtgaaccacatgtgatttttctttaaaatcagtgagatttgaaaattctcctagatctcttgaatcatgcaaatttgctttgcctttatattgtaacccttgtgggttgctaataaccaagcagtttgtagtagagttaactcaggctcgttctagggactcattcatgttcactcactgtacactcatctctggaaatgtaaaatttacttttatactattgttatgtagggctgacaggacaactggatcagtttcattaaaaaggtatgtatgcattagaaaagacatttgtatgggtcatttcaaagagggcttatgaggctgtgaaacccagagctcttaacgctgtgaccaaagatggaagttctctataggaagccatagcactcctaatgtttggtgctatgttttcctgaggagatataaaacgtaataatccaggattgttgccatgtgagagttttaaaggttaatcaaaatttctcttcttcagggcaaacttgaagataaatcttttgactccagctctttagaggatctaaagtgaccttgatggacagtggaagaaatcacaacatggaattcctcgaataacaatttattgactttaaataattttgtctaatgctacatatacacaattaaaaaacctttacactatttctagaaagtcagcatgtatttttggctcgaagtttctctagtgttttctgtggaaggaataaaaatttgagtttcagttgtgtacttcatgcttgaaaaattaagtccttctccctcagttatactcaccttatggaattcttttgcccttgctctgttttgggcataagcttcttgttttgttttttcttccttttgttgtttcacttcagctagttgattgtataacctgtaaagaatttatatagaattagagacaaacactgcaaaaagtgaatcactaaaaaaaaaaaaaaaattaaccctaccttagacccctttggtgccttagagcctgtgtagtctttctgtcttcaggaaaagatgctctgactttattcacgccctttagacgactcacagatgaacctgaggaaagaaaagtgaaatcaagttgtaaacacaaggctttaaacatttcagggagttggttgaagattttaaaaattcaacatacttatagatggtttctctttaactgttttgatttgagaattttcagagacatgaattttattccttatttctttctgcctctggtgggatctctccataaatgattttttcctctttataaatgcttcttgtaagctccctggtacaggtgtaagcctgcgaggggtttctgctggg

SEQ ID NO: 8102 - DNA, 2300 bp, Homo sapien
ctgaatcttgacttgtatctcttaatataactacactttgccatatttaaaagatagtgctccaaggctctttgtataaaatcctttgatcttatcccatctcaggtctttaaacacaaccctaaaactcagtggggataataaaagctcacataacttgaaattacttttgcagtaacctaaactaaaaccacacatgccttatgttcagtggatatattcttaaggcctagatgtttctaagccaattatctgaaaaatacgctaatacttaggagtagacttttttaaatatttgagagttgtatgttgaatgaattcagaattaatttatgatcccttgccagaacctgaaattttatttgggaggattaatacatgttaatctcttcagttaatctcttaagtttaaggtgattatagtaaacattagaaatcttattcctgtttttacattttaaaatgcctttagtaagtcccagacatgacaagatatgtacttcacttttccatgttaccagcttaggtaaattcataattgtaatgtgaattttaataatcagcatttgataagtccacaagtggggagtagttaagatagcaaattcagagtctttgctaagggggggcattgccctttttgaacataggcacctgctgggtcttaaaaataaaatctcgacatacttatggtgtttttaatatatagcaagctgttgcaagaggattttttaactatattgaaaaactgaagtatgaacaccacctgaaagaatcattgaagcaaatgaatgttggtgaagatttagaaaatgaagattttgacagtcgtagatacaaatttttggatgatgatggatccatttctcctattgaggagtcaacgtaagtggaatcatatgaaatactttggtaataggttataaattaaatttctatgttaattgcttcatattttgcctttaatatagttatacttaaataatgaacaaagatacagagtatgacaattgggattattacagttgagccaagcttggcacaccgttcatctagaattctccagaacacaaaattctcaaattttgtgtttcctttgactagtattgcagtttcagttatatttcagagtggaatatacaactaattaggtcatcgaagattctgtcatctcgatgataaattttaatattacagagcagaggatgaggatgcaacacatcttgaagataacgaatgtgatatcaaattggcagtaagtgacttatttttttcctattccattttgggaaggcaggagttggttgatacagaaggaattatatttagtttttctcttacacttcatttaacttttgaaaagctctataagtttactgcaggaaatgcaagaaggaaaataattttttagagacttgataaagaacatggggttttcagtactatttttaataagtagcattctgatacatattattgctagttaggatgtcaaatgaaaaaataagcaatgttaatttggatttttaacatctacatgtagtctctaggttatctgaagtaatccagggcattcagctatatgtaattactaaactatttgagttattgcttaatccatgattttttgtttgttttatgcagggggatagtttcatagtaagttctgaattccctgtaagactgagtgtatacttagaagaagaggatattactgaagaagctgctttgtctaaaaagagagctacaaaagccaaaaatactggacagagaggcctgaaaatgtgacaggatcatgaatgtcaaaggtgaagcatatagaaaaaacgacttcatagaaatgaataaagataaatgtggatatatgtaccagtctggtggtgaagaaattctgaaacccagaactttataacaagaaaaaaaatttttaaccctgtgaagaagtttgtgaaagaaacttgtgaagtagtaataattagaaaaaaaaccattaaaacaccagagaaaatacatagaaaaatttgagaaattgtcatttgatttctgaataagagcttacaggtgtcctgtgagtattgaaacaatgaaatgtagtgattttaattttgaaaagaaaatcttaaagtaacttgacacccaaccatcttgaagaggggatttgaaatgctgtaattttatcccagctttgttcagccatgacaagtgacctgtcagatgcttagtattgtaataacctcatttccctttccaaatttagagtatctttaatactattttttttagacagagtctcgatctgt

SEQ ID NO: 8103 - DNA, 2300 bp, Homo sapien
taccctctaaatgtattcaacgcaacaagattccaaaaaagtaccgtcccttccaacaaaagcatctttcaatataagtaaaaaatgtagttttatcattagccacatattttaacgtacaattaccaatacagtattaatgtacaattaaaagccgttttccaagatcaaagggggaattcctaaagcaaagtgtgccctatataaaccaggaaaaggatctccaatcaataaaccattttaaactcctaatcacctctccattataattcctagattcttcattcctagattcatttaagcaactgaactttgtcatattgtatctttgccattattggtggaaactgacaagttctgaattctcaacctttttcaatgaactatcataattcttgtgtcttcatccccatggtagagagtatacaacataccaaaaaaaaaaaaaaaaaaaaagaaaaagattccttcttgtgagctaaaagaaaaaagaaaaacaggttggtctgggtggctcaggcctgtgtaacacagcactttgggaggtcgaggcgggcggatcgcttgagcccaggagctcaagaccaacctgggcaacgtggtgaaactccgtctctacaaaaaatacggaaattagccagaatagtggcgcgcgcctgtggtcaggaggctggggtaggtggaatacctgagcctgggaggtggagcttgtatgtagtgagcctcagcaacacaaggagacccttgtctctacaaaaaattcttaaaatactggctaggtgtgttggcccgtgcctttgctcccagccactcgggaggatcgcttaagccgcggtggaggttgctgttagccgagattgcaccactgcactccagcctggacgacagagcaagaccctgtctcaggaaaaaaaaaaaaaaaaaaaaaaaaaaaaaaaaaggcatggcaacaaaaattaaagataactacttatttcattattgtacatgccttagtcaatctcttgtctcattctgtagcttcttgggacctgacatgagtcattacatataaatcctaggatgaactagcaaaatatttaaaatatgaaacgataaggtcaccaagagctcagatttgttaaatgccccctgtggtattttcctggtacaaggtcttactagtttttttaagtacaagattctacaaagtcattaaatatcgaatgctcaaaaacggaattcaacaaaaatttgcccccatgctttaacggtatacctgtagttaattttttttaaaagtagggattatcaaaataaagctagctcaataatcactttttcgaagtgtttagaagacactcctacttgggtgtcgatgcctccgtggggattctgcaattcttagaggccacgtgggcagagagcggcgctttacccggagctaacgctgtgaccaccagcgcctctcacccggcagcgcctaacctgcagaaaaccggcgcgagtaatgggtacctcacatacgaaggttaaatcatttaaatcacgtaataaggttaaacttgtccgcaacacgatttaacacctccatctcaagatataatgaagcccgtccacactacaaccacgtttgtgtgggactcataccagccgcgtggcgcggagtggcctgcggccgtgatcccttcaccctctcggaccgacttcggagtctcgatcctccggaccaacgaaggggccccgggaaaccccagatatgcaacgcctcccccgcccgccaggcccggacggcctcgccctcttagcaacctacctaaaacggcctcgcagtggccccaaccgcgcacttgctgcttgtaacccaggcctcggcccaaaacccgcgactggcctggtgtcctagagctctgtacacaccaccctcccgacctcagccctccaactcccgataaccagccgacctcctccaaccgtgcggaagaaaagggttggctatttccgtggcccaagtaatagtcaggccgaaatctcgcgatacaacttagcttccgggaagaaggcgagcggtgggaggagacgcgacgtgggggcgccatttttctcgccgcgcagggaggactgactaacgtgggcggagctctagctcgcgtattctgaggaggcggggttggcctaggcgaagatccggactctgggtgttttgctaccgtgaccgtttaggtgagtggaatagccaagaacatttcggcaaataacaaaaacaaaacgtgcggtcacttgtgagtggatgagaactgtgaggaaacagcctctcagcc

SEQ ID NO: 8104 - DNA, 2300 bp, Homo sapien
aaaaaaaaaaaaaaaaaaaaaaaaaaaaaggcatggcaacaaaaattaaagataactacttatttcattattgtacatgccttagtcaatctcttgtctcattctgtagcttcttgggacctgacatgagtcattacatataaatcctaggatgaactagcaaaatatttaaaatatgaaacgataaggtcaccaagagctcagatttgttaaatgccccctgtggtattttcctggtacaaggtcttactagtttttttaagtacaagattctacaaagtcattaaatatcgaatgctcaaaaacggaattcaacaaaaatttgcccccatgctttaacggtatacctgtagttaattttttttaaaagtagggattatcaaaataaagctagctcaataatcactttttcgaagtgtttagaagacactcctacttgggtgtcgatgcctccgtggggattctgcaattcttagaggccacgtgggcagagagcggcgctttacccggagctaacgctgtgaccaccagcgcctctcacccggcagcgcctaacctgcagaaaaccggcgcgagtaatgggtacctcacatacgaaggttaaatcatttaaatcacgtaataaggttaaacttgtccgcaacacgatttaacacctccatctcaagatataatgaagcccgtccacactacaaccacgtttgtgtgggactcataccagccgcgtggcgcggagtggcctgcggccgtgatcccttcaccctctcggaccgacttcggagtctcgatcctccggaccaacgaaggggccccgggaaaccccagatatgcaacgcctcccccgcccgccaggcccggacggcctcgccctcttagcaacctacctaaaacggcctcgcagtggccccaaccgcgcacttgctgcttgtaacccaggcctcggcccaaaacccgcgactggcctggtgtcctagagctctgtacacaccaccctcccgacctcagccctccaactcccgataaccagccgacctcctccaaccgtgcggaagaaaagggttggctatttccgtggcccaagtaatagtcaggccgaaatctcgcgatacaacttagcttccgggaagaaggcgagcggtgggaggagacgcgacgtgggggcgccatttttctcgccgcgcagggaggactgactaacgtgggcggagctctagctcgcgtattctgaggaggcggggttggcctaggcgaagatccggactctgggtgttttgctaccgtgaccgtttaggtgagtggaatagccaagaacatttcggcaaataacaaaaacaaaacgtgcggtcacttgtgagtggatgagaactgtgaggaaacagcctctcagcccggttcgtttccggtggtctcgcgtttgctgagctgtcgcctggctttctaaatctggtcccgggtgtgtggcgagggtgacgggtgggatgtgtgcctgagtgttttgtaatcctttgtctatttctgccttcagaaacccttgtgtgttaaaatattggagaaggctcattctttgaccatgactcgaagtgtgtaacctttgtgctggacgccagtgttattccatagcacgcccaggtctcctccccacttttgcacctgtttcgtaagctcaccctttctgcctcccaggagttggctaacatgtcacaagtgagacctgtggaggatttgtttttcctaagtttcctcctacatcccccctgccccacaccattagttccttgaccggttcctgagttaagattaaacagtgtaaactagtttagttttggtggggtttttttctcccaaagtaatttttttttttttgagaccgagtttcgctcttgttgcccaggctggagtgcaacggtgcgatcttggctcaccgcaacatctgcttcccgggttcaagcgattctcctgcctcagtctccccagtagctgagattacaggcgtgcgccaccatgcccagctaatttttgcatttttagtagaggcgggggtttctccatgttggtcaggctggtctcaaactcccgacctcaggtgatcctcccgcctcggcctcccaaagtaattttaaaaaggaatgaactggtttgatttttccgctttcaaaattctgttttcatatgataaaccacaaaaatcagtaaagctgtctagtcttattttatagttcacattttaggattgaacgggccttaaaagtaatctggtctctttacctgctttgctccatagtttggacaattccggggat

SEQ ID NO: 8105 - DNA, 2300 bp, Homo sapien
aaagcgctcgctccggctccagcatctgctcacccccacgcaccctcccataaagggtggagcgcagcaggcctgggtgactggagttcgtggcttccagcactccagttcccgcctcattcactcgcgccccccctcccgcgaggagttgagagccgtgggctaagtaagtgaggcaccgcagccgcaagacccacgaaggggtcagaggaatatcctgcttcaactgcactccagcctgggtggcagagcaagaccctgtctctataacacaaacagagaaataccaaatgtggccgggcgcggtgattcacgcctgtactcccagcactttgggaggccgaggcagacggatcacttgaggtcaagagttcgagacctgcctggccaacatggtgaaacctggtctctactaaaagtacaaaaattagccggttgtggtggcgggcgcgtgtagtcccagctacttgggaagctgaggtgggtggatctcttgagcccgggaggtgggggttgcagtgagctgagatcgggccacactgcactccagcctgggcgacagagcgagactctgtttctaaaaaaaaaaagaaaaaagaaaaaatacaaaatgaaatgtgaaatttcaatgattctgcattaggagttaaatgttccttccctttaatagcacttttccccttctttttgaacaagggacgctgcattttcattttgcattgagcctcacaaattacacagctaggcttgctgctgaatacggcagtgagggacatgccataccagtcctggagcttcgtcattgcccagaccctgtggatcaaatgcagtgggctgcctaaaggatcggactttttatccccggaattgtccaaactatggagcaaagcaggtaaagagaccagattacttttaaggcccgttcaatcctaaaatgtgaactataaaataagactagacagctttactgatttttgtggtttatcatatgaaaacagaattttgaaagcggaaaaatcaaaccagttcattcctttttaaaattactttgggaggccgaggcgggaggatcacctgaggtcgggagtttgagaccagcctgaccaacatggagaaacccccgcctctactaaaaatgcaaaaattagctgggcatggtggcgcacgcctgtaatctcagctactggggagactgaggcaggagaatcgcttgaacccgggaagcagatgttgcggtgagccaagatcgcaccgttgcactccagcctgggcaacaagagcgaaactcggtctcaaaaaaaaaaaaattactttgggagaaaaaaaccccaccaaaactaaactagtttacactgtttaatcttaactcaggaaccggtcaaggaactaatggtgtggggcaggggggatgtaggaggaaacttaggaaaaacaaatcctccacaggtctcacttgtgacatgttagccaactcctgggaggcagaaagggtgagcttacgaaacaggtgcaaaagtggggaggagacctgggcgtgctatggaataacactggcgtccagcacaaaggttacacacttcgagtcatggtcaaagaatgagccttctccaatattttaacacacaagggtttctgaaggcagaaatagacaaaggattacaaaacactcaggcacacatcccacccgtcaccctcgccacacacccgggaccagatttagaaagccaggcgacagctcagcaaacgcgagaccaccggaaacgaaccgggctgagaggctgtttcctcacagttctcatccactcacaagtgaccgcacgttttgtttttgttatttgccgaaatgttcttggctattccactcacctaaacggtcacggtagcaaaacacccagagtccggatcttcgcctaggccaaccccgcctcctcagaatacgcgagctagagctccgcccacgttagtcagtcctccctgcgcggcgagaaaaatggcgcccccacgtcgcgtctcctcccaccgctcgccttcttcccggaagctaagttgtatcgcgagatttcggcctgactattacttgggccacggaaatagccaacccttttcttccgcacggttggaggaggtcggctggttatcgggagttggagggctgaggtcgggagggtggtgtgtacagagctctaggacaccaggccagtcgcgggttttgggccgaggcctgggttacaagcagcaagtgcgcggttggggccactgcgaggccgttttaggtaggttgctaagagggcgaggccgtc

SEQ ID NO: 8106 - DNA, 2300 bp, Homo sapien
cccgccaccatgcccagctaatttttctatttttagtagagattcaccatgttggccaggctggtctcgaactcctgacttcaggtgatccacccgcctcagcctcccaaagtgctgggattgcaggcgtgagccaccatctgagaatttacattgtaccagagcaaaatattttaaattaaaaaacaagaaacaattttagccaaaaaaaggaaaaccaccccaaaatagattttttttaaagaaataaggcgtcaaagacattctagaaaccttacccaatccaaactttggccccagttctaacccttgcccttgccttgtattgcctttatgccaccaactttataagccatgcttggttatgatgattattagagacacaggtacttaaaataggacaggggttctagccactatgtcttccaatccctgttatttgtaaaactttatgataatggagaagttatatactgttggcattttattattaaattagatgtttgcctgtttttaaggtggcttgtgtttttgttttttggttttttcttaggcatctgtgggaaaactagaattgcagaagttggaggtgtgccttacttattgcctcttgtaaaccaaaaaaaagtaagtacttttactctgcatattcacatgaagattgtagaagttgggttgattactgtgtttattattagaagacctgttgatcagttggcaaggaagtgctaatggatcagtaataaaaggtaaaccagggactttgtacaagttgtgacttaaataatattttttcctcttctataggtttatgatctgaataaaattgcaaaagaaatcaagctgcctggagcctttattcttggagcaggagcaggtccatttcagactctcgggttcaattctgaggtcagcatatataagaaaattattttactttattggtttgacatttggtttgtctttttgcttttagtgccaaaaatcctactttctgagtgaattgtaaatctctctgcaggtttgatactacttgatgtagatttctgctatagcacacactccaactggactaactgtaatggagtactaacttgtagttttagattttcttaggtcatagcttcagccttagataaatgcagggttctatggtattctgttgaaggttctggattataaaatatttatattcttacaggattccgagcttatctataaatctttgctttgggtatgcaggcagctttggattagaagatgaatggaatattagtgatctagtcaactccttcttccacaccaaatagtaggaaactatcacaatagtatgatggttatttatgaaagttaatagttattactagtatatattattaccatatgaaaatattactgtttctttgaatctcatgaatacaagacttcagtctgctcattctctcataacctcttcagatatgaatagtagtcatacaagttctttgcagaaacattagtacaatttgcctagtgttcaagttaggaaaaaaagttaaaaatttaaaataagatatttaacgcaagttatagatacactgtaagaaatccaataaatatcttttttttttttttttttttttttgagatggagtctcgctctgtcgccatgctggagtgcagtggcgcgatcttggctcactgcaacctccacctcccaggttcaagcaattctcttgcctcagcctcttgagtagctgggactacaggtgtgtgccaccacgcccagctaatttttgtatttttagtagagacaggttttcaccatgttggccaggatggtcttgatctcttctcttgacctcgtgatccgccccccttggcctcccaaagtgctgggattacaggcatgagccacagcgcccggcctataaatgttttccaagttttttatgtctaaaattaaatattatgtattttatgttctcttattaggacttgaactaaaatgtcttaaaaggattaaatgttttgtaacattattcaagatattctctttgcagagatacaaagattgactaattgcctcactttcttttcagtttatgccagttattcagacagaaagtgaacacaagcctcctgtaaatggaagttactttgcccatgtgaaccctgcagatggagggtgcctactggagaaatacagtgagaaatgtcatgattttcagtgtgcattactggctaatctttttgccagtgaaggccaacctggcaaggtgattgtgtccataaaaatacaatattccctaaatgttctc

SEQ ID NO: 8107 - DNA, 2300 bp, Homo sapien
ccaaagtggaggattacaggcgtgagccaccgtgcctggccactttgcccctttatgttgggaacaaagaaatcataccaaagatatctggcccaaaagcactggagatatggcatggatacccaaagaactgtgtattcacaccattatattacaaagtactgactggcatgccatttaatgtatttattgattagctccaaatggaacattttggctatgtggcactaacctatgaccatggttacttccaggatagttaggatgatgtttttcaggttatgcttaatcatatatttgagtagtttgtactttgccaaaacctgcaaattttccttatttatgatctcattgggttcatcctgtgtttcattggtatgatcacttagcttccatcttcataccacaactgagtgttgaagatgttatttggcatatagaggtcctaaccaattatacccaaaagatagctacataagtattccattattaaacaatagttattcttatggaaaaggccattattacaaaaccgtatggcttttgacatactcaccgaagcccagggaggaacttgcattatcataaaaactgtgtgttatgtctgtatcccagatgaatcagataatatcactacgttaatggataatatgaaaaccttaacaactaacctttcagatccaacacatctttaaacaactggctaagcagctagttttgatcttgaagacttggtggcaaaagctttgcttattctaggaatcataatcatttgttgttgtcttgtttttgtctgcactattagactgccactgcgcctggctattaatcagattttaaaataaagttaaaaaaaatttttaaacaaatttacacgaaaagcaagtacagtggttctcgaacatgattgggcgacagactgtacagcttgccagaaataggtttctctcatgaaaattcaaccccctccacacacggccatctactttcttcttcagcagggactgacaccagggcaaccgtattttcctaaataccttaggaaagtagttcaaaacctagatatatcttggtcagaacaaaacctggcaaacactcatgataaacggtatatataattccttaaacgaaatatagaggtttgtaatataaaataatccatctttgtctgtggaattcctactaatgaaatacgttcttggagacccaaagactgaagttataccacttcttcttaatcttttaaatattatttgcaggccaggcatggtgacacgctcctatagtcccagctcctcaggaggctaaggcaggagcatcgttggagcccaggagctccaggctgtagcgtgctgacagcacttgtgaataacctctgcactcagcctgggcaacatagtgggaccccatcactaataaaaaagcgagatcaacattatttattctgttactcgggcataaaataaatattaagcacttactacatgccagagtctattatgtctgctgcagatattggctgtcatagagttataactaacaggaaaccaaataattacgtagtataattttaagtggtgataagcacgattgtttcccccaagccatgcccttaatttctaactcttcagatagtgtttctttaaaaaatttcttgctaatttaaaataacttttgttttgaggcaggatcccactctgttgcttaggctggaatgcagcggtgagatctcggctcactgcagcctccatctccagggctcaagccattctcccgcctcagccacccgcgtagctggaccacaggcgcgcgccaccagatctcagttctctcaacaggactctcattgctaagatccaaggatccattaatttccttttccttaactcttctagcctctgcagctttctttcctcatccactttttaaacaaacgcaggcttaaaaagcaaggaatatacccgccacactctcggctcccaaaccgctctttccctccctctgccggccacgcctcttataggcccggaagtttaccccaccctgcaccgtgattcaccggaagcgctctagggaaccctggagcttccgcgcctgcccagttttgctccgaaagacttaccgaggagggagcttgcggtgcgttctgggaaagttgctgggccagctcctttgtttccagtctgagcgttgcgttcggtttcccgagggtcttctgaggcaccgcggctgcgggcttctgagttcccggctctccgcagggaagcctcctcttcgtacctcgttttttggctcgtggg

SEQ ID NO: 8108 - DNA, 2300 bp, Homo sapien
taataatcctgtgttttgcaacattttgcttcatccagtaaccattttctgagccgctgataaattttaagaactgagttatgcatggggtttaaataagcacttgtgaattcattatatttcccaggcattctttacatcaacaaaatttactgagcatgcactatacatcagactccatatttgttcaaaatagtgaacttctatagttacttcattagttgagatggggcacttactcatgcctgttttgcaaagcagtagcttaatgtagcattttaggattttcttagagagttctagtgaacataaaggaaatagtcaacctacatatcccaccttattcattgacatatcttctccttctattgcttctctgtctctcagaattgttctaaccaaggtatcctcaatatagtcataaaatcataagaggaatagaaggagctgaagatcatctaacgtctccattttacagaagagaaactgaggtcaagagactatcaatgacttgcctaaggtcaaagtgataattaatgccagagagtttcctgagagaagtcccatagcaaataaatgtaaatttggctgtgtttgattcctaggcacatcaaggcatgattgtcagtacattgattatttccattgtattgcatgccttcttttttccttctagtggtattttggcaaccttatgtgtagtgattcttggaaaatattttaggaggaaaggaagtaagggagagaaggaaaggggaaggcagggaggcagagaaaacaatgaaggatggagtcaatgaagacataaattcaaatcattgctgtgaccagttgtaatgcatatcctttacaaaatgggagtgatgatctcaaatattgcagaaaactactaattgtgattacttaagactcacctgcccaaataattcctcttactctgtatttattcttttgaagtgaaaatgtccaacaaaatgaaatgaattacataagcaaacatagattacatgtatcataaaaagaagcctgtccaggcacaatggctcatgcctataatcccagcactttgagaagcaggtgtgggaggattgcttgaggccagaagttcaaaaccagcctgggcaacataggtagatccgttatctacaaaaaattcaaacaaacaacaaaaaaaatcagctgggcatagtggcacatgcctgtggtcccacctacttgtgatgctgaggtcagaggattgcattagcccgggagtttgaggctgcagtgaactaagtgccactgcaccccagcctgggtgacagagcaagaccctgtctcaaaaaacaaaaacaaaaaaccctagcctgtatgctgaagtagatgtgtgtttgcaaacaatccttcaagactggaaaagggtggggtattgtggcacacgcctgtaatcccagcactttgggaggccaaggtgggaggatcacttgaggccaggagttcaagaccagcctggccaacatggcaaaacctgtctctactaaaaatacaaaaattagctggtcatggtggtgggcacctgtaatctcagctactggggaggctgaggcacaagaatcttttgaacccaggagacagaggttgcagtgagctgagattgtgccactgcacttcagcctgggtgtgacagagcgagactccatctcaaaagaaaaaaaagagagagagactggaaaaagagacctaatcaagtaaaggaaaaaatttaattaaaaaaatctagactatggaagataattaatatgtacaagttttattgatcaatttatttaaatttactaaaataatttagaattaattgtgctgcctaagtcatcaggcatttcagcaacaattgcttttaactcagttcgaacttaagaagggatattgtgactttttaaagccctgaatcaagttcttttctgaacttggtcaactcccagctgccatttagatggttttaaagtattcggtcctggatttacgccataaacttaataagattctgctccagcaacatgtagtaaaaactgtttttctcttggctttttaaagtaaacaaacaaacaaacaaaacagttctcataaattccttttaatcaattccttttctttccatcttactacatgcttttgtcacttcattaagtagatactatgtgccagtttttctgctaggtcctgataactgttaagatgaacaagacagggtttctagttccaaggagcacagaatctggtgaagacagcagatatgccagtgaaggattatgacagaaggt

SEQ ID NO: 8109 - DNA, 2300 bp, Homo sapien
ctgttttcattctgttgggcacccttggtttcccaacagggcaagctgcattggatctggaatttatggagacccctgtataatgccagtacctggaacttcttctcttagagattccaagctaatgagataattggggcgttttcataaaagatctagagcaacacgtggtagcacatgctaatcactgcatgaaaagtgaggagaacaagccctatagacattgaacatgtttttccaaaccaattttttcatcagtcttaacaagaaaccaatatgctacctaagatgagtacttgctgtttactaatggatgttctacttctttgctttccactggaactgcagtttagatgtctctgtgtcatcaattaagaacttgaggcttgggcttcaaaatctttgcctaaggactgcctgagactaggagctccatagtcttttctatgtgaacttttcctagtgtccagtctctgtacattagtatagttgatcaattatgaattactcaaatcaagagatgccttggacacaacttttttttttaatacgctcttcaagaccaaagagaggaggggattgggaaatagccaaatcattttaattcatagaaataggcactcaaagttagagctgcccagaataattttagaaatggagctacttattctagtgctttgatcattactccatgtgtcctatacatttctaaagagcttcacaacagtgttttccagtttatgtttggtgataagcataaatctgtgactgcttaaaagcttagtcatttcaccaattcctgtcccttacctataagtcaagaaggagggtgctcaagagtgggtagagtagactatatgctgcaactcaaacatttccatgttcttctattattattatcattattattagttttgttttcttcttcatgctaccttgtctaagatcctctttgttcttagaggagacaattcctcaactattgaagtgccatgatcaatacataaaaaataggcttcctggaaaaaacaaatgtaggggacagtctttccaagtctgtcttcaaaggtatcttctctgtggtttcatataaagacccttcctcatgtgtcctcatcagtgcctgggtgtgcttggtacccattgaatcaacccattgaatttttgctcatctaaaaggagtaactaggcgatgtttagacaacagagttacatgtatagcaagatagaggatacctctgtacattgtagaaggttaatgaaaggtacactcatccctcacctctaaaaacagaggctactagagaaaggggagaaagatttattgatccaatattttcattgagagttaatatcttcaataattttatctgtcttatgtgattttatggtgagttaagaaatatctatctgatgccaatgcatctagaaaattcaatctaaaaattacataatttttgacagacaggattgtcagtattatgtagaaaaatctaattgattgtttttctgttttctgtttccttttcatttagcataatgtagacctatcattggaaatgagaaacttctttgctcaagggcttaatgaagtaatacatttggctttaataataataacacttacatatttattgcactttagaatttatgaaatcctttagggcaaaatactcatcagaaatatggcttaatttgaaccttgtctaggataatcatcttacaggtaattagttctttttaaactgggctggactaagacagtcattggtgattttccaggacagactgtcttctaataggtgtgaattatatgggagacccagaaaagtcatttcttggtagcaatattgtaagtttctttttttataacaaatgaattttggacagtatctttctctccacagaagtaaatatattcaaagtaatctataccccctggggtctgattttaaactactagacaactggtattttaaaaatccacctaactggttattttgtaataaaatatgcaggtttgctaaaaacagaccatcaccaacaaaaataccgagcaccacactcaatgccgagccatttctcttgcaggtatttttagggtgttttgtgccaccatgccccacctctcgagaggcatgggtcagatctatgaggtcagcagctgtgacaacagggacccttctgagcagcggtacgggatgataagaactttttacatcgccgctgaagaagtagaatgggattatgcccctaacaaaaactgggagttcgaaaagcagcacgtggacgcaagaggg

SEQ ID NO: 8110 - DNA, 2300 bp, Homo sapien
tcctaagaggtacaacctttttacagatgagaaaactgagacacaggagagtcaaagaactccccaagactaatagctagtaactagtgtggctagtattatgggagaatttcacaaagggacctaatctagtctgtctacttagggaaggctttcccagggaagtgacatcaagctgaggccagaagggtgaataaaggtgggccaggcaaagaggccactgtggggagtgttttgggtgggaaggcctggaggaggccaagggcttagctaacttgaagaactgaaaggaaagcagtgaagctggtggtgaggtaggcagaggccatgctaagaaatttgtattttatgctaaaaacaatgtacactttaagtagaaaagatgatccgactggagttttgaaaagctcatcctggcagctgtagaggagaatggagggggaccctgtctcacatatttcctatatgtggttaggagacaggatggtgagttgaattgggtattggcagtgcaggtggaggggtgtcagatttgctatatttaggagagagaagcaagagaatttgaaaattggttatggcagctgtgagaaatggagtgttgaagatggtgctccaggattccgacttgggtgcacaggtggctggtggtacatttagtaagatggggaagatggagttcaggtttaaggggaagatgaagactgaagtcctggccgttatgagtttgaagccctatgagccatctacgcggagagagctgtatacgctcttggatgtgtgtttagcggccaggctggggtggagaggtacatgtgggagttgaggcttgtatctgtggacccacagagaagggagccaagccctgccccaaggagccctcatgtttgcaggtcctgcctgcttcaaatgttactggtgataacctacatgtcacatttgacagggcttccaaactaagccatctaagaaaggtcttatgattcatggcttagatcctgtccctgagtaaaaaatcttactgtgagtccttcaaatccttttgtcagttcctcaaactgctgatgtactgattagtatgtaaaatactgacattgaaaagaacactgacttgtttctgaatcatataaactttgattttcttgtgcacaaaacattttagcctgtatgttgtcatctgcagccagtgactgtaacctgtgtaccataccctccgatgaaaaaaatcccacctctgatataaggggtcctcctcccttttcctaaactttcttctaaaacccttccaacgtgtaacaaattttgaaacatgcccaactttgctggtaagtcttcttgggtggatcctcacatttagcttccaataaatcaaattatttctacttcaacagccttaatttccgtggacactggtcagagtatttcctcctgtctttccatcatccacttcctatgagctgttcagaagcagctctctgcagccccaacacccacctacctgcaggcccccctctctctgctggctcccggaacaaggctctgattgggatggcagaggaaagagaaacgggaccagcagcgctactcaggcctcgaaactccacactcactaccgtttccgcgccaccctctcacgcggagctcctggaagggtccagcgctccctctgcaaggcaccgtcggtctacaccgctcgattggccttttatggcactgactgttctttgaagcttttgcagctccttctaacccgatttcaccgtgttggaaatgttgggggtggggcgtaaagggggccatcccatccacagaaagagtcgcttgcagaaatgattttaaaactcccgggtgccaggacgtgaggagaatccggcagggagggacgggagaatttccaaaggtgccgctcagtgggaaaatccctttgtcagagagtggcccgaggggcgcggaatgcagccgcgcccaccccgccccgcgtcaccgcgtcttccggaagctccacgcccctgggtacttggtttccccgcatggttccggaagagcgcggcgcagctggctgtgagcgcagggctatcccggcggccgcttcggcagccagggcggcgcggaggggcagggccagagggaagcgctttgttccgcgcgtggttcccgcgcctgggggtgcgcgggagaggcgcgaatccgagtgccgcgcgcggcccggggacttgcacgggcgtgcggggtggaaccgcaggaagcggagctctcgggttcccgccccgccccgccccgccggcggcggaggcagcgag

SEQ ID NO: 8111 - DNA, 2300 bp, Homo sapien
gtacttggaagagagtgcttggaagggcactggctacctttgatttctttctctgagcttgacgctgactattcctcttctatccatacactctttgttgacactgggcacagtcaattgactaggattctgttttctaaatgaccatcatattccggccttgcctctcaagatgatgccaggtcatcttgatggagcagcaagtctacctaagcttttttctttttgagacggagtctcgctctgtcgcccaggctggagtgcagtggcgcgatctcggctcactgcaagctccgcctcccgggttcacgccattctcctgcctcagcctcctgagtagctgggactacaggcgcttgccaccacgcccagctaattttttgtatttttagtagagatggggtttcaccgtgttagccaggatggtctcggtctcctacctcgtggatccgcccgcctcgacctcccaaagtgctgggattgcaggcgtgagccaccgcgcccggcccccaagctttcagtgtttacaggcagtctcttggtttatttcctggagctaaagatgtattatttcatcggcctagcaccttgtcccttctaggatctgtcacataatcccctatttcagccatttaatcctgtgagacctgccaggtccttcagtataattgagggttatctgctagccatcctttcctccagacacagttgcttgaagagtacatgtgaagtggaaaactggagacaagagtaatacctaggtttgagtcattgtttgggtcccagcccaaggacattgctccccagggcacgttgacacaatgtaaagaatctacatggtgtttcctgttgggggtcaggggtggttaccagtagtcaaccagatattgcatgtcttgcaccagagggcaatgcagtgagagatgtatacaggggtctctgaaaacctcacatttaggaaaagaaagccttttaaccaaggccaaaaatgttaaatggcttgcccaagatttcacagctaggaagtgacaaagctgggattaaaccctaattacagagcccatggtctttactacaggcttgtgggtggcagaggacccagtgactgggagagttttcacagtggaagtgaaaacgggtgagcaggatagcaaggtttcctgaagaagtagatggggaaggaaaaacagcatgggtcataatatcccttaaagatatagcttcaaggacttccatggcagaaaaattcaagttacccaagaggtgagcacacagctaaacttctcttttccttcgcttctttgatggtatccgaactgctttgaagagtttccttgaaaaacaaagctccccagattgcattcctgggggctgtcaaagaaactgtaatcctttaataagccctccagcacctctggtatctggatactccggggacttggagaatccttaacgtctctattttttggtttgcctttttcctgggaccgccgggacgcagcgatccatttcgatattgaaactgtgccaaggctaaggcttaggtggaaacaaatggaatatatccttgtcactgacccggctttgccagcatgccccctcatcatcccaagtgcccctgtgggcttcctcccacctgcctgccctgcttcctttacaagaggctaagccgacaccacgcgagtgtgtacgcgctggggactgagcccccgaagcgaagccctgtcggaggagtttcaggcgggagtgggaacggctgggcgtggggtcagcaacggcgccacccggtagggtggggggagccaggcttgtcagagccagagcgcgtcaccgtcgccgcgagagacgccgcgctgcccaataggcagaggcgctccctagcagcctggtgggagcagagatataaaagtgctccaacaaacccggagctggcgtgccgaccgcgggctggtggcgggcggcgcggtgctccgcgcgtccgggctccctggctcctcgggacggccttgtatgctgtgcgccccgcaccccggctgcgcgctccgatcccagcgggaggggacgcccggcccgcaggctcccaggggaggggtggctcctgcaaaatggtccctcacctcttgctgctctgtctcctccccttggtgcgagccaccgagccccacgagggccgggccgacgagcagagcgcggaggcggccctggccgtgcccaatgcctcgcacttcttctcttggaacaactacaccttctccgactggcagaactttgtgggcaggaggcgctacggcgctgagtcc

SEQ ID NO: 8112 - DNA, 2300 bp, Homo sapien
ggtaggtcagatacttttcaaatcataatactacatgtttctgtagcaatttatgaagtattttctcatgaattctctcatttaagcctcaaaattaatctgaaaaaggtataattattccaattataccaatggcaaaattgaggcaaggctcagagaactgctgacttgcccaaggtcacacagctagtagggtccaaggacttgaaactagggtaaaagactccaagtctaaagtctttcccacataactttttttttttacgatctcggctcactgcaacctccgcctctcgggttcaaatgatactcctgcctcagcctcctgagtagctgggattacaggcatgcgccaccacgcctggctaattttgtatttttagtagagacggggtttcaccatgttggtcaggctggtctccaaatcctgacctcagatgatcccgctagcctcggcctcccaaagtgcacataacttttacagtccttttatttattcccattccattcaaattcatttccagcttatttaatactagaggaatttactctaaaaatcttaaacagaactgcattgactaataagaatttgtcaggaaaattcaagaatatttatcacttcaataatttaagatgaagcctaagaacataaacaatactatatcaatatatcaaattactgcaagactccaatctatagctgcatattagcttccagttaacaaacagataaatatttaaaacattccaaataccctttttgatgactaatatttctgttcataaacaggttccttatttactgcttattaaataagttttcttttactgtgatcacagttgacgagctttagaaaccccaaataacaagggattccagaagtcaggtgcttacagtgcatctgcagtactcatttttatggtcagtcaagctcctctgggaccaggttcttctccaagaacccctgggtactgtactcaaatgtcagaaaatgcactcgattccaaattctagaaattctaaaaacaaaattacatcataaaacacattttttaaaagcctgcacgtatttaaccaacatgatttacgctgcacaaggtacagacgtcttaattagactggcaaatttagaagtctcattttcatctaagcacccactatacttttttttaatgaactgagcatagaaaataatatatctccagtgtacatcctgtttcctagtttcaccaagatgattaaactcctattttcctttcccgtgctcttatgggaaattaatgtatgctaaataaatgggcagaaagggtcacatacggttctggttcaacacacaaacaactctagatgtgcagatatttttaagttgcacgcataggttactctggagaacagaggcaatcctgtatttcctattcaaaccccacgattttttttaaaggacctggctagtttggaaaagggaacgggcccgcgtttaaagcgagtgtaaataaacaaacacgtggtctgcggaggaacacctttaagcaccagcaggatgactgaaaatagccaggtttggggaagagtggctgccaccgcgagacaacccccaccacatctggagctccagattccgtcgggattccaagcctcaacacgccctcaccgcagggaacctcggaatcagaacgctgagcccgccaggacccctcccctgcccactcggcccgctcttcccgaggttccagttaactctgggcttccgcctgggaacctgcagaaacaggagacgaatgcgattcctaaattaccccactgctggactcttcgaagccccacaatcgcgacccaaggctgtcttcttttcgggaagaaagggcaggatccgtgaaaagaaaacaacacggtctgaacttgcctctgagaacccgcagggccgtaaacctgaattccgcgggagagaacggcgtccgtttctctcgcgacacttcatggataacgtagatgcttcaagtccagttcggctctcattggctaccgcacgcagtgagggggcggggaaagtagcggcgaggccccgccctcacgcaggagccaatcctgagcaggctaggagacgaacccggaagtgagatgcaaggcggcgattttcccttctgtcaggtgggttgttattccctgtcccggacctcgctttttgatggaccggcgccatctaagaactcctgagcccgtgggggtgggtagcctgtggacacaggccgagccctgcaggtcaggccgcttcgtggtccccaggtaggaccgaagccgc

SEQ ID NO: 8113 - DNA, 2300 bp, Homo sapien
caatcagaattgctctgtgttttattaattctcctggagcttccactttttctttgattctcaaactaattcctgaaccttgcaacacaaaaatgaccatacatcaattcattaaacacttaacagatgctaataaataaaagttcacttgtaattatatcaaatatagtaaccttataccacagatcttaccctctcccccaacatgcttttcctttcaataaaaactccctttatataaattttgagtttacagatccagatacaaaaaattatgtacaaaattttactggtatatttagtttaaaaagccaagcctaggcgcatctacccgacttacagttaagaaacaaaactgatgacttgatgatgatattcctgatattccatcaggaatgtcagggtatgtttcctaacttaaagggcatatcctattttgagagagatccgaactatgtcaactccttacaaacaactcagtgataggcggggctataaaccttactggtgaaggaggttcagatagattaaaacaacttgccctagatcaaggacccttcaatggaactgaaagggcagacgttctaattcaaaagttctacattatttttcgctgcactatacatcttactgctctcagcacaaagcagtgcagatgtgctgaactcaaggacctaggggcgacacctgtagagggtctggcgactgggagggagggagaggggatccagctccggcactctgccaccagccgggagctcacaggcccgtgagctccgcctgcggccttccaaacagccaagagcggagaagcggcttcggtcctacctggggaccacgaagcggcctgacctgcagggctcggcctgtgtccacaggctacccacccccacgggctcaggagttcttagatggcgccggtccatcaaaaagcgaggtccgggacagggaataacaacccacctgacagaagggaaaatcgccgccttgcatctcacttccgggttcgtctcctagcctgctcaggattggctcctgcgtgagggcggggcctcgccgctactttccccgccccctcactgcgtgcggtagccaatgagagccgaactggacttgaagcatctacgttatccatgaagtgtcgcgagagaaacggacgccgttctctcccgcggaattcaggtttacggccctgcgggttctcagaggcaagttcagaccgtgttgttttcttttcacggatcctgccctttcttcccgaaaagaagacagccttgggtcgcgattgtggggcttcgaagagtccagcagtggggtaatttaggaatcgcattcgtctcctgtttctgcaggttcccaggcggaagcccagagttaactggaacctcgggaagagcgggccgagtgggcaggggaggggtcctggcgggctcagcgttctgattccgaggttccctgcggtgagggcgtgttgaggcttggaatcccgacggaatctggagctccagatgtggtgggggttgtctcgcggtggcagccactcttccccaaacctggctattttcagtcatcctgctggtgcttaaaggtgttcctccgcagaccacgtgtttgtttatttacactcgctttaaacgcgggcccgttcccttttccaaactagccaggtcctttaaaaaaaatcgtggggtttgaataggaaatacaggattgcctctgttctccagagtaacctatgcgtgcaacttaaaaatatctgcacatctagagttgtttgtgtgttgaaccagaaccgtatgtgaccctttctgcccatttatttagcatacattaatttcccataagagcacgggaaaggaaaataggagtttaatcatcttggtgaaactaggaaacaggatgtacactggagatatattattttctatgctcagttcattaaaaaaaagtatagtgggtgcttagatgaaaatgagacttctaaatttgccagtctaattaagacgtctgtaccttgtgcagcgtaaatcatgttggttaaatacgtgcaggcttttaaaaaatgtgttttatgatgtaattttgtttttagaatttctagaatttggaatcgagtgcattttctgacatttgagtacagtacccaggggttcttggagaagaacctggtcccagaggagcttgactgaccataaaaatgagtactgcagatgcactgtaagcacctgacttctggaatcccttgttatttggggtttctaaagctcgtcaactgtgatcacagtaaaagaaaacttatt

SEQ ID NO: 8114 - DNA, 2300 bp, Homo sapien
ttttggctgtcattcattccttcattcaactaatatgaatagaatgtctggtatgtgccaacttctgggtactgggattcaataatgagcaagatccatgtcttcacctcaggaagcttactctagtgtaggtgactggcaaagacatcatgtgtctggcaaagacaacatgataagtactactacaagaccttgtctagaaaccatgagtatacaggaggttcataattcccctagtcctaagggattaaagaaggcttcctgaaggaactgatgtttattctgctaagctgccatattaatttttaaaccaatatcagcttaaagggttacacaacatataaaccttaatcaattaaagaaaaggagaataaccaatagataatttacaaatacgaattcccagcctctcaactctatttgttgaaatataatcagtctttcaaggctcttctctgatgttatctctttcattctttcttgatcctctcatttagatcgctttctgctttctactttttttggtgctacatttcacctctaactttgttcttgttttagccccttaaaagattataagctgaaagataaggaccacatttaacttatatttatctcctacttgtctatagaaggcattaagaagtatgtgtagcattacatttaattaaagtcttgtcacttgattttgcctggaatggattctgagaagttccagagttaggcataaccccaagatactgatttcttgatacctaatctcacaagtttaacagtatacaatcttaatgtggtattaaactttattactagtggcaatagcactaaactcaagtttaaatgtattactcatgtccagtaacttttctggtcctgttactttattgtaaaatgtaagaattttactaaagtattcctaaggccaatccggcttttcagtcacccaatcagagacacccttggaatcagagatatccaatcagaattgctctgtgttttattaattctcctggagcttccactttttctttgattctcaaactaattcctgaaccttgcaacacaaaaatgaccatacatcaattcattaaacacttaacagatgctaataaataaaagttcacttgtaattatatcaaatatagtaaccttataccacagatcttaccctctcccccaacatgcttttcctttcaataaaaactccctttatataaattttgagtttacagatccagatacaaaaaattatgtacaaaattttactggtatatttagtttaaaaagccaagcctaggcgcatctacccgacttacagttaagaaacaaaactgatgacttgatgatgatattcctgatattccatcaggaatgtcagggtatgtttcctaacttaaagggcatatcctattttgagagagatccgaactatgtcaactccttacaaacaactcagtgataggcggggctataaaccttactggtgaaggaggttcagatagattaaaacaacttgccctagatcaaggacccttcaatggaactgaaagggcagacgttctaattcaaaagttctacattatttttcgctgcactatacatcttactgctctcagcacaaagcagtgcagatgtgctgaactcaaggacctaggggcgacacctgtagagggtctggcgactgggagggagggagaggggatccagctccggcactctgccaccagccgggagctcacaggcccgtgagctccgcctgcggccttccaaacagccaagagcggagaagcggcttcggtcctacctggggaccacgaagcggcctgacctgcagggctcggcctgtgtccacaggctacccacccccacgggctcaggagttcttagatggcgccggtccatcaaaaagcgaggtccgggacagggaataacaacccacctgacagaagggaaaatcgccgccttgcatctcacttccgggttcgtctcctagcctgctcaggattggctcctgcgtgagggcggggcctcgccgctactttccccgccccctcactgcgtgcggtagccaatgagagccgaactggacttgaagcatctacgttatccatgaagtgtcgcgagagaaacggacgccgttctctcccgcggaattcaggtttacggccctgcgggttctcagaggcaagttcagaccgtgttgttttcttttcacggatcctgccctttcttcccgaaaagaagacagccttgggtcgcgattgtggggcttcgaagagtccagcagtggggtaatttag

SEQ ID NO: 8115 - DNA, 2300 bp, Homo sapien
gtgaatgtttgtgcatgtatgagatgcacaatgatcacgtatgaccttcaaccagcaatttgcgaagtcacgactggtttccattcatccagacacaccttactacctagtatcccctcctcccacatcaaataagggtatagtaggggcagtttgtggtctcaaccctaccgaggtaagagggcacaaagaaaattgatatgcatgagacctcgggcattcttcaggtaaaaagatggcttaattggaacattcggaggcttaagagaaaatcgggagtggtggaaggaagcaatcaagcagggtaatatttcccaaatgcctaccggccacgtgccagacacaatgttaggctctatctgtgatgtcttatttaactgaagagggagaagaatgtgaataaatggctggattcttgaattgcataaaaagagaagccaatacactttttcctttatttcgtttaaacaagtaatttgtgcatttatagctttttcttttaattaaaagtaagagtggaaaaaagtcactgaaatgtctaatttcaaataaaatatttgatttctaatttctgtttttcaaacaaacaaaaaaccccagaagcattatgaaaggttttactgtgcaggaggaaatgttactaggttgatgggcctagccagaacacctaacatcctccatctagtctccaaactgaggctgtggccctgcagagagcgccacccggaagccacttttatagaagcttttacacacaatgcttgatttttttttttttttttccgagacggagtctcgctttgtcgcccaggctggagtgcagtggcgcgatctgggctcactgcaagctccgcctcctgggttgacgccattctcctgcctcagcttcccgagtagctgggactacaggcgcccgccaccaagcctggctaatttttttttatttttagtggagacagagtttcaccgtgttagccaggatggtctcgatctcctgacctcgggatccgcccgcctcggcctcccaaagtgctgggagtataggcgtgagccaccgcgcctggcctatacttgatttttaatgaaaacattcttaaattcatatggctaacgcaaatttattttctgtaggcataacatcaaaaacacctggcaggattgccccattcccagcactgtctatttctcccctagtatcagtgggactccactgatgcacagctgtgatctactaaaacttctctcaaaactttctcctctccttaggtcagcagccccgcccctgatctatttggaaatcccctgaataaaagttgaatatcataaaccaaagcgaacacccagaaattcaaattcaacccgtaggtaaaaaatttctcaagtgactgtagacgtagatgtctccagtgtcgcctaataaggtagaagaggccagtgcgatactgtctttacacccttaacttgggtgctagaatatttatcttcgtcatcattttatcatccaaactattttgcataactttcatgggtgcagaaaatgttttttaagtgcttggtaaaattaatagtgatattcattcattcatctcactgaacaggcaataaattccttgacgacaagggccttgggggggtcacatcttcatctttggtttatgagtcctgtgcgtcttggtacaagcaatactactatgagccggcaagtcagacttatttggtaggggaccaaaggaaagaacatgttttgattgctaagaaaacattttgttctctatcctttactgggctggcaggcaaaggaaatgttcttatgagcactcacattgaaaacttaagttcttcaccaaatgcagagactctgaaggccacgccgctgcgggctgcctccacaattcgaccgtctcggcgggccacgagatcctggccacggatgcggtggccgcgcctctgctcgcacgttcccccggcctctggactccctccctccctcaatccctccctccggcgggcgtcgctggcgggtggctaggcccaacggcaggaagccgacgctatcctccgttccgcggcgccgggtccgccttccgtctgttctagggcctgctcctgcgcggcagctgctttagaaggtctcgagcctcctgtaccttcccagggatgaaccgggccttccctctggaaggcgagggttcgggccacagtgagcgagggccagggcggtgggcgcgcgcagagggaaaccggatcagttgagagagaatcaagagtagcggatgaggcgcttgtggggcgcggcccgg

SEQ ID NO: 8116 - DNA, 2300 bp, Homo sapien
aaattgaattaatcatattctttgattcattttgtatgattctcacgggtctgtgcaagttctatattatattatactgtcttttgctttctctttctctgccccattcacattcctgttttattcccttatataagtacataatctattgtgtctgttcttggatatatatatttacttaaaaaattagtacatatcccatatacaggtgtccttaatgttttaaaaattaatgtaatattttaccattgtatagatctcaatctttttttaagcttttcctttattcaatacaatgtgtttaagatttattcatgttgctaaatatatttttaggtcattattcctgaatgttagcctagtaatccactccatgtgtctaccacattttacctacctgttgcccttctgatgggcacataagctgcctgcaactacctgccactccaaataatactctgatgaacagcctgtacatgtgcccttataacttcagcacaagcttttcaacaaatccagggtagtatttaataaaattctacacacatttataattaaaataatctttgaaaagcaggaatagaagaaagctttcttaagatgataaggtctataaaatagatttttatagcaaatatcaaacaaaatggagacatttcagtctttaaaatcagaaagaaaacaagaattccaactaccatagtaaccttcaacattgtactgaaaaatctgagcaacataagacaagaaaaacaaataaaaagaaaaagaataagaatggatgagacaaaattatcattatttgtagatgatatgattatctacatacaaattcaatgaaatcaaaagacaagctctaagaactgaggaattcagcaagcttgataaacaatatcaactttacaaaaaccagtatcatgtgtctacactaataattaccaagtatgaaacatgacaagaagatatagttcacaatagtaacaaaaactatgaaattttcaaaagttaactcagtatatgagacttttatgaaaaaaattaaactctattaaaagataaaaagaaagacttgaataaatggagaaatctaacattgtaaagatgtaagttcttcctaaattgatttatatattggatacaatgctactgaaatttaagcaagatatttaaagaaacttgacgaacttattttaaaatttatatggaagaataaagtctgtgaataaataaatcagttggaaaaaatatcaaaaagcaaagacttataccaccagattctatgaataacacaaagaaataatgatacaaagtgttgaagtcttggtgcagaaatggaaggcacagactagatctattgatacgtgggaatctgtcatttgctggaggtggcttcacaaagtattagagaaagtatatgctatttaacagatgatgtcaaggaagaatggctcactatatggagataaagttggacttctatctcactcacattgcatgtatacttacatatgtgtgagtgtaaatacctgagggattgaagatacttgctgtgaacagtacacttacgaagttaatgaaaagaaaatattatataatgtccttgtccttgtaaactgaggacaggtggaattttcttttaaaaagacccaaaaagcacgaattttaaaatggctgaatttgacaacatcgaaatttaggattttggttaaagcatttcatagtaaaaattaacaagtgatagataggaagtagatatttgcatatttgcaattttttaaaaaaaagttttcttccaaatcacaaagatgagacactcaactttaaaaatgggcaacggatacgacaggcaatttgcagaatggaaaactccaaaactatcacatgtatgaagaggtacttaccctcattggtgagcagaaaatacaaactgaaaaaaaaattattgtttgatgccacccaatacacataagattggtaaaaatgaaaaagctggataatgccaaatttgggggtgggggtggaagtaatgggaagaaaaaggaagtcctgcacaggcccacgtgctcgcgccaacccctacgccccagcgcgccttctccacccacgcacgggcctcggacgcatttccagccccggcgttggttgtggatgctggacatccaccgcctccaggcagtttcgccgtcacaccgtcgccatctgtagccaaagcaaaacatatcctaactgagactttgcagctcttgtggccactctgggctcaccgggaacatgagtggaagagcccgagtgaaggccag

SEQ ID NO: 8117 - DNA, 2300 bp, Homo sapien
tcagtgaggtggacaatgggagatatgggattcctaggcagaagaggcaaacatgcaatgatgggaagtgagggccatattttagaaacttttgctcattcaggtttagctaggaaggtgtgggagttgtgatttcaaaggtaaagagaactttaaatgtcctgccaaggaacagagactcttccatggatcactgaagacgttggagagcatttccatggcagctgtgttaaattacagttactctgatcacatcctattgaatggtttacagaaggaggtgggaagagtagtaaagtgccactgaaatagtgtgggcagggtgtcgaaagggcttgaaaagagatacaaagtgctgctatttatttgaattcctgagtgcctgtgcaatggatggaagtaaaatcaatgcattatctcatttaatcgtcacaaccctgtgactttagttagactcagtatcagaaaggtgttccacatcacaccagctgtaagaggcagaagaccagggtccatccaattccacatcatgtgctcttaagcactgtggtaaataatggtattggaacagctgagatagatcagagacattcctggtgtagatacaataagacttgccatctgattagattgtgaattgaggaggagaaatgaaagtttactgtgaggttagcagcctggggactggagggtctgaggtccaataggagatgtaggaagtgaaacaggagtgggtgtttggtgggagaggtacaaggcggggctgaagagtttgctcttaggtggttgttgaaaatgcagttcctgagaccatctgctgccacctcccctcaaccactcatcccaaaggattaagacatcctttgttgtcttaatcctttgttccaaagcccctgcagcagtttgagaggtgggcatcccttctgtctgccagagttttccccatgttgatgagctctttctatagctgtccacctctgatttctgtacaattttatctgaagcaagaaattatctcgatgaaatcttacatccctgtgaaaagatcagtttctctttgtttccatgcagtgactggttcctgccttacattcttgatgcaatctaaaagtggttacaaccatactgtagctgtagaaagtagaggcagaatacataaatgcttgctaattagctgactttatctaattgcttatccctttgaaaaatccatgatcattgattgatatttattgactgatttgtatattcctttatttcaagaacctattctgagtcctttctggttcaagaagctttacatttagtgggagctgttatagaatcatattcatgtgttcattatattgctagaacattgttccaagttataaggactctaggtttctctagacctttcagcaatttataaaatcagatttctgatctgttctaatttccaccacttattcctctctctccccatgtttactttccctctcatttatcctctctcctttctttccttctctcttgttctctgctcttctacattataaacagactttgggaggctgtcctctggaatccatgaacttgggatgggcaggacagtccactagtgggcttctgagtatcagtgaataccctgaaaatgggtacaattatgtacactgttgtggtgtgtgtatatatatatatgtgtgtgtgtgtgtgtgtgtgtgtgtgtgaaattttattgagaaatatctaacttttatcagactctcaaaataatttgtgacccatctccctcccgctccctagaaaaatcaagaaccactgctctggaactctctttggaccaaactttgaaccatgagtctggctttaattctcccttaagaagttagagagtagagagatgtgttgtttttttaggattggcaagatacagagaaaaaaagccctctgaacataatgtgatgattagattattactcatactaacacctgcagttttgtttttgttaatgcatattacattgtgatggctttataatctgcattctgcacacttggggataatttgtagggtgcatattaagtacctctttttcccaggtcacagagttgtcaagtgaaactcaaagaggtgagactataaagatgactatcaccctgaagagggagctgccatcaagttctcccgtgtgcatccaggtcttcaatatcatcttcagaaagtaaggcactggaaatgtgaatttaatttgggctaatgatacctttcagcatagagcctgggtattaaaataatcgaccattttgtaggcagtgtg

SEQ ID NO: 8118 - DNA, 2300 bp, Homo sapien
tcctagatagtctcttgaaataataatagcaaatgtatattgaatactacatgcattgtgctgagtattttacatttgttattttattcagtcttcacaaccactctgtgagatgctattttcttcatcttgccaaaaaggatactgaggtttagagaagttaggcaacttgctcagcgtcacacagatactgaatggtggagctgcaactcagctcatgcctgttttgttctaaacttgatggttgtaacttggaaattttgctgcttcctagactataggatggtatctaggagtgggcaattagtaaagattagtttcctttcttctttttctatccatcacttcttccccaatttgtattaaattcgcgcaaatgttaggtgaatcagtggtcccttcactgtccataagataaccacttcagctcctaatttgcgattcagggttcacaatgtgtaatacaaggcacattgaggcagaggttgtttctatacctggctttgctactaaacttgttctgtaacattggacaagtcattcaacagctatgcctgagcttcttcatccggcaagtgaaaggtttagttgacactttcttagattctttccaggcctacatttttgtgacgttgttattctgccttcccttgttttctcctcgtttctggtaaaaacgctttcctctatgccttcttcccaagcacccagaccttgtcatctccctcttggcttttgcctctgcttgcccagtgctgccttttcctctttctgctgtgtctgaactccaccaccctcccaggcttttccttctgtgtagtcagtgcctctctccgcccttcccaggcatctgcagtacttggatctcctgctttgttgcttgcctgttttctgttcacacatcttgtcttcttagacagataacagatccttgaagggctggtcagctgctctaagtttcttttgtgtgctaagtttcttttgtgtgtaccagggtagatgactttaaatggagtaggcatttcataaataattgttaaatgattacatttgggctttatcttgagagcagagtttactcagtaggagggcccatcaggggaatcagaatcaggacatgcaacccaccagaactgatgagaggtaaaactgctggcagtctagttagggaactgccacaatccagggaggagtccctgaaggccggacctagatagcaggtaaacagaggcagggagcaccagataagagaggcttggtgtgcgctaactctcccactaacatcctgggcagcaactgtacagttacctagctttctcttctccaagcagtagagctgcccggaaaaagccaggcagaagtgctatggggcaggctcgggcaccccagattagggctccagagagccgccagtataaaccaatataatgaggtggatgagtagttctcagcacagcctgattttaagaggtggggcaacattttcccagagtcgcttactttctttacctctactcaggcagataacagcctggggatttatggccagaggatgtacggttctgcgaacacatttaatatccgaggctgtcaggtctgttttggcccttctgtttgtcaacggagcacatagtagcagcttatcgcccaatctcaagtgcgtgatggaagcactggggcctggggaatgctgagaaaagtgtggccactttctacctggaaattccacttaagaagaaaaaaaaccaacctaagcaaatctagacttttgggcagatccggaaacagaattttggccggcattgggctggtggggaaggaagacaaagtggagggagaactggtgagtctgaaattaatcaaaacccggcaggggacaaaggaagggatgctgtcgccctcctaagtctcagggagacacgtcagcttgagctctgggcaatttcagcctggcagtctcgcggcccggggaggggcggcgggtgtctgcagacgggctctagggcccagcggccgggcgccacggcgggggtggagtgtagggttctagtgacgagcccgggcgaccctccccggcccgcgcgcggggagcggggagcgcggacggcggcgggagcgcgcgagaagctctaggacccagcagcggttgtcgggtttggggctggaggtgaagccctgtgtgaatggggttgattgtccggcgccacttccccgcgctgcccggcagccgtcttccccagccgagggactgaactagccatgatcgcctcatgtggagggcaaagttgcgccggggaact

SEQ ID NO: 8119 - DNA, 2300 bp, Homo sapien
atgtaaccaagctgtacccagaccaccttgggtagatgtggtcatgacctcctgaggctgtgtcatgggcacattcttaaccttgcaaaataaactttctaaattgattgagatctgtctcagatactttttggttcataccctttatatttctaaatgttgttaggagcccttggcttaggttgaaagaaaatacagtgattcttaggaaacaggttaactgaatagttaggatggacttgttaggaatggggacggggatggaaattcatgatctcaaagataggagctaatactaggtatttgagctatgaagggacacccttatgtgttctttttgacatggctaaagttagactcttgagctctagacctcccttacctcagcaaaacaaatcagtttctccccaagacttcccacttcattaaatggtgcccctatcaatttgtgtagagcccaaaatctaggagtaatttttaattttcccgacttcccttctccccatccatgatatatacaaaatgaatcccaatttctgagtgtttctcttctgccactactctgagctctcctcagttctcacctagaccacacctgggcctcattggactccacacgagtgttcctgccaccatgcactgcattctgtgcacaccacaggagaggcagctcctcccctggcctctgtacactccaaggtaaagtctggctgtggcacctgcccatcaccctagtcttatcttgcactgctacttgctggcagtgcttcatactacttgcttgtgccagtgctaattcctacctcaggccctgtgcgctagcttagcatctccaaccttcttggcaccagggatccgttttgtggaagacaatttttccgcagacaatcgcggggttggagtagttttaggatgattcaaacgcatcacatttattgtgcgctttgtttctattattattacattgtaatatatgatgaaataattatgcaactcaccataatgtagaatcagtaggagccctgagcttgttttcttgcaactagattgtcccatctggggttgatgggaaacagtgacaggttatcaggcattagattatcataaggaacaaacaacctagatcccctgcatgcacaattcacaatagggttcaagctcctatgagaatctaatgccactgctgatctgacagaagatagagcttaggcagtaatgtgaaccatcgggaatggctgtaaatatagatgaaactttgctcacttacctattgctgtgtggcccagtccctaataggccacagatgtgtactggtccatggcccagtggttggggaccaccgtgctagctgacacctcctacatggaatactcctttcccccacttcttcacccgctctgtccaaaccactggttcttgtctgtcagtgtgacttcagctcaaaccacccctctcagagactccttctctgctctctcagtaggaagtagccatggggtcattccctgtcacttggggtcattccctgtcacatcactccaccttattctttggagagtacttgttacgttttgatacttggctttattgttgggtggcttgcctttctctctccctaccatgtaaacatctgagagcagggacctggtctgtcttgttcgctgtttccccaatagccggaatggtgccaattgagatgggagcacagtgaatacctcccactgggaagtgcactgatggcctctgaccatggaagccatcaacagtgccagtattgttggggcttccttcctgctcccaccatttccccaggctctaactgctgccttccattgccttgcagccgcccatgccaacttccgttcccatcaaccatgcagcagcacagccccatgtcctcccagacctcttccgccagcgggccactgcactctgtctccctgccgcttccactcccgatggccctgggtgctccacagcccccgcctgccgcctcccccagccagcagcttggtccagatgcctttgcgattgtggagcgagcccagcaaatggtggagatattaacagaggagaaccgggtgcttcaccaggaacttcagggttactacgacaatgccgacaagctccacaaggtgcgtgacttccctggggaatgggagggagacaaattctttacctggtcatggggagttgatgcactgactgacttgccaacattgcagtagacccctttttatactaggccctgtgcaaggctttagggagatgaaaataaatatgacccagttcctgccttg

SEQ ID NO: 8120 - DNA, 2300 bp, Homo sapien
tatatatttactatctaagttgctttcctctaattgtgtttgctctccttacttggcaatgtaaacatgaattttcagatttgtttccagctccatgtaaagtctccaaaagtaaatttgttgaaaatgtttctagccactaatttctatattgatgattttgtgcaccatagtgtgaatttataattttgcaaatatgtttaaagcattttgtttgctttctacatcatttggcctttagtgtattttcaatgacactttgcacttttctgagccacattctcacatatgccctctggtttgtttttatctttactcatctttgctgagaccttcttcttaaagacatatgaaacttgcaggagtatagagcgatggttaggggcatggactttggagtcataaatacctgagttagaatccattttcactattcactaactgagtattcttggaaatgtcacctaaccctggtttcttcatctagaaattgaggataataataccttgtgcacaagttgtgagaactaaatgagagaccatgtgtaccgtgccctacccagtccctgtatgaagtaaatgctcattaatgttgatagctgtcattaaaggggcctctatttttctgttttgggctattctgtaaaaaaaaaaaaaaaagctttaaagttttcaggcggggcgcggtggctcacgtctgtaatcccagcactctgggaggctgaggcgggtgaatcacctgaggtcaggagtttgagaccagcctgaccaacgtggtgaaacaccatttctactaaaaatacaaaattagccagatgtggtgacgcatgtctgtaatcccagctacttggaaggctgagacaagagaatcgcttgaactcaggaggtggaggttgcagtgagctgagatcacgccactgcactccagtctgggcaacaagaatgaaactccatctcaaaaaaaaaaaagtttttcagtatgattgtacattggaatatgaagttaaaagatgtgaaatacttggctacatcatgtcttactaattaaatactcatgtagtcagagccattattgtgcctttcatcttgagctatatcacttagatgatgcagtgatcttatttttactaatcattgttagttagtagtaattaaattgtcaaaaccagtggcaggaatagttatctgtgactggttgtttatagtcagacagatgcttgcagtgaaactgcttcttgatcttctcgtgtctgcccttgccctcactgcacccacctcacctgaacttgtcaaggacagtgtctgccttcttctttctgtcctggaccctggcatgcctattacattgtcctgacctgcatcccaggcagggcccataaaacaagaagtgagacagaatacaacatgaaggaagacttcagcttggagcctcactctctgagaggaccagtctcagttttaagtatttactgagcccccattttactgtaaaatactgaagtaggcattctatgctgtatggatgataaacagaaataaaacctaaactctgattggaaaagtgaggtataggacaagcatgaaaaagtacaagcatggaaacaccaacaaatacaataataataataataataataataatagtgtccataagtcagtagattaaatctctaggtgcccattttacatattcataacatgccatgtagctacatacataatgtagtcagaagggggaggggacttgatttttgaattttattttgttttccttagatgctgcttaattctatctagttaaggaagagaattggacagaattcaggagaggaaaagtgggtgaaggagtttgtggagttttagcacggcaccctgtgatcacctctccacaagcatttacacctttctctgtatgggcatcagatgagattgataactgagctggggaaattgggagggaaaggcttcatgagccaatgcgagatgcagagctgatctctgttccagcatgaacaccagcctctccattctgtgtctgtttgcattgagacaaagcaagaaggtttcctatgatcaaacgcatatccttgtgttgccagggacaccacgatcatcaaccactcacggaatggcagctacggagagagctcgctggaggcccacatctggcaagaggaggaggaggtggtgcaggccaacagaaggtgtcaggacatggaatacacgtaagggacgactatgtgtgacgtgtggggcccgctgcattcacactccaggccttccagaacagattgcttctc

SEQ ID NO: 8121 - DNA, 2300 bp, Homo sapien
gactttgtccttcaagcagaaaaaagggaagtagacaagatcataatttaatctgaaggttactaacagccactcttgtgatgttcccaatatttcaagaagtccaaattcaatcacatattttcctataataaggctttacagtgattaaaatgtctttaatttttattaggattatatcaactcagaacttaacagtaatacttttaatatactgactggtgctcatagtgcatactctgaggcattattatttctattatttattgttctatctacatatgaaaattcctggttagtaggaatttcacattttaaaatcacagcagaattttagtgttaaacatcctattgcattctattcctatgaaaatagataagtgacataactcaaacatactactatatcatgaccatgccatttaacagatctggtcttgttttgtgaacaataaaaaaagaaagtcttactacctgtattttatctttgtatgagagggtaggtctctgcttgaatactgctttgaaagttggctcaaatcaccttctccttttccccttccacctctggcaggttcaaaggttggcctggctgctgttgtcatcttttatgctttgaagaaaaatataatcaagttatttccaacattacaaacactcattttatagagtattaatcaatatccatactggtaaaataagttctaaaactcattccccaaaacctgcttaatcttcttaaacaaaagttttcaagaaaacaaattatgaggcttaggctgtacaaggaatatggcttctcaggcttgccttagtacaaaaaattctgtcatgaagatctgagtttgcatccctattctccttctgactatatgggcttgagcaagtcacctggcttaactttgtcatctgtggaatggagatattcctcatagattataagaattatgacacttgacatgtcaaaaccctagtaaaatacagtactgccatgactgagttttaaaaatttccaactcaaccttactctaccagactctgtaaggtttgcattttatctaaacttcacacaatagcaaataggctagtagaaacaaaagctaaaaacaaacaaaaaatatcactgacaaagttactaaatgtcccagagaaaagtgtgttaaacttcaatgacagttacacagaaaaaaattcttaaacaaccgtttgttgagccaattttctcctacaacaggcatcatactataaattagatcgtttgtgggttataatttaaggcctgttcaaaaaaaacaggaacctcacccccagaggattctgatgccaaaaatcagggactcattcctcaagttactttctgcttggagcagtcacaagaatactgtgcagcagatgcagtcactaaaaccctgttagtgtcggaaaagcaagtgtgtggggagggtgggcgaattgggaggattttttggggggggggcgatgctaattctctcaactttcaaaaagggtagagacatgtatacaaagaagaaaacagggttatctggcgctgggggcgccgccccttcccacacacccacggaattatcactccggcctcccgtgagctagtctttggctataaccagaaactcgctgcctcttcacccgtgcccagcactgcaggggtgcgaagggtagtgaagggaggacctggggttcgctttacgcagtaggcgagctgcctgtacgctgcgatctcctcggcgggcccaagagctccagacgcgcctgacaggcactcggttccgcccctagcccgctgctccagggcctccaccgcccgcgctctgcactctgccgccgactccgaccccaactgccctttcccgtcccatcgcgataagaaagataatctcctatcctcttgccgctcacactggccgaggtccgatgcagcaggctccgaagatcatacagacgccattaccactcttggctcccagaaacctctgcgcccagagctagcgcctacgacccggaagcaaaatccaagcgcttcgggggcggaagcaacgaccaatccgcagtggccgaagtggaagtcggcgtaacggcactaaggggcggggccgaagcggcccagggggcgggcgtttgaaatcagtgccttagagtagaccctaaacctcattttataccttcaagaaccaattacttaatgtctcttccgtcttttccgtccccgaccccctcccagactccttcattccggtactgcgtggacggaaagccccgggtagccgacaccacgtccccgg

SEQ ID NO: 8122 - DNA, 2300 bp, Homo sapien
ctgctttcctggaacttatgttctaatataggaagatagacaataataataaaaataatattaataataataataatagctaacatttatttagcaagtactatttgctgagacagttctaagcactttacaagtattaattcacttaatccttagagtagtattacaagttagggactagaattacgcccattttacacgtgaggaaactgaaagcacagaaagggaaaatgacttgcctaaggttatagagctaggaaagggcagaactggaatttagaacaaaaatgggcaggctgaagatccttttctcttaatgaccttcgcatgctgtctcctgagagacatggaaataaaaaatgaatagaatagactctggtaatgtttagtggtatgaaaaatgaaacagggtgatgtgatggtgtacaaacacaagtgttggaggggtgggggtaggaaaacctcactgtgatacctgagacatgaaggatggtgatacagttactttggggcacaggcaacagagaaaagctagtgcaaaggccctaaaatagaaggaatcttgccctgttttataaaacagaaatgcccacttggctgtgtctagagcttagtgcgtaagcgagtgactgattggaagtgaagtctggaaggtaggcaggaaccagactccgtggggtctcaggtcacattaagaaatgtgatttttattctaagtgcagtgaaattgtacacaggatagtaacaccattttattaattttaaaagatcactctcttggctatatgcaacactgactgtaggataaaagatgacgcaggaagatataataggaagcaattacaatccaggtaggagatggtgttggcaaaggcaagggtagtggcagtagaataaaattgcgggtgagttttaaaagtagaattgttaagacctgtaaatgaaccgtatgtgaagagtgaatgaaaaggaatttaagtaggcactccgggattttggtttgagtaactagcatgatgatcgcgtcttttagtgagacttgttaagactggaggagggataccttcggtaagaaaaatcaggattttcatcttgaactctatgactgaaagggctttttctgcttttctttcttcattaaaaagttgcaaagaatttaggggtaagaaagcatttaaatattcaattttgtgagttccttacattttaaactaagttggggaagttgaattttcatttgtttaacaaatattaattgagcagctactatacgtcaaggtctatgtgatgagataccaagatgagctaaacaaccaagatctctattctcagaatttgtttttatggaagggaggagagacgactggtaggtttttggttttcgggttttctacttttcgttgtcttattaaaacttaacacttaagtagccatcttaataattacatcttgtgctcctggtagttgggcccaccattgtaaacgctctcgtaaatactgacatctcccctcccactaaaactaacgttttttaaataagaaattttagcaaacattacgaatacaacctttgctttgaagtgttaatatttttgcaggaatggtacctttgtaaagatcgtggttgccccgtacatatttgttctttcttcatatccaattaaatgaaaacactagtttttccgaagcccaactctctaggtttgttggttctagctcaggagaaaggatggaagcaggagtcgttggatttaaacagtttggtgtaatccttttccacgctctctcccgctagccggggacgtggtgtcggctacccggggctttccgtccacgcagtaccggaatgaaggagtctgggagggggtcggggacggaaaagacggaagagacattaagtaattggttcttgaaggtataaaatgaggtttagggtctactctaaggcactgatttcaaacgcccgccccctgggccgcttcggccccgccccttagtgccgttacgccgacttccacttcggccactgcggattggtcgttgcttccgcccccgaagcgcttggattttgcttccgggtcgtaggcgctagctctgggcgcagaggtttctgggagccaagagtggtaatggcgtctgtatgatcttcggagcctgctgcatcggacctcggccagtgtgagcggcaagaggataggagattatctttcttatcgcgatgggacgggaaagggcagttggggtcggagtcggcggcagagtgcagagcgcgggcggtggaggccctggagcagcgggct

SEQ ID NO: 8123 - DNA, 2300 bp, Homo sapien
tacataataggcagcttatgagtaagaatacccaaatggccaatgaacgtgaaaaaattactcactctcatttgcagttagggaaatgaattttttttttttaagttttaagtgacaaaatctcactgtgtcaccccaggctgttgtgtggggacgaaatcacaggtaaaacaaatcttaatgccctcacctaactggctaaaactaaaaagtctgatattcaccaaaggtttgcaaaagtgaagagcactgagcaccctcatacacagctatcctgtgtgtaaattgataaaaactgttgaaaaacaatcaggcatggtaaagtttgaattcacatacagttgtcccttgatattctgcaggtggatggggtttggtccttagtaacccctgaggattctgaggattttcaagtccatatataaaatggcttggtatgagcatgtaacctatacgtattttccaacatactttaagtcatctctagattacttacattatgatgaaaatgctatgtaaataattgtttactgtattatgttctatttatttttattgttttttttttctgaataatttctacccacagttggctgaattcactgatgctgaagccagaggttacagtgggctgcctgtattctgtgacaagggatccattcatacctaagaggacacatgagctccagtatacatgtccaagcatgttctgagcaacactgtaagaggccaaaagtggaaacaacccaagtgcccatcaacagcacaaacatttataccattgaatgccttacggcaaggtaacaggatcaagtacagctacatggaacacatagatgagggaaataaaacacaaaatacattaaaatataaaaagcacaattctatgtatataaggttacataacattttcaaaatcagcaacgttttaattaatttaattaatttagaattctcctgcagaggagttttctctcttttctccaatgtgttaatttatttaatcatttatttacaacagcacagattaatatttattttatattttggaatatgatatagtagtattttagtttgttccttaaattgttcaagatttggccattgggagctgttttattggtttttgtacccctctaaaattaccccatcaatgcttttgtttgttttctatttatcacatccttattttccagcactccaagatgctctaggccctttctgtatatttcctttccagatttagaaactgtatttcttcatcagtattgctagattgtttttttctttaaaagtgttagatttcagttttattaatcatctttttaaaaaaacatattgtcccttttatttgtaattctatttttattttaatgttttattttttgttttggttttgttttactaattgcttgacttcaacataaaaaaagttttagaaatgtggttattaattttcaagtaaatatgattggattcaggttttttatttttaaccttcaatattatttcactgaggtccagatgtgctgaatttattgacctattaaattttaattgacatttattttgtagtcttgtattgggaaattcttctgttttctatatatttttggttgttgcaggttatatgatcaaaattgttgtttgttgtgcaaattattatagcattactagttttgttctctgcactattgatttctgagaaaacggtgttacggggaaaaaacaaacttccatcatgagtgcagatttttcagttttaccttataactctcagtcttggctatgtgtcactgttatgtgtttaggtgcgttaagttcatcactgtaatgttttcctagtgaattttcttttcaataactatgaaatgtgctcctttgatcctatcaatacactggatattaatattgttgccctaggtttcttttgtttaatatttgtctggattgcctgttcccataaattgacctttaatcagttagctttgttcttaagattggtttaaaacgtagaataatagggaggagcatgggagggtgggacgtctaatgtaaatccagcccagtgattacattagctgggcgctgattaggttaggatgttgcccaggtacaaggccaggatcttcggggcctggcttcatttggagttcagctaccaaaaggaaaccttcctctgggtcctggagtatttggcctgaaattgggaactcggaagttgctgctccagggcgctccctgcggagctccgccgcccgcctctccgcccggcctttcccggcgtccccacgcggggc

SEQ ID NO: 8124 - DNA, 2300 bp, Homo sapien
taaaacctgtaagaaatttgttcttaagttccaatgtataatctcttgaagagcttccttctttatgggctcaccttacagatgcgctgtgagttaaaagaaaaggccaggcttgggaagcagagagacctgtttcaaatctgtcttaggactcactggctgtgccagcttaggccagaatcaacaggctctggtctcagtccctgtagtggcacactggggaaacagatgacatcgtaagatgagcacaggccctggccctgggtagctgccttgaccctatctctgctgccaccatcctaccatcctggtccaagctaccatctcttatctggattgtggcaattatggggtgtttttcttttcttttccttttcttttttgagacaaagtctggctctgttgcccaggctggaatgcagtggcacaattttggctcactgcaacctccgcctcctgggttcaagcgattctcctgcctcagcctcccaagcagctgggattacaggtgcccgccaccacacccagctaatttttttgtgtttttagtagagacgggtttcaccaagttggccaggctggtctcaaactcccgacctcaggtgatccgcctgcctcagcctcccaaagtgctggggttacaggtgtgagccacccatttattctgtgccacttcaatctaccagtctcttccctgatagcaaaaagaatcgagtcaccacctttaaaagatgaaaatcctcaacatgatttacaatattttttccaaactgcaggtcatgagccattagtggctcatagaaacaatttagtgggtcaacaccagcacttttttaaaaaagtgaagtagaacagaaatatgaaattgcaatgccaatcataagcataagaattatttcatcaaacttttctcattatgggccttctcaaaaagtgtttgaaggcctctggcctataataacctgagtaatatgacccctgcctcctcctttagccccacttcccatcatcccccacgcggttctccgcgctttacccacactagccttccttaaattcctccaatacatcatgttcccttctgtgggagaccacttagcacatggttttcctccttgcctagttaatgtcatcctccaggtctcagctcagatgccacttcttcaggcaaaccttcccggattacatcctgaacccctgtagctgtcagggtctcacagatctgtgttcagtttttagttatccctttaatagcatgtttcctcggttaatgacaaactttcccactaggctgtctttgtgaccgcaggagccctgctcttgtttacccctgtggtaatccagtgcctatctcaggctggcacctaggcattcagagggataaatgaaggaaagaattggccaacctgttgaccaatgacgttggctggcctccttccttgcttggtatcggttttgtttctaacacttgcaccaagaaaaccacacagggttatactgtctgcctagtttaggaacttcctttaacagtatttctttactctctgagtttctggtgagctaaaaaaacataacaaaaaacaaaaaactccatcaaaattgtatgcgtgtgctggtcgttgagtacttcggtggagagtgggagacgcatcttcatgaaatttcagaggggaactctgcccatccactccgaaccagccgcagctccacgagcatctcacgccacccctctgcatcaccagggcggccgtggggcgcgcgcgatcagcaggcttcttggcgcccagtccatgcgactatctcttcccagccccgggactaggcccgccccactcggattctccactcttggtagcgcgcgtcccccggactgctgagaccaggcggcgcggaggcaggtgacccgcgtctccagtcccgggcgcagcccagggtacgttgtcagcatcgcggagcgcggccctgggcctctgcagccatcttcagggagggaggcgcggcctcccgacgcggacccgcccccgccgcccgggccgccccgcccggctccgcagagcgccgcgcctaggttgcgacttcccttccctaccctgctcggctgcgtagtgcgctccccgcccagcctgcagagctcgcgccgcggcagcccagccgctcggccccgccgcgctcgcagaggccgccatgggcaccgcgcgctggctcgcgctgggcagcctcttcgccctggctgggctgctggaaggccggctcgtgggcgaggaggaagccggctttggcgaatgtgacaagttcttcta

SEQ ID NO: 8125 - DNA, 2300 bp, Homo sapien
agagggaacatcccaaaagactcacacagaatgacttagcttgtatgaactagccttggaagtcccagaccatcacttttgccacattccaatgcccaagtaagtccctgaggccagcccagatgcaaaagaaggggaattagatttcatctgttgatggaggaatggcaaggtcatttctgaagagcagctgagatggaaagtattttgtaggcatttatggaaaatgccatctgccacagtagttactattaatatctctttctacacaggagaaaatttcacaatgacctagctaagttatatgattaacctgcttgttcaagatcagccagatccagatgtcatctaatttagtaaccattgtacttcacttaggatagtgttctaaaactttaataaggaaggagtcacccctttcaaaaatgcagtattagtatcaagaatatgaaaacataaattctagtaaaatttataaagtagaaatataaattctagtaacacttgggatgccatgttcaataaatattactgaaggaggagctaacatctgctgcactgcttcagtggtccaggcactcatacactatatataaactcacttaatcctcacagttatcttttccccccagatgaaagtgaactttagagggattaaatgccttgccccaaaccaagtaaccacttagcgacagagccagggtttgaacacagtcatgtctcagtccacattccatgtgctttccactgagctccatgttacaggttgggctccccaggaatcagtctctgagatgacagtagcatgcaggaagttagcaaaaaagtgctcaaggggaacacacgtggggaaggggaaaactcaggattaggcaaaggagaaggtgggcaggtagaactagagccaagcaaatgccagccagcctttttggagggtttgggtggataacggacaatgtcaaaaacagcattaattttcaatcctgggtggtggaaagactatatatatgtatgtatatatgtatgtatgtatgtatgtgtatgtgtgtatgtatgtgtgtatgtatgtgtgtgtatgtatgtatgtatgtatgtatatgtatgtgtgtatgtgtgtgtgtgtatgtatgtatgtatgtgtgtatgtatgtatgtgtaatttctctatgtcagacactgctgggtttgtgctcccctctataatctactgattgtgggacttcacacgaggtacaaaacataagtgacctaataagccctctagacagggcttcagggaggagccaaggctggcacatagtcagagggcaggaaaagttccactccctccgtgtgattaggagggctgctttgttttcttcccaggcagagacctcaaagaaaagtgtgacttgtggcaatcattggaatgctctaacgggagggagccctaagctaaggggaggggctgtatcagccccgggagggcgagggacaaaggggcattgtttccctggagggcaggctggggcaaggctgactccactgccggcctgggcgtgggcaggtttgctcccgggaggagaaggcctccatcctggcccacaatagccaacccaaaacagttctggcaaaattaaaagacgcaggaaaatgccagcgaccgtttattttctcctagggtagatgggggagaaagcagctcctttttctgggctgaatggagtctcagggagggggctaggtgacagcatcgccctttcctctccggctattgcgcaccttctggagcctcgctcagcctgctccctccggcgtaatacgccaatgctgctacccacaacgcacagaccagaaaccaggatagacagaagcctagaatggcctggcatcgagcaggcccagcgcaaacgcaaggtctcttcctctcctttcggtgaaccccacgcccagtcccgagagagagagcggatgctcatttccgaaagctggcaatcctgcagtggccactggaaaaatacatatacgtgtgtgtgtgtgtgtgtgtgtgtgtgtgtgtgtgtgtgcgcgcgcgcgcacacagtgcatatcgtgcccatctacaaggaaacctggaggctccacaaacaactttgagtcccgggagggcggaggtggagagagattctccgcttggataagggcggctggatagccgagtactctcttttggggctgttggccgtctccggagtctcgggagcgccttgatgtcccttcccagggctcgggttcctttgagagaatcaagaggaaggtgtttttcactaggactcgcggtg

SEQ ID NO: 8126 - DNA, 2300 bp, Homo sapien
tttaacctttaagttcaagaatctcctttatacaacagtttcgaagcttgaaagtaagaaaatctttttaggaaacattcgctaataaactgtatgatcttagcagagaatgttatggcttcagtacctaacagattttttgaagtcttagagccactcacatcaggtaaatacccattttacatccagcatttccccttgatgggtctttatcccatatttatatgtttgctctagattttcttccttttctagattgtatctagaaattctctttactcttcaggagaatatatccaaccacatatccaactggtataaatatatcaaaagaatataatattaaaacatatttttatagtaaattttgaaaacttgtggatacccattttaacttatcagccgagatgtaaccccgaaagaaatgttctgcagaattttatctgaaagactctagggaagctatgtatgtctaacaagtatcaaacactaatcagaaactttaaacatcagattttcactttagtatcttttaagtaaatactaggaaaaattttttaaagcttttcacaggataagcataaactgttaaaaaaaaaaatgagggctgatttttagccatgtaaaattttataactagaaagaaatgtaatttgtaggaaaattataatttataaaaattagttttattttataacccaacagattgactttacaaaaataacaactttaataaagttatcagaattttttagattttatgggttatttttactgcttgcagagccattagacacaggtttgagtgttgcatcatgaacatggataaatatgcctaggtgtgtgtgtgtgtgtatattgcttatatacacataaaaaaacctttgtgaatgtctaataagattttccaggtgtttataatggttactaaactgataacattttcacttctaggttcatgtcaatctacttttaatggaagcacgaatgcaagctgaacttctttatgctcttcgtgccataactcggcatttgacctgaagtatcacccaaggaaaatgtcatacatgtgtaaagacctttcacataagataaacattgaagctatttgtgatatagcatcaaaaattattcagttctctagtgtcaaagtttagccgtttgtttttttttttttgttttttgcggctgtaatgtgcaatgatgtgttttattttccttgatgcttaacattactaacaattgcaaaaataatactgaggagcactactttgcattgtttgtagttggagttttggatactgatcataaatcatgaatctggcgtattaatgcttaacttcagcgcctttgggttgtgtgtatgtgtattttttctccccccaccccgcccttttttttttaagaataaggacaagtgcttacaatctgctcaagcaattgtttttcagatattggaattcagcaaagagtgacctctctggccattctaaaactttaatgttgtgtcctaaatctggtggaggaaaagcatgcgctgttgaaccaagctgctcactggacacatatttgtgtccccaggagattatttgtcaggcactgttttttatttgtttgtttgttcatttattgttgttttactgctattggcgataacatgaaatgtgatacagctattgcccataatttaatgtgaaattaatcatgatgaattctatagcatgctactgaaatgccaaattcagctattttctttctcttctaaaatggaagtttcagttttccatatcagatgtatataagtggaattataacacaatcctatcactgacagtaatcctcagtcaccttaaataatcagtgctcacagtgctgcttacagttcatttagttggcacatataaacctgtacccacacaagactgaccaaaaattttctttgcacatttttcctttctcatagtttttttctatatttcgttaagcaaaggaaggttaatatgcctatttttcctgttaggcttttagaaattattttccatgacttttgttcttataataggttagacagtttatttttcaaaggtaaaaattgtgtttctatgcattaatgtgattgaactacaaaaacagagtgcaatatgttcaaaaaatactcaactaaactttccccctgtcatatcactgcaaaagtgtccttttaaacagagccataaagaaatttttttcaaatttctttattgcacaggcttttttcagttttacctttctgggattgaacaatgttcctttcataatgc

SEQ ID NO: 8127 - DNA, 2300 bp, Homo sapien
ttctctgcatcgaagggcatgtggtaattccctccttttctgaatttacttgcttttacagtttcttctaactgaatcttaagcaccttccccacaccattcattgctctttagttatgtatgtctacacagcatcaagcgacctttagctaacactggctaaatagatcaacacctttacccaactacataacttagacccttttggggttttctactctattttgatctatttaaacctgatactagcagatttccattacctttgtttcttgtgtagacttggtttatatgtgttggtctctaaaaagggacagagaggagacagctgttgagaaatgagaatggcagttttaaccgcacaaattggtctaatagctttgatatgctaaacttgctagctcctccaagtgtacctttccgattttgcataacaccaccctgaatccctaaggaaaccagggttgttgtttttttttaattaaaaagaaaagaaagaaatgcaaaccagtgaaaccgttcttttaaatcatctccacatagatttcattctacgaacttcaggccttcacaaatcctggtacgctggagacctttaaaaagggagaagccgagaatactgattaggttctaaaaatcgaaaacaggtgatgtcataatgcacagtcctgtggccacggccatggccgggtggggagctgggctccagtgagcacagagctccttgccagtaggcgatgcaagttatctctggggcccggaggacacgagtgaggaccgggcaccaatcaggttctcgctctgcgccggcctttgttctcactcgggagcaggttgcgggcgtctagcatcgggaacccgcattcgactcggacgcgcattgctagccccttcgggagacctggctcccctacccgtctgtcccgccacactcggtcagcctgcgctttccccagtcaagtctgccttctctccgcagaacgtggacgctaaaaccctgacttaccattttaagctttagaagaggtaggtttgtcccaatagttttaaacgacaatttgttctctgaaccttcctttctgagcagggcgctgtgctctgcatgtatccgaacagctgcctcaggaaggtcttttgggtgagaaaacaagcccctttggccttttagtgctggacaagtaaatgaacttacatctctaagataactgctagaaggtgcttcacaaacaagaggaaaccgctaaaccagaggttttgtgtctctcccctcaaactcgattacttgcgtaaatatatatataactcagacatttatcccctatccgcctcccaagcctcaagtaactgaaatctttgcaaaacaaggttcacaataaatgatgcgtaaagttctttgagatccctggatacaaagtactacataactgcagtcttctttacagctaaagttagattttggtggagagaaagcctaaccactgccctgaaggaaggaacatttaatcctcccactcccctccccctttctcgagagatcaggaaatatttagctcaatcttagactctctagcgagctctagctcccaactatttatctcattctcctcaccacttctgcagggacctagagaagggggcgtagcttatcttgggggtggggcttggagggcagtatatttgcatatgacacaccctcgtcctcttattggcagaggagagcaaactgttccctgctaccctactacttagctaaccgccacctcccttcagttccgagcctcggagataaacttaacttgcccggagattcaaggcttcctcggcccctgcgattggccggcgcgactcccagtcgggctctcgttgctcattggctgcgggctagcgccctgggggcgtagccggagctgtccgattggcgggaggggcggtaccggagcgtggaggtggtgaaggtggtggggcggcggaggcggggccgcactgaggcgctgcggcggcggtggtggcggtggcagcggtggcggctgctcgtcctagcctggcgggggcgggggtctggaagatgggggcgggtggaacaacgggccggtgaggagcagccgccgccgtctccgccgtcgctggggcagctgccgcggtggtcgcctctggcagtgccgctagctttcaggcagtcgcctctcctcccgacatcccgccttgaggaggctgaggcggaatcgcggctggcggcggggggacggaccggccctgcagtggccgcagtgacagcccggacccggccctccgcccgctct

SEQ ID NO: 8128 - DNA, 2300 bp, Homo sapien
ggaacactggcagcatgaattaacatagtgtttccatggctgtttgtgcttttaaaaattcatttacttacttcatctacaaaggcggctatgcatgtgtttgtggctgtgcatgtgcacgtgagtatttgtgggtatttgactgtgagtcttgttgaccaaatcacacattgtctgagaccatgaaatgtcttaatctctttttaaaaatgtatttttactttgtccccaaaattcaacacacctctcccacccccccacccccccatcctctctctccttcacacacaaatgtttgagcaaggaacacttatagcaaatgcacattgctggttccccatctgataacccttctccctttttctttagtgactgagctctgactttatttggggtggtgatgtgcttagcttgaaggctgtttttcagctttctttgcagctaggagtggtccataagatcaagcagaagctgatgggtgggagttctggaaaatctctggagagaaacatagacagctcttctcccaccttctcccacctttctgccgagcatgtggatgtggttaatacagctttggcagccatcttggaccatgaaggaacattaaggatgaatgcctggtgctatagtttaaggaagacaaaaatagaaagaggtgtcatgtcagctttagatgcataactctagacttctttcacatttcagtgaaacaaacttttatctccttgaaaccactgtcctgtggtctctgtggctagaagccaagcacaactcctagctggtagagtattcaatagtttgttaaattgaataaaaacaaaaccaaacaaaacaaaaaacaatggattctctgaaaagaatttaaatcttgtatcttcattttctgggtcaaatagtgaacctaaaagattataagtcaaggaaaagaagaatattttattctaccataaaaaataattaaaacttaatgccccactcaggaagaagaatatctcccagaagattttctggtttgaaatgcccattcattttagttaagtgttttcctttcacaaatttgttcttcctcttaggtttattaacagaatctatcaattgtacatggcatcttcagaaactctactagctctcagtctcgctgcacttagcatttgggaaatcacggagcaatctacttttttctctattggcacttataggaaagtctacatgcctccttgtgaaaagcaaatgcttttcaacataacgggtgttaactgagtgggtagcactctgcagcctgaaaaacacaacagtggttaaaaggatgtgtgaattgtgaagatcttattgttaagagtttcctgggaggcttgcatgttttcctctctcaagattcctcctggtatatcattaattccttgcagtgtgaaactggaaacagggagatccaaggaggtaagaagagtgaggggggaaaagtgcttagaatacagtggtgtgctgtaaacatttaacaactggctggggagtggggaggaagactgatttgtagtgtttgccaatttctgtagtgtaagtatgtgcaccatggctgatttcaagctaccaacagcctaagagctggcttgtaaatttcctgagaatttaacaatcagctctcagaagcctttggaactgtctccagtatttcactgcaggcacatcctctgtctcaaacttcccaacagttttaggaggatgtttttacaggatcatgttaaaggtgccggaacagaggctacaagatattaagtaacttgtctgcagttattcaacatttggcattggggttgagatttgcacccaggcttggctgacttcacacttgggtttttaacttctccattaaaagaacatggataaaatgtaaggaaagaaaaaagaagacaagtaaaagaagaaaggaaacagtgaggggaagcttcaggctaaggctaaacagattgctaagccatgtagtagaacacaggtcagcaaactgctgccagtgtgtcacatccatcctgatgacctgtttttggattgcaaaatggtttttacatttttaaagaattgtaggggaggagccaagatggccgaataggaacagctccggtctacagctcccagcgtgagcgacgcagaagacggtgatttctgcatttccatctgaggtaccgggttcatctcactagggagtgccagacagtgggcgcaggccagtgtgtgtgcgcaccgtgcgcgagccgaagcagggcgaggcattgcctcacctgggaagcgcaaggggtcaggga

SEQ ID NO: 8129 - DNA, 2300 bp, Homo sapien
aatttctggggctaaaccattttttaaaaatactttcataaaaacatgggattacaacccccaagtattccataaagacaacacttgtctttaacagtcaaaaactattcagtatacaaacctctcttgttgaaattctgatctgcagtaagtacattttacaataggatgtgcaatccgacattcctgtaataagacaatacattagtcagtatctttctgaaagtcccaaatctcacttttctggtagaaaactgtttacccaacctagtgaaagtctaaaacatttataaaacctggccccaacgtaaagaactggatgctttatcatataagtggccaatcacaatataattccttagggaaggcacaggtgtctttgtctttagtagacgtgggggtatattacagacaaattaagaaagctgtcagggcctatttcaaggattggttaaatgtgaaactacttattattttgcaccgttgctcacagacagcatccaggctttaatgggatgggaggagctccaaatcagagcattctgttcccaaaccagtcgcttcgctttcctggacagggaagaaggatgccatcagctttgcggcttcgggttcctagcaagaaagtgcaaaaaccgtcccctgcctcctggtggaagaagaggacagaccaggcagaaaaccgagatgaaaacatctccacccctgggtctctgcggcatagacaggtggctgcctcactcaaccccactcctgagacccccagacgctgacggggcccggcaccctcctgggccgcctggaaaagggcacgattctgcctccctttcagggtccgttcccagctaatgttcaagcccccagaaaaaggggtccccgagtggggaggcgagggctccagactcccaaacccctgaggcgccggcgaagaggggctgcagtgcagcggctacccggccccctccggctacggccgaggacacccatcccgcccgcctcccggagcccacggaccttgcagagctgctggccctgggagagctcctcgaaaggataacgctgggtacacttggtgcaggcgtacagggccgaggccgccatcctgctcctcagtctcctcctccgccgccgcccgctccgaggcggggccctacggagaacccgagagccgccgccgcccgggccgcgggctcctcctcctccccctccccctgcctcgcgcccaccagggcctcgccgcgagagcccagggccccgcggacgacgccaccgtctccctccgcctccacttccgccccagcccacccagtgacgccgtgccagccgctcccgcttaggccccgatagcggcggagggagacgaagcgggtagggggttgctgtttagctgtgcggccgtggatccgcttccttctcggcctccctttcccatccctgattggctgcgaaggctatcgcgtcattcgatggctcctcccaactcccaacttccgcgacgcaggaagcgcccacaaagggaggatgtcgccggccaatgacatcccggagctctcagcgcgcgaaatccgctttgaacctgccccgcccaaaggtctgcggtcgcggctatttctaacagccagtcccaggtttggctgagagcgccccaatccaattgagcaaatgttcgcgaaaggctcgttctctgccgcaactttttttcccttgctttctattggactaaatcgttaagtccctcctaatcctatttgttattggccaaaaggtaaatacttcacctggagaggcgtccccgaggcaaattcacgctctctccggcgtttaatccgagggaactcgtggagtgctttaacttcgccttcgcttttgttttatctccattactcccttcagttgccactggcgacaccactactcgcccacgcttcttactggaggaggcccgaccctccgtagaatccccgcagagccggcctgtaaccccggcgttgtctgccccagcgggccccgttacgcgctaccttgtgacgtcaccagggaagaggcggattctctcctactacagaaagacgtctgctgttttgattggctaggaaagacgtccgttaggacgtgttgccctttctgtgtaagctgtgagcgtaggcggccctgagggggtgtgttgcaggggtttccaagcccagcaccagcacccttgcccttttccatcaggggttcagcctagggtccccgctggtgggcggctcccgagtcttggagaagagcacgagaacctagaccgcccccgaagtgcggag

SEQ ID NO: 8130 - DNA, 2300 bp, Homo sapien
ctcatccagctctacctccgtattacttcttctcattccgaactatctcaagtttcctaaaagcacctactgttctagcacatactccaaaattcccgcactgcctttttctcctttctctactcttgggacaagcaatcacaattccttcgacacgcaactagctccatcttcccttctaggaaaccttctctagcctacccaagcactgttaatcactcccctctagattattctactacggtagcacttcctaaactatactgcgcagtaatcactaattacgtgtagtttctcttcagtgtttttctccttcaaagcagggtttctattctgttcatttggaccctaacagtataccaggcatcgaacatttgctaactggagaaataagagctccaacatttacttcctatcaaagctttccaatgccgcggttttcaaaaacctaagcattcgacactccaatttgagaaataccagtgaataccagtaactaaactggatggtgacatttgatgaggcgaaaacaatatttaaaatcaattccccctgtcgcctctccaaaagggcatttccacattgaagttccagtaattctaggtgacaggaagcgcgcgttctggctacgagcatcacacaacgaagttaatgtggatgggagtgggaggcactgcagggataggaaacagcataagcaacgactagtaagcgctcgagagacggcggactactattctgcaacgtctcttaaacacactggcgcgcctcacctgatctggcgagtttcctagaggggccgctgaacccacgtgaccaaaagagctacatttttgcaggccagggagtgggcagttatcccagccggcccttgggaatgttaggcaaccggggttggttgctacgccaaaaggtgaataagggctggggaacaggggcggccagcccagtttcactgggagccagagggtgcagcttcgacacagccacagtgaatggaagcttggggagcgcggggcaatctaggcattcccgccgacctccagaattgcgtcagaagctggactgacagcgccctgaaacgtgaggaaactcaaagaggcgcttagggccgacgtggggcccactcgcgccaactgcttcttaccgacaagtgagaaccagaagccgcagagacagacgccgccgccatctttcagcctgcccagggggtctccgcacttcgggggcggtctaggttctcgtgctcttctccaagactcgggagccgcccaccagcggggaccctaggctgaacccctgatggaaaagggcaagggtgctggtgctgggcttggaaacccctgcaacacaccccctcagggccgcctacgctcacagcttacacagaaagggcaacacgtcctaacggacgtctttcctagccaatcaaaacagcagacgtctttctgtagtaggagagaatccgcctcttccctggtgacgtcacaaggtagcgcgtaacggggcccgctggggcagacaacgccggggttacaggccggctctgcggggattctacggagggtcgggcctcctccagtaagaagcgtgggcgagtagtggtgtcgccagtggcaactgaagggagtaatggagataaaacaaaagcgaaggcgaagttaaagcactccacgagttccctcggattaaacgccggagagagcgtgaatttgcctcggggacgcctctccaggtgaagtatttaccttttggccaataacaaataggattaggagggacttaacgatttagtccaatagaaagcaagggaaaaaaagttgcggcagagaacgagcctttcgcgaacatttgctcaattggattggggcgctctcagccaaacctgggactggctgttagaaatagccgcgaccgcagacctttgggcggggcaggttcaaagcggatttcgcgcgctgagagctccgggatgtcattggccggcgacatcctccctttgtgggcgcttcctgcgtcgcggaagttgggagttgggaggagccatcgaatgacgcgatagccttcgcagccaatcagggatgggaaagggaggccgagaaggaagcggatccacggccgcacagctaaacagcaaccccctacccgcttcgtctccctccgccgctatcggggcctaagcgggagcggctggcacggcgtcactgggtgggctggggcggaagtggaggcggagggagacggtggcgtcgtccgcggggccctgggctctcgcggcgaggccctggtgggcgcgaggc

SEQ ID NO: 8131 - DNA, 2300 bp, Homo sapien
ctgttggtgggatcgtaaactagttcaaccattgtggaagactgtggcgattcctcaagtatctagaactagaaataccatttgacccagccatcccattactgggcatatacccaaaggattataaatcatgctgctataaagacacatacacatgtatgtttattgcggcacggttcacaatagcaaagacttggaaccagcctaaatgtccatcaagactggattaagaaaatgtggcacatatacaccatggaatactatgcagctgtaaaaaagattgagttcatgtcctttgtagggacatggatgaagctggaaaccatcattctgaacaaactattgcaaggacagaaaaccagacaccacatgttctcactcataggtgggaattgaacaatgagaacacttggacacagggtggggaacatcacacaccggggcctgtcgtgggttggggggaggggggagggatagcattagaagatatacctaatgtaaatgatgagttaatgggtgcagcacagcaacatggcacatgtatacatatgtaacaaacctgcacgttgagcacatgtaccctagagcttaaagtataattaaaaaaaaaaaaaacgtgatgggaaagaattaggtatacctctgtgaaaaatcaaaacatctgtacatcaaaactagaattaaaggcagataataaaatgaagaaaactttttcccatagaaaaatgggcaaaggaaattcatgaaagggagaaaattagccaataacatatatgaaaagatttatactttgatggaaatggaaaataactaggagtagcatatttttctcattagaatggctatgattcttctttgacccagtaactttttagtttttaattattgatcattagaaaatcttttaagactgattgcctgagggaattctcactatttaataatgctaaagtgaaaaaacctacatatttgttttgtctcaatttattttacacatataggaaaaaatttaaataaccaaatgacagtcattatctttgggtaataggattattggttatttttcagtgtgttttttctcagtcttctacatttactgcagtcaacataattttataatcaaacttgaagcggactttagaaagtacttaaaatgcggattttaaaagtattatttttgtgtgcttgactgtaactctatagttggtttctacatgtgctcctattaataaaatgtattaataagtaatagttactaatacatttactaattttaattaataagtaatatattaataagacagtaatgtactttaggactgttatgtgaactttgtatgattggctaaattttttaccactttataaaagtctttgaaatttttttaccatagtaatggggtttttacttgagcacatttcaaacactcaatgtcttttttttaatttattattattttttgtgagacagaatctcactgtcgcccaggctggagtgcaatggtgcgatctcagctcactgcaacctccacccctccacactccccaccccacccgggttcaagcgattctcctgcctcagcctcccgagtagctgggattacaggcgcccgccactatgcctgcctaattttttttatttttagtagtgacagggtttcactgtgttaggctggtctcgaactcctaacctcaggtgatccacccacctcagcctcccaaagtgctgggattacaggtgtgagccaccgcacccggcccactcaatgtctttaaattgattttttaaaaaacaaatatgagataattaacattttattgttcccaaagagtgatcctccactggactcatccatcaattttattttttatttagatgagtttattctttcttaatatactttctccgcatatgctgttacagcatccacgtttgtgtttgtatttggcagccatattttctgctcttaagaatcttcaagataagattcgacgcttggaacttgagaggattcaggcagaagaaagtgtgaaaaccttgtctagagaaacaattgaatataagaaagtactggatgaacagatacaagaaagggagaattcaaagaatgaggaatcaaagcacaatcaaggtttgttgatgaagaaaattaaaattctatcaaaataagtgttgtgcagtattaagtattctaaaagaaatagtacattagtgttttgtagcggtatcttcaagtactacaaaactgcattgtattctggtgcattttgaggagcaaatgctgttgtcatacatggca

SEQ ID NO: 8132 - DNA, 2300 bp, Homo sapien
cagagaccctaagttgaagaaggtgttgtttcagataggggtcaaggaaataagaaatagtatgtttgtagcattggatttttagtatcaatcctgttgagttacatttagatataggtagatattcgaataagcacgtagcacattctgcttgtcctcacatccagatcatttctaggactaattctccaagaagcagtcatacgtacacttgaatcttcagtttcttcagcacttgaatgtaaagctgtattgtcatatatcaagtactgagtgaagtgcctaaaactgtgctagttgacactactttataagctgtttgtgttgctggtggttttatatttagattccaactagattgttattctggcatcttgggaagtaaatgttcttctgaattttgtatttgtttatatttatttattttaaacccctagtaaattcgcagtgaaatcatggggaatataataaattagtggtgacaagcatttgaaaaaggtacagttgacccttgaacaacatgagtccgaactctgtgtgggtctacttacaggcagattttttttttcaataagtatcttggaaaattttttggagatttttggcaatttgaaaaaacttgcaaactatagcttagaaatatcagaagttaagaaaaagttggtatgtcatagatgcataaaattgactatgtcaatactagtgcattttatcatttactaccataaaatatacacaagttttttttaattataatttatcaaaacaatttgcacacagactacgtgacgccattcacagtccagagaaatgtaaacagagataaagatgcagtatgaaatcataactgtataaaattaactgtagtacatactgtacgactgataattttgtagccaccttctgttgccattgtgatgagctcaagggttgggagtattcacttaaaatgccacgtgacgctaatcatcttcaaatgagcagttcatctctccagtcaattgtgtatcacagtaaaaagtgttctctagcagttccatattttccatcatgtttagcacaatacagtaaataatttgaataatatcatgggacccatatcaagtgctactaatgatggtggaagtgctcccaagaagcagacaaaagtcatgacatgacaagaaaaagttgcattgcttgatatgtaccatagattgaggtctgcagctgcggttgtccaccatttcaaaataaatgaatccagctgaaggcctattgtaaaaaaaaaaaaaaaaaaaaaaatgatcccggcatgttggcgtgcacctgtggtcccagctactcaggaggctgacagaagaggatcactgtagcccaggagttcgagactgtagtaagcgatgatggcaccactgtactccagcataggcaacagagtaagatcctctttaaaaaattttttttaaaaaaaaaaggaaattgtgaatctgtcactgcagctactctagcaggtgccaaaaccttgtgctttttgcaaaatagctttttatctcattgaaaatgcagcttttatgtggatgcaggattgctataagaaaggcatacttgtagactctaatatgatttgagaaaaaggaaagtcattatatgacaacttaaaaggaaggtgaggtatctaaagctggagaatttaattccagcaaaggatggcttgataattttagaggtttggctttaaaaatgtcaagataggagaagcagcttctgctgaccaagaggcagcagatgaatcccaagataccattaagaaaatcattgaggagaaagggtatcttcctgaacaggcttttaatgcagacagaagtaccctattctggaaaaacatgatgccacgaaggatatttataagtaaggaggacaagtcagcaccaggatttaaggaaagaggagacgggctaaatctactattttgtgaaaacacaatccgatttacaatcaggactgcccttatctataaagctgctaatccctgagccttcaaggggaaatatacccaactgccagtctttgggtttacaacaagaatgaccctttgagaaccctttttctaaactggatttagaaaaaacattgatccatcaatcctttgtccctgaagtcaggaagtaatttgccagtaagagactgccttttaaagtctttttaatactaggcattgcccctagctacccaggagcatggaagttcaacaccaaaggcatggaagtagtctacttgtccctaaacacagtgtgtctaattcaccctctggatcaggg

SEQ ID NO: 8133 - DNA, 2300 bp, Homo sapien
ttataaaatagcagatattgaaggagcacgagagctcaatagttgatatgttttttaaaaattgtttcaagcatttttcttgcctgttgcctgttgtcattttgccttgcattcctcccttacttttctaatatattttagattagcaacatccattagtattataatacctcagtgaaaaatgtactttacgtatgtaagcgatagctgtgcatgtagcactctggtggacacttggtgcctgacttctgatatttatttgtatagatgaatggcaacaaagtcaatcatccagtcaaactgaatgagaccctgcactttgggaggctgaggcaggcggatcacctgaggtcaggagttcgcaaccagcctgaccaacatggtgaaaccttgtctctactaaaaatacaaaattagccgggcatggtggcgcatgcctgtaatcccagctacttgggaggctgaggcaggagaattgcttgaacccgggaggcagaggttgcagtagccaagatcgcgccattgcactccagcctgggcaacaagagcgaaactctgtctccaaaaaaataaataaataaataaagaataggaacatttggccaggtgtggtggctcatgcctataatcacagcactttgggaggccaaggtaggtggtcaggagattgaaaccatcctggccaaccccgtctctactaaaaaatacaaaaattagcccagcatggtggcgtacggctgtagtcccagctactcaggaggttgaggcaggagattcacttgaacccaggaggcggaggttgcagtgcgctgagatcgcaccattgcactccagcctgggcgacagagtgagactctgtctcaaaaaaaaaaaaaaaaaaaaaaaaaggaatatttgaagtcttactgtttccttccacctcctgaatatgcttagcacaggtccacactgaatatttagtgaattaatgtctgttatattaacatcaaattgggttccacaaatgaatacgtatccctacattagaatatctaatcctgaaagcctgataccacaggctgacaacaactatcccaacactttaggagatggatagtagaggtcagagagattgaacaggatggcttctgtcctggtgtcgtttaatattttagttatatagtaatttgtcttatgtttcatttcacatgtagggaattccaaatgaaagctggagaataacaaagataaatgaacgatatgaactttgtgatacataccctgccctcctggttgtgccagcaaatattcctgatgaagaattaaagagagtggcatccttcagatcaagaggccgtatcccagtaagtaggaagtttggatgagcctttgcaagtgcttttttactcaacataatgctgagattaatgagtaggagaatggattcaggatataaatagctacagcagcaggtctttcatggggatattggagattgatttatttagtaaagttaaaactggaagaaagacttaaagaggcttccagagagtgtgatatgggtattagataactgcacagaattgcatgattcttcactgaaaaagtttgctgtgtgtattagtcactatttatttatcttattgtatattctttagtcatgatgataaatgttcttttttttttttaagtcctagaaagaacaccttacagatttataactggatcttagaaagatgagcttaaataattttaggtacaaaattcatagattctaaaggcttttagaactgagcagttttactaatatattaagtggggtttacttagccctgtttcacagtatttttttcaggagataacatttcccaataatcaaatactttcctaaatcagtatctgactaaagaattagaccaagttttccacatcccagaattggcttgaaggaaaggtgatgatttttcttagcagcctcagatgtcctttcatggccaggctttggatccaattagaaagcagagctttactgagtactgtttttgagaattataaacagagaagtatgtaaaaggtgtgttaccattttttcctcattaaggttttatcatggattcatcctgaaagtcaagccacaatcactcggtgtagccagcccatggttggagtgagtggaaagcgaagcaaagaagatgaaaaataccttcaagctatcatggattccaatgcccagtctcacaaaatctttatatttgatgcccggccaagtgttaatgctgttgccaacaaggtcagatggtctcttagtaattataattatg

SEQ ID NO: 8134 - DNA, 2300 bp, Homo sapien
attaatttatgagatctcaatggttttttggtgtagtacccatacatgaactgttgtcagtctatgatgagatcaacgcaatattgagaataagtgtttaggaactttcacgaaactttcaaggagtaatatctgttaaatctaataaacaatttggccttgtattttgcaaacctttttctttaattttcctagtgcagttatcccttagtatctgcaggttattggtttcaggacccccaaggatagtaaaagctaaagatgctcaagtctcttaaataaaatggcattagtgtctacatataacctatgcataccctcctgtatactttaaatcaactctagattacttataatatctaatacaatgtaaatgttatgtaaatagttgttatactgtattgtcttctatttgtattattttgttttttacaatttttacaaatttttcaatctgtggttggttgaatctgaggatatggaaccaactgtgattaatttttcttatattttaaaaaagttttggttggtgatggtttgaaaattaaaaacaaaacactgttccttcttgcagatagtttgagaaaaaacagcccagattataaattgaaaaattaataacttttggtgaggtcccaagttaaccatgttttttcattttcttagagttcattaattaattagagttcactaattaatttccagctgatattctttgcttgtgttttcactctgagaagttaccattttaccagtcaggttagaagtcaagcagtaagttcagtggaaaaacaagtaataataaatctacttagtgagaccgtactgtgcaaccgactctgcacagagaaaaacaacctattacgtagatatttttattcccattttattcccattttagagatgtgaaacaacttaaccacagcacagagcaagtgtagagacagaaccgggattccgatgaagatctgtctggttccaaagtctctacacttttactacactgttctttattaatcactagatagaaccatacacatattgttacatcaggcagaaggtttcgagggttctattaacaaagtgctacgaatgaactgggtggaagaaagtacataggtctcccattcaagggttcatcagccttcactaaggaaatttaagtcaaagtagctgacagtgagtcagcattttggaaggcaggtagagatggtgaagaaataaggaaattcttctatgagtcatgatagatatttaagcttgttaaaaaatgtttttgactacctactccctttgcctacagagtccagttaaggtatcttaaaaattatggaaataaaaacaatcggtcgctgtctgtcctcgccaaactcaaaaaaggctaagccttttgtgcttaaacacatactcatcagtaactattctaccttacactgaacataactaagctaggttgttcttcttgggaatgtacttgcaagttaatactgcactgcaactataaggttttttaaaagacatcagttgtacattataaattaaatctagtttaaatcaatataattcaatttatcctagcaaggaagttttttaaggatggtctgattttttttttacaggaataatctttgcataattttacaccccatacatgagatgattaggattcaatctcaatcagaaaaatccctttatggtgtccttatggctttcctgtatcctaacagaaaaatcctagcagaagcatttcccctttacccagttcctgttctcttatcacagttctattcctccacactcccttcctgctaggcacgggaatttgaaagggcagggaaaaatcggtgaaagtttgtcttctacttgggtaatccaacaccaccgcatccagtagtatataattctttttgcatgtatatcagatcctccccaatccctctcccatacctctttctcacttttctctcattatccggtcctcttgttttccttgacccccacattcctgtctaaatcatcctcctggcctcaggtccttatcgccttcctgagaccctcatgtttagtgttccctcattcctcttacacctaggatttctcctccttccataagggtctggtccttcatccctcccgcttcaccagaccccctcaccctgggagccgccacctccctttccccaagaccagatgtcgcgcggccggacacagccagcacggagagtcgatgccggcgtctgagctgcgcagtggggtcttcccgctgcccagcagcctacaggcgcggtgcactctggggg

SEQ ID NO: 8135 - DNA, 2300 bp, Homo sapien
acattgagattgttcagaaaaagaagagttgacacctttactgaaaggagtcaaggtcttgcaagcaggaaactggttttatgacaattccctgccttgctaggtaagctggtccacatcgagatgactctctccttgacttctgacttactttgtgtttgttggaggaatcctatgagtcatatttagcctttccagcctgattgagtttgaaggagccactggattattgcatacaatggattttgcaaagagttttctccagcatacccacaggagaaaggcaagtcggttcataaatggaaattctagacaaacaactaagctaaagacacctctctgtataaatgcttccagatggagacaagtttttcacttcactctccacagttttcactttaaagggttattgagatggaagcattggagcgaagcacattagaatcacttgccccaccttgccttctgaggaagaatgacttacggttgcaaggggaaaatgctggctaaaaaataaatcttggtctgttccccatagtctatcaacacatgcttttcagaagaagaaaaagaaaaaaaacatctggaaagaataggactgagttggtagaacatcttgaagggggctggccttcacttagaaaattgaaaagacatgcagataagccattaggaagaagagtctgtggttgttaagcagagttacctaaagaaggaacttcaagatacaagtttaaagcaacactctgtaattatttgtattatagtataaggttgttaagtttgtcttcaccctttgaaagagttctgaacagagttagtgttttcgtaaaaaatctcagggcctacaaaaaatgccatttggcctccacaataagttgctcccacccagaaagtcctctcccttctacagcttcctgtataaaaggctgggataccaacatctgcctgaagcaaaaacacatgtattttaaccaaataaataaaaaggaacaaaagtctgagtacatcatgctgctcatagtcttactggctgactcccattggctctctcactgttgttataatttcgtttatgccctaggcagatgggcctctctgctcataggtgatttagaatctgctgatagtggctggaatgaagcatggaggatctggcaacttctaagcacactggcttagaccactgtattcttgggctttgatgtttactccatatatgattcccatcaatggtgatacctgggccattgtccagtgggtgaatgtgattttcttctttggagaagcccattgcaaatcacagctaatagggaccctaatgaggacgttcacctcccagctcctctgtgccagggcagtggataacaacaggatgtgggttttaaacacatgtaagcttcttcaagctgcctctttcagtttcattctttttttaaggcactagaaaatataatccacatacttgaaacaaacattttttcttgctgctaatgttttttgtcgtagttttctcccatgtcaggagtggattccactctgattagtaccaagatatattaattggtacaatatgtaaatgaaaacatgggatatttacaaggtaggcagaagatgatatatgcttataagtttcactttcagtaaatatgaaaatgtattttattcatcctccatggttgttgttaaagccactctgctataccttggacttagcaaatgattttgatgaataggaccaaaagatgtcaagagccacaaacctatcacggtaaaaattaaaggcatttagttccaaattaatttatttaaaaagaagttgtaatatttgaacaggccataaaattaggatcaagtaagcaaatctgtaggcattttatcagagacaggagcaatgagagactgcaggaaatagaagggaatcagacttttattctttataaagttgttattccagtcctcaccatcccctttgctcctcttcccaattcattattttcctttctgttactagtaagtccttctcgtctctcctcttcttcccatcacccccaggatacacagtaaagagagaataccagaaatgggcagcactggtgagcaaagaaatattatagaggtttttttttcattccaagttttaagttgtccttgtgcatgaaatatgcacatgataaaaagggggttgccatcaatgcatattgtcttgaaaagccaagggctctttttcggtttttctctataatgaagactgttagactgtggactctataattatgctcactgaacaaataccttga

SEQ ID NO: 8136 - DNA, 2300 bp, Homo sapien
atggaatactatgcagccataaaaattgatgagttcatgtcctttgtagggacatggatgaagctggaaaccatcattctcagcaaactatcacaaggacgaagaaacaaacaccgcatgttctcactcataggtgggaattgaacaatgagatcacatggacacaggaaggggaacatcacactctggggactgttgtggggtggggtgaggggggagagatagcattaggagatatgcctaatgctaaataacgagttcatgggtgcagcacaccagcatggcacatgtatacatatgtaacaaacctgcacgttgtgaacatgtaccctaaaacttaaagtataataataataaaatttaaaaaaagaaataaaagaaattataaaacaaacaaaaaatctgagtgtatttgtccccatttccaagctaacaggattggtgaaaataaaatggactaaagtaggctatcctatagggaactaaattgcaaataaatccagtattgagatgtttgccttgattttgcctatttctatccatagctcagtttgaaacgaccatattcgtgaaatgccagagtttgtttagattactgaaggtatattatttgagacctcaaatccaaatgacttccaaattaggatacccagaatatttttggtcctgactgttgcagtattatgctcaccttaatttaatcttcataattgaaaataagcagaatccacaataagttttttttttttttttggagacagagactcaccctgttgcccaggttggagcgcagtggcgtgatcttagctcactgcgacctccgcctcctgggttccagcaattatcctgtctcagcctcccgagtagctgggattacaggcgtatgacaccatgctcagctaatttttgtagttttagcagagacggggtttcaccatattggccaggctggtcttgaactcttgaactcaggtaatacacctgccttggcctcccaaagtgctgggattacaggcgtgagccactgtgcctggccaggattggatattttaaaggttggatcacttgaaaatgggggaacaatgatctgtgtgagatctatttggtttctattattaaacttcttgaaactcagagccaggtgcagtagtggtgagtacctgtagttccagctactcaggaggctcaagtgggaggatcacttgagcccaggagttcaactccagcctgggcaacataacaagactccattaaaagaaaaaaaaaaaaaaaactttttgaaactcagctgctacacattgactttcctcattgtatatgtgcaccaggtagctaaggatacttcaggtcttatatttggtttttcataggcaatcatgcattcccaaaaaaaaagcgtttttttctagaactggtatcgataattgtatcattctcataaaatattttatttatcccaactgatttgcctgtgatcacccagactcacttatccagagacacacaaatgggcaggcaggtagacaaacgctacacctgcctgccctttaggagctaacaatgtgattacctctcctctccacgcgcaaccccttccgccctcaacacacacattcatatcttccttattctattaatgaacatttcctcggtgctcacacagctcgtgctaggttgctcagtggtgtcatttacaatatactgaaaaatgaaaatgatatcctcagcggggcgtaatgtagggctgaaagggaaaacacattcctggcccggaatttcttaaacatttagagctggtgaaatggttgtgtagaggttggggaatttccccagccttccccgcttaaccgagtctgatgctgagctgagccagggcagctgagatgcgcagggcttgggatttacctcttcagccactgggaggccctctgcgttcccctttccccggtgcctggctgcgattactcactcgcgcagtggcaccagccttccaccagggagcctcgaacgagctctcccgccctctccccgcccccccacccccatctgcagcttgctggctctctctttctccttctctgtctcactctctctctttctctccctctcctatcggagcacaatgaaagcctgtgtatcgccgtgactccgggcgcgagccagtgtcagcaaagcggctaacaacagacgagaaagagaaaggaaaatacaagctactttttttttccatctataaagcggagcaaatacaggagatagaaccagattgcttattgcgagtccagaccctcagatccact

SEQ ID NO: 8137 - DNA, 2300 bp, Homo sapien
gaaacatagtccggtaagattcccattgctcaaaaaatttttggcattgaatttttgtaattaccttcagaattcgcagcacattttttgaagatttttaatggtagttaattctcatcttcttaagttggatttcatttctgcaagctgctaacaggtccttataaccgagacaagtgaatgaagtgggtgttaaagtcactgtttgggataaaaaatgaagtgtgattattttcatatttttagattttttatagtgtgtggtttatagaaagactccaggaatattctgtgctgtggtggaaatattggaataatcagcctcataaggtgatttctttggtggggatagctgtcagttcaatatatacctctaacatgtagtttgaggtcggtctcattacattgtcatatttctattccctaacaaccacagaactacatatgttattttttctagttatcttacgtgtcactaattgttcttttaatatatacttgtgataattttaatggaattcattcttttctaaatgataaactgacagcttttgttttccttcccaatactatgctctgctttgccgtggaacttacttgttttattcacttaactacattattggattgttagttaagttttctattggttatattgtgtatttaactttgaggggaaagccactcccattttactaaggtataaagaggctacaatcttagtggatatattatctctcaatttttcactgctgtcttctttatgtcatttgttactttataactttcttcgtgtaaattgatcttttatactttatatcatttctctattcagaatcctttgcctacagggtgagtcatcctggtaatcccattcagttttctattcttttctccttttttccagcataaaactcttttttatacattttaagccatgcttatttactgaacataccatcttctttcttaaagccagagtttgcccttaccatattacttgcctgacatccctttttctttcgttctttctgttcaaatacaatgaatccttcagaatgctattagatcacatctgttcaagataaagtgaagcacttgccttactgatctccctgcatctttccacttctcttgcagttatttatgttattcatttgatactaaatattaccttgaaattttcttaattattatatgttttagatattttagttctacatatagataataatcttctgaaggacagcaccatgatttttctatgtatcccttgcagcacaacatacaacgtaattcagagtagatgttcatataattatttcatgggcattcagtaaattatttgttaaattaatgttctaccatcttcactcagatatttcatgtgattttgtgtttgtggaccattaaataaagccaaataaatataatttataccataaatgcattcattgctctaatctggttatcactgttatattcctaacaactttattttatagaagcttaagtgaaaatgatacatgttagaagacatgaaacaaggagaaattctaagagtcacgtgcctgagcagaaatctcgagttgattggaggcgaactaaaagaagtagtatctcacaattacttgatagtgatgaagagcttgatagtgaagaatttgatagtgatgaagagcttgatagtgatgaaagttttgaaaatgatgaagagcttgatagtaacaagggacctgattgtaataaaacaccaggaagtgaaagagagctcaacttaagtaaaattcaaagtgaaggaaatgacagtaagtgtctcattaactctggcaacggttcaacatatgaagaagaaacgaacaaaatcaaacataggaatattgacttacaagatcaggaaaaacatttaagtcaagaggataatgatctcaacaaacaaactggacaaataatagaggatgatcaggaaaaacatttaagtcaagaggataatgatctcaacaaacaaactggacaaataatagaggatgatttagaagaagaagacatcaagcgaggaaaaagaaaaaggctatcctctgtgatgtgtgacagtgatgagagtgatgacagcgatatcctagttagaaaagtaggtgttaaacgtccccgtagagtggttgaagatgaaggttcttcagtggaaatggagcaaaagactcctgaaaaaacattagctgcacaaaagcgagaaaaacttcagaagctcaaagaactctcaaaacaaagatctcgtcagagacgcagtagtggtagagatt

SEQ ID NO: 8138 - DNA, 2300 bp, Homo sapien
ttaaagggtaattttgactacacacaattttcatctttgctgattttaatataagccttttgtaagatgcaacccaagggtaatttcaaatagcagactgccctgttgaccagaatttgttagattgctattacaatgctgattatattttatagcaattactgacataaggttatactttgggcaatggctcatgcctgtaatcccagcactgaggccaaggtgggaggatcacttgaggtcaggagatcaggacatagtgagacctccatctctacaaaaaatttaaaaatcgaaacatatcgcttgagccccaggagttcaaggctgtagtaatctatgatcatgccactgcactccagcctggacaacaggacaagacctatctcttaaaaaaataaaagttatatttcatcctacacgctataatttctgctgtataattttggcagcccccgttctgattttacatgaggtgttaaccattatacagaaagtcttattgccgtataaacataccagaatttgtacaattaaatgagctgtatcctctcttccacaatctataggaaaaaagtaatcctcttggaaagctggaaacatagtccggtaagattcccattgctcaaaaaatttttggcattgaatttttgtaattaccttcagaattcgcagcacattttttgaagatttttaatggtagttaattctcatcttcttaagttggatttcatttctgcaagctgctaacaggtccttataaccgagacaagtgaatgaagtgggtgttaaagtcactgtttgggataaaaaatgaagtgtgattattttcatatttttagattttttatagtgtgtggtttatagaaagactccaggaatattctgtgctgtggtggaaatattggaataatcagcctcataaggtgatttctttggtggggatagctgtcagttcaatatatacctctaacatgtagtttgaggtcggtctcattacattgtcatatttctattccctaacaaccacagaactacatatgttattttttctagttatcttacgtgtcactaattgttcttttaatatatacttgtgataattttaatggaattcattcttttctaaatgataaactgacagcttttgttttccttcccaatactatgctctgctttgccgtggaacttacttgttttattcacttaactacattattggattgttagttaagttttctattggttatattgtgtatttaactttgaggggaaagccactcccattttactaaggtataaagaggctacaatcttagtggatatattatctctcaatttttcactgctgtcttctttatgtcatttgttactttataactttcttcgtgtaaattgatcttttatactttatatcatttctctattcagaatcctttgcctacagggtgagtcatcctggtaatcccattcagttttctattcttttctccttttttccagcataaaactcttttttatacattttaagccatgcttatttactgaacataccatcttctttcttaaagccagagtttgcccttaccatattacttgcctgacatccctttttctttcgttctttctgttcaaatacaatgaatccttcagaatgctattagatcacatctgttcaagataaagtgaagcacttgccttactgatctccctgcatctttccacttctcttgcagttatttatgttattcatttgatactaaatattaccttgaaattttcttaattattatatgttttagatattttagttctacatatagataataatcttctgaaggacagcaccatgatttttctatgtatcccttgcagcacaacatacaacgtaattcagagtagatgttcatataattatttcatgggcattcagtaaattatttgttaaattaatgttctaccatcttcactcagatatttcatgtgattttgtgtttgtggaccattaaataaagccaaataaatataatttataccataaatgcattcattgctctaatctggttatcactgttatattcctaacaactttattttatagaagcttaagtgaaaatgatacatgttagaagacatgaaacaaggagaaattctaagagtcacgtgcctgagcagaaatctcgagttgattggaggcgaactaaaagaagtagtatctcacaattacttgatagtgatgaagagcttgatagtgaagaatttgatagtgatgaagagcttgatagtgatgaaagttttga

SEQ ID NO: 8139 - DNA, 2300 bp, Homo sapien
gctctttgggtgggccggagaacgcccctcagccctttgcgcctctaaccctcctcagctgagctgcagtgggcgcggtgcccgttatttccgccttggggaggtgcttggaactgatgtagggagctcggttggtgatttctcgggtttctggcctttccagacccttgtaattgttttctcggtgcagagctcttttggggtctgggggtttccgtcgtcctgcgcgcgtcatcgcgaagcttggcctgagggtccggtttcctagctactgtgcccctccctcctggaggcagagtgacggactagtgggctagcgggcgctgggttcctgcgtcccgccaaagaggtttgtaatcatgaaagtcacccttccgggtgttaattcctgagaggatctattccactgtctaccactcattcctgctgcattaaccttcattgttaacggattttaatgaataatatagttatcccggataccatgctggcaggatccactttgcgaaattgtggactgttggactgtgattctaagtgggggaaataggctttcctctctttatgtttattttcttatatcctatttctgtcatgttctgtcttgttttcctgccaatagaagaactatgataaatttattcatagcagtgtgataagaacttgatcttaatcatacactgtagccctcaaatcgtgtattatgctggcttgtttttggtgtccctagtaatttcatcagattgtgagctccttgggagcagagaccatgtttatttgaaatggtggcagcacagttcctagcaggtgcttgcattttggtagatattcaataattatttttcggcttattaatctttgctctccaaactgccatataaaagaaaacatcgaagaggagtgatgttttacacccaagaatggatccctcctggtagaatttcaaataatgacctggggttccactgcctttcaaatctgtaaagtgttaactaccacctgcattgtttatacagcaagtaggtgatttctagaatgaatcttttcttgagtatgaattaacctcaaagtttagaaggaactatatttcttctgatgagaaagtcaaatggcatcatcaaagtacttttagctatagagttactgtgttagagaaagaacacaagcaatatggattattgtctttaatatatattctttggcagataacatagctatgtatgtgcatcttatattaaccatgaaacacaaagatgtgatagtattgatcatcttcattcacttatttaatgctttctgtttggagtctctgtttttctctttgcttaaaggtaaggtatcattacagaagctcgataaaattctcatttcaggaaattaagtgtatattcaacatatacagaagtaacattcatttgcatggattctcttttgagtagattctgaagaccaagaggtatcttacccatcaaactagctttccttcacatttctcttccgaggttcactcaccttttccctccgttatcattcttcccttcccagctaatatagtaaagctacctacaatttaaaaagaagagccaaacatattcaaagtgtctttccttttcagtaacagaattttttaccttactgatataaatggtcattttgaaatatgagagaccctggcaatttggcagttggtccaatgaaacctgatttattttgtttaaataaaagatgctgcctcaggcattcaaattctgcagttttccaaaatatgtttctcatcagagactgcctttctttgaaattttacttttgggctcactggggactcctttaaattttgcaattggtgttattaataagatgataagagggaagtctgcaaatactcttttcttgcctggtggataataatttacagaagtttctggcctaactcgtgcagtaaaattcggttacataattttttaaaaaagcatatttgtaaactctaaaccattttaatcgttatttttctgaaactaaaatacagcatgaatgagagataaaaataatgatttttaaaggcttaatttttactatcttgtacaaatgtgatattggcagccgtcattgtgtggcactggacggggaatcaagagacccggtttctaatccctgctctgtcactaacaagctgcgtgatcttcggtaagtcatttaaactctatgtccttggctttgatatttacacataaaaatagatatcttccttctaggatcattgtcaggatttaaaaatcaatgtgaaaatgcactaaaaactt

SEQ ID NO: 8140 - DNA, 2300 bp, Homo sapien
gagtccccagtgagcccaaaagtaaaatttcaaagaaaggcagtctctgatgagaaacatattttggaaaactgcagaatttgaatgcctgaggcagcatcttttatttaaacaaaataaatcaggtttcattggaccaactgccaaattgccagggtctctcatatttcaaaatgaccatttatatcagtaaggtaaaaaattctgttactgaaaaggaaagacactttgaatatgtttggctcttctttttaaattgtaggtagctttactatattagctgggaagggaagaatgataacggagggaaaaggtgagtgaacctcggaagagaaatgtgaaggaaagctagtttgatgggtaagatacctcttggtcttcagaatctactcaaaagagaatccatgcaaatgaatgttacttctgtatatgttgaatatacacttaatttcctgaaatgagaattttatcgagcttctgtaatgataccttacctttaagcaaagagaaaaacagagactccaaacagaaagcattaaataagtgaatgaagatgatcaatactatcacatctttgtgtttcatggttaatataagatgcacatacatagctatgttatctgccaaagaatatatattaaagacaataatccatattgcttgtgttctttctctaacacagtaactctatagctaaaagtactttgatgatgccatttgactttctcatcagaagaaatatagttccttctaaactttgaggttaattcatactcaagaaaagattcattctagaaatcacctacttgctgtataaacaatgcaggtggtagttaacactttacagatttgaaaggcagtggaaccccaggtcattatttgaaattctaccaggagggatccattcttgggtgtaaaacatcactcctcttcgatgttttcttttatatggcagtttggagagcaaagattaataagccgaaaaataattattgaatatctaccaaaatgcaagcacctgctaggaactgtgctgccaccatttcaaataaacatggtctctgctcccaaggagctcacaatctgatgaaattactagggacaccaaaaacaagccagcataatacacgatttgagggctacagtgtatgattaagatcaagttcttatcacactgctatgaataaatttatcatagttcttctattggcaggaaaacaagacagaacatgacagaaataggatataagaaaataaacataaagagaggaaagcctatttcccccacttagaatcacagtccaacagtccacaatttcgcaaagtggatcctgccagcatggtatccgggataactatattattcattaaaatccgttaacaatgaaggttaatgcagcaggaatgagtggtagacagtggaatagatcctctcaggaattaacacccggaagggtgactttcatgattacaaacctctttggcgggacgcaggaacccagcgcccgctagcccactagtccgtcactctgcctccaggagggaggggcacagtagctaggaaaccggaccctcaggccaagcttcgcgatgacgcgcgcaggacgacggaaacccccagaccccaaaagagctctgcaccgagaaaacaattacaagggtctggaaaggccagaaacccgagaaatcaccaaccgagctccctacatcagttccaagcacctccccaaggcggaaataacgggcaccgcgcccactgcagctcagctgaggagggttagaggcgcaaagggctgaggggcgttctccggcccacccaaagagcgcccgcgggaatttttctcttagtccgcgaggaggcacggcttcccccgcccctctcataaaccattagcaccgggagcgcgagcgagtcccagccgggagacagccccgcaccgccctcgcgctctcacctttcaaagcgcctccacctctgcctccgcctccgcccctgccccggcaaccagctcaggacaagcgatgctcctcccccccttccggggaccaagggaagtcccgcctctgggtggggcgaggggtggggccaggcggcgggagggatcatcttccgggagcgtggctaggggcggagcgactgccgcgcgatagtcagggagctgtgcgggtcctggttgcaagagaggtggggagaggggcctggcgggttttgagggactgggaggactgtcccggctaaagctggcgcgggaaactggggctgcgcggcgggagggccctgctgctggggaaggaatcta

SEQ ID NO: 8141 - DNA, 2300 bp, Homo sapien
tgtgttctttctctaacacagtaactctatagctaaaagtactttgatgatgccatttgactttctcatcagaagaaatatagttccttctaaactttgaggttaattcatactcaagaaaagattcattctagaaatcacctacttgctgtataaacaatgcaggtggtagttaacactttacagatttgaaaggcagtggaaccccaggtcattatttgaaattctaccaggagggatccattcttgggtgtaaaacatcactcctcttcgatgttttcttttatatggcagtttggagagcaaagattaataagccgaaaaataattattgaatatctaccaaaatgcaagcacctgctaggaactgtgctgccaccatttcaaataaacatggtctctgctcccaaggagctcacaatctgatgaaattactagggacaccaaaaacaagccagcataatacacgatttgagggctacagtgtatgattaagatcaagttcttatcacactgctatgaataaatttatcatagttcttctattggcaggaaaacaagacagaacatgacagaaataggatataagaaaataaacataaagagaggaaagcctatttcccccacttagaatcacagtccaacagtccacaatttcgcaaagtggatcctgccagcatggtatccgggataactatattattcattaaaatccgttaacaatgaaggttaatgcagcaggaatgagtggtagacagtggaatagatcctctcaggaattaacacccggaagggtgactttcatgattacaaacctctttggcgggacgcaggaacccagcgcccgctagcccactagtccgtcactctgcctccaggagggaggggcacagtagctaggaaaccggaccctcaggccaagcttcgcgatgacgcgcgcaggacgacggaaacccccagaccccaaaagagctctgcaccgagaaaacaattacaagggtctggaaaggccagaaacccgagaaatcaccaaccgagctccctacatcagttccaagcacctccccaaggcggaaataacgggcaccgcgcccactgcagctcagctgaggagggttagaggcgcaaagggctgaggggcgttctccggcccacccaaagagcgcccgcgggaatttttctcttagtccgcgaggaggcacggcttcccccgcccctctcataaaccattagcaccgggagcgcgagcgagtcccagccgggagacagccccgcaccgccctcgcgctctcacctttcaaagcgcctccacctctgcctccgcctccgcccctgccccggcaaccagctcaggacaagcgatgctcctcccccccttccggggaccaagggaagtcccgcctctgggtggggcgaggggtggggccaggcggcgggagggatcatcttccgggagcgtggctaggggcggagcgactgccgcgcgatagtcagggagctgtgcgggtcctggttgcaagagaggtggggagaggggcctggcgggttttgagggactgggaggactgtcccggctaaagctggcgcgggaaactggggctgcgcggcgggagggccctgctgctggggaaggaatctaatatatccgttcccctgaggaagggtgccagtccttgactcctaggctcttcggctctctgtcgtaactttggggtgtggcaggggttagtgacgcgcggttacccgggatctggacgtgcaggaggttcgtggccacaatgggggtatagtctttctcacggctgctggggtaataaaacacatgcttttaatccggattatccgcggtgacatggggcctccgctactgcccgtataagttaaagaaaggcctgttctctcaaacttcctcctctttcaccttcttctgcagtctatttgccagccaaccccagcccgggaggggatcagggccaccaggttgctggtaaggatgaaagactgagtgtgttaagactgttgaagtgagcctgtgtaagagaaggaaggattttgtggattgctacattgtgagtgtggggtgagtcccagaacctcgctatgtcagggaaacggaagcgtgtggtgttgactattaaagataagcttgatataataaagaaacttgaagacggaggttcttccaaacaactggcagtgatttatggaattggtgaaacaacagttcgggatataagaaaaaataaggaaaagattataacttatgcaagcagttctgattccacaagtcttttggccaa

SEQ ID NO: 8142 - DNA, 2300 bp, Homo sapien
cttgtgctcttctgatgatttcgctatcagttaacacttcatagcctggttcagtactgtctacttcaagccatttttcaaggttctcagtagtcacattttccaatcctttggtgtgttgtaaaatggcagccacagtagccacagaaatatcttcaacatcaaagtccaggctctctttctcctctaccatagggagaatcttcttccatgctctgctaatggtaactggttttactaagttccatgccattgctatttcataaagtgcatccaacagagttagcttcttccagaatgatttcaggtcattaccttcttccaagttgttctggagaagacctgcacgataatttctcttcatcgttgctatgactccctgatctgaaggctgaatcaatgaggccacattaggtggtaaatatttagcaaatatttggccatcatctgaccttaggacattttcatttggatgtgttggtgaattatccaacaagagcacagccttttcctgcaagcctttagatcttaaatactctcgaacttgcggcacaaaaattttatcaaaccattgtcggaaaatggaaagatccatccatgcacctttttggctgaaataagagactggcaggtttaaggtgtcagttgatttaaaggagcgaggtttctttgctttccccacaacacaaagtttaagtttgtgtaaacctgttgcattggcacaacacatgattgtgactctttcttcaattgatttgtgcccagggacagtgcatttacctttgattactgaaatcctagaaggcaagcacttccaaaagagtccagtttcatctgcattgtagatttgttcaggctgtaaattctctcgttcaataaaatctcgaaagttattacaaaaatcttccaccgcagtctcatctccatttaatctttcatttctaatgttaatctctctaatgctgtgccgctgcttaaaacgagttagccaaccggcagaggggttaaaatcaccatccattcccaaagcataaaagaagaactctgccctttttgcacaaattggtccagatatgggattcccttttgctctttgctggttgaaccattccagcattgccctgtccaattcctcatacatggatggcttcatagatttcctcttggccaaaagacttgtggaatcagaactgcttgcataagttataatcttttccttattttttcttatatcccgaactgttgtttcaccaattccataaatcactgccagttgtttggaagaacctccgtcttcaagtttctttattatatcaagcttatctttaatagtcaacaccacacgcttccgtttccctgacatagcgaggttctgggactcaccccacactcacaatgtagcaatccacaaaatccttccttctcttacacaggctcacttcaacagtcttaacacactcagtctttcatccttaccagcaacctggtggccctgatcccctcccgggctggggttggctggcaaatagactgcagaagaaggtgaaagaggaggaagtttgagagaacaggcctttctttaacttatacgggcagtagcggaggccccatgtcaccgcggataatccggattaaaagcatgtgttttattaccccagcagccgtgagaaagactatacccccattgtggccacgaacctcctgcacgtccagatcccgggtaaccgcgcgtcactaacccctgccacaccccaaagttacgacagagagccgaagagcctaggagtcaaggactggcacccttcctcaggggaacggatatattagattccttccccagcagcagggccctcccgccgcgcagccccagtttcccgcgccagctttagccgggacagtcctcccagtccctcaaaacccgccaggcccctctccccacctctcttgcaaccaggacccgcacagctccctgactatcgcgcggcagtcgctccgcccctagccacgctcccggaagatgatccctcccgccgcctggccccacccctcgccccacccagaggcgggacttcccttggtccccggaagggggggaggagcatcgcttgtcctgagctggttgccggggcaggggcggaggcggaggcagaggtggaggcgctttgaaaggtgagagcgcgagggcggtgcggggctgtctcccggctgggactcgctcgcgctcccggtgctaatggtttatgagaggggcgggggaagccgtgcctcctcgcggactaagagaaaaattcccgcgggcg

SEQ ID NO: 8143 - DNA, 2300 bp, Homo sapien
caccaattttaaatcaggtaagcagcctcttcttactctcttctccaacctctctcactgtctctcaaccactttctcctttccagtcttcattctctcccttctcttaatttcaattcctttcattttctggtagagacaaaggagacacgttttatccgtggacccaaaactccggcgccagtcacggactgggaaggcagccttcccttggtgtttaatcattgcagggacgcctctctgattatacactcacgtttcaaaggtgtcagaccatgcagggatgcctgccttggtccttcacccttagtggcaagtcccgcttttctggggaaggggcaagtaccccaaccccttctcttcttgtctctaccccttctctgcttttctgggagaggggcaagtacccctcaaccctttctccttcacccttagcggcaagtcccgcttttgtgggagaggggcaagtacccctcaaccccttctccttcacccttagcggcaagtcctgcttttctggggaaggggcaagtacccctcaaccccttctccttcactcttagtggcaagttccgcttttctagaggaggggcaagtaccccaacctcatatctctgtgccccaatcccttatttccatgccccaacctatctctgtgccccaatcccttatttctgcaccccaacctcttatctctgcaccccaatccatttccacgccccaacctcttatctctgtgccccaatcccttacttctgtgccccaacctcttatctctgtgccccaatcccttatttccacaccccaacctcttatatctctgtgccccaatcccttatttccatgcctggacctcttatctctgcgccccaaccccttttcccacttttctggaagataagaacccccgacccttccctccgtttctctactctcttttctctaggcttgcttccttcactatgggcaaccttccaccctccattcctccttctactcccttggcctgtgttcttaaaaacttaaaacctcttcaactcacacctgacctaaaacctaaatgcattattttcttctgcaatgctgcttgaccccaatacaaactcgacagtagttccaaatagccagaaaatggcactttgaatttttccatcctggaaaacctaaataatttttgttgaaaaataggcaaatggtctgagatgcctgacatccaggcattcttttacacatcagtcccttcctagtctctgtgcccagtgcacctcatcccaaatcttctttctttccctcccgcctgtcccctcagtaccaaccccaagcgtggctgagtctttctaatcttcttttctacagacccatctgacctctcccctcctccccaggctgctcctcgccaggccaagctaggtcccaattcttcctcagcctctgctactccaccctataatctttttatcacctgccctcctgacacctggtccggcttacagtttagttccgtgactagccctcccccacctgcccagcaatttactcttaaaaaggtggctggagccaaaggcatagtcaaagttaatgctcctttttctttatcccaaatcagaagcgtttaggctctttttcatcaaatataaaaatccagcccagttcatggctcgtttggcagcaaccctgagatgctttacagccctagaccctaaaaggtcaaaaggccgtcttattctcaatatacattttattacccaatctgctcccgacattaaataaaactccaaaaatttgaatctagccctcaaaccccacaacaggacttaattaacctcaccttcaaggtgtacaataacagaaaaaagttgcaattccttgcctccactgtgagacaaaccccagccacatctccagcacacaagaacttccaaatgcctgaactgcagcagccaggtgtttctccagaacctcctcccccaggagcttgctacacgtgccagaaatatggccactgggccaaggaatgccgcagcccgggattcctcctaagccgcgtcccatctttgtgggaccccactgaaaatcggactgttcaactcacctggcagccactcccagagcccctggaactctggcccaaggctctctgactgactccctcccagatcttctcggcttagcagctgaagactgacactgcccgatcaccttggaagccccctagaccatcatggatgccgagcttcaggtaactctcacagtggaaggtaagcccatccccttcttaatcaatatggaggctacccact

SEQ ID NO: 8144 - DNA, 2300 bp, Homo sapien
tcatttctggcttcatcttatctctcctcctatcactttaccgtttgtcttgatctcactgacctacattttttattcatttttttaaactgaatagatttttataagccaacttacatcctttctagggcaaagctagttgaaagaaattatgtgacataatgactcaaaatgcccaaattatcggatcatgggtaatatagaatggtgttctaagaagggaagagaactttcagaaagctttctacactcccgatccctctttcaggctgcatgtgctcaattatacacttttaaaggcaaaaacctcatcgaacaataaaaagaatgcgttagagctcctacactttgaatttattttgtgatgtatttaatgtggttataaaagtcctggtagttctctctgtgaaccgacagcctgacagaggagaagagccagtggggcagagaaaaagccacagaaggggaatctccacaacgatccctcagttaacacataaagaagataacctagttactggaaagcaggaacacgaatataaaaagtatggaagagtggagaagtattaaatgcacacaaatttgtctttgctacagaacaagcaatcagcctagatcctgaggatagcgattaaaagcagagactgggtgtttgtacatcattggatgaatgagaagcagccaagaaacaggaaaagactaattttaattaccagaaaaactgcaagagaaagaacacagggctagtggtagacggcttccagctacaggctgcctggcactgtactctccttgccaattagagccagtcagaccccatcgggggattcagtgagcagaagaatcagcgtcagtccagggtcaggctgctctcaaacacacatgaaaaacggacaccagcggacacggggtgcgaccctagactcccatgcagtttcttatacagacacagagatagaaagcagtacgtgggatttcctttccattaaatacaggtgcaaaccacattctctatggaaatatattgcaaaggaaatgttatataatttatttaacaaatacccaattaccatcagcccaatcgtgggaattggaaaacgactcaaagactgagaggaaaaaaaaaaaaaaagtagagaggaggactggcagaacaatggcactaaagctgccacactgtggatttactacctgtgttatttttccaattacagccattgtaatataaaaattccgaaaaaaaggttgctgagaccattccttcgcttttttttagaactgagtcaacaccccaaatcaaagagaaatataaacaggcagagcctgatagtccttagatgaaacgcgtaagtgcagaaacaaaagagaagtgcttcccattcaggacttaagaaaattctgcaaagtgaaaaagtccactctcaaaccgacctaagtgaacgcgtcagtctgtgctgctgctgtcagaggtgtgagccggggactacaggaatcagagtgaagacaggagcggaggaagggactctcgcctggatctcccgtgccgactccagccagcacgtttgctttgtaatctatgaatgttaaatacggaggggttgcagagcagaaacgctcggggaaggggggcaggtcctctgtacttagcagggaaggaaaatgccggttgactagtgagacgagtggagaaacacagagcaccctccgggaggcgcacagttcgttaagcccagggacatgctcaatgaacctttgcagcaagaggcagtgaggcgctggacgcgggcgccggtgacagcgcgggcggccggggaggggcgaggggccgccccgggaggacacagccagtcagaggcgcggggcgcagggcgcgcggacgcattggaggaaaacacgcgagccccaaacacaccagccgcaggaggcgccgcacctacttcccaatataaccaactacggcgtgggggagcggaactgcgagaaggcggcagccaaagtgccattaaagctcggggcggagaggatgcgttacctgggtcccgtctgctgcgagaggcagggcaagctggaggattccctctgaatgattaagaactccgcaattcgcctctgccacaggctgcaaaggacccgaggaaccgctctctctgaactgtgctgatgggcaggaggatgggagacaggaattgagagtcacagaggaaggacagtggagtctggcatcttattggtaagtggctgacattcctttgccagtgactgcgttctgtgattgtgcacttcatctcccagccacttag

SEQ ID NO: 8145 - DNA, 2300 bp, Homo sapien
ctgccagctatgccaggggacatgtctgggctagtggtcagggcaggggcagccagtgatagaaccaagcaggcttcaaatcctttctgacacactcctcctatccaagcagctgcagcccagcctcagagcatccttcctaagggacaaaaggtggcttggtacgaaaaaaatcagtgctacagtgtgacttcaagggttcctttgctccaaaatccctcccatttggcagctgctgttaggaatccttttaccaaggaataaaatcttttccttttcacaatgaaagaagtaataatcaaacgttagttaaagtaatacactctcaccacaaacttaagaatcctagaaagatagcaggttgtataattaagtgcataagccaaattaatgatgcagggcctatatcttcaaagagcctacgctcccaagatttcttcacttatgaatggaagaacaaaactataatgatgggaatcacctgacttttacaaagctagattcaaccatcataataaagtatgtaatgtcactcgtaatataatgtacatgtcagagcatttatcacaggtatgtaagtattttgaccttctgaaacactaaagtttatctcaagcagagcggggagaaaaatgtagaatatctggcacctccaacaagaactggcttggcatttgacactctgagatgcagctctttttgaagaggcatcatgctctcttagatgcaaagaggttagtcccgcgagactttaaccaggatttgcaagccagaggaaggacagttcacattagtgtttatgtagggtggcaagaattgcagacaaactatatttttcacaaatcacagtaaataccattattagtagtagcctcaaattcagaaattaagtgaatatgggcataaaatatattatctttaccttggttaagtaacacaagtggttaagtaaatgttttaacatttgggatgattaaaagatattttggagcacattaatttcaagacatcttgctaagctctctccttactgttaatacatgtttcaaaatatagatccgatactagtattgtctcagttttaggcgcacacatccctatcatgttgttatacaaagatgatgcccccatatatgtcctgggggtaactagatcacccaaaggtctctctaccttttgaaagtacctcactcacccagctttaagtgaccagagattccacggcttcatttcagtagctaaaacatccagaagcctctattaagatgcaaatacttttcacaggctcctttgaagatggaaaataaataaatacataaataaataaaaataaattttttaaaagatgcaaatacctcctgggaaaggtaacaagccatatcatgtaattgtgctcaattctctgtaagagaaactcttcagtttcagatactcttaggtcttaggaattgaaagctaagatccagaggataaaaggaggaaggaaaatttgatcaagaggtgtatgggaaaggaggtggaagaagccctatattatagactataacagtctttatattctacagatcatcaaaagttctgattggcctttaaccccttaactttcatcccaatgacacacccaacacccacacaatgcaaaccaaaactaagacgcacagaaaacttgcagagttaaaatgcactggtgccttgctgtcttccattatcttacaaaatggcaaaactgcaaatgtatgctttttaaaaagccaactcaatgactgtgtccaatgaagagccactgacgtatgagagacattaataattttctttcaatatcactaaactagcctaattttatctttaagacaaactcttgattccccccttaagggcttttttagttcaaactattaatagacacaataaattaaaaaaaaaaaattaaagtccccaacatcttcctaggagcattacacaacgagatgactttgaacgactttcctcaggatatattccagtgccctgtagagaactttccccatccctgtagacatgtgagtaagtaaagaacacctcaagaacaaactttgttggccaccagcaggggagctcttcagcttttgtccccaaatccattcaaacaaaagaagctccgactcctccaacccacccttcggacccgcaccccgcggggactctccagatgcgggtgtccactcccccgccagccctacttactcctcaacgccccaatgagcagagagccgtccttaatgagctccttgatgaacttgttggttcgctccagctcaatc

SEQ ID NO: 8146 - DNA, 2300 bp, Homo sapien
ctgactctcagtaagatgtcattctacatgatgagcttgtgatatcagtttattagaaaagactggaatattgctgccaaatatcccagtatactttgaggtacagcctggttattacttatttttctcaaaatgaatacttaagagagaaattctgttttatgtcactactatcttcattcctttttgttgaaaggaagttctattgaaatttttttaaatggttgtctttttctcttaatatatctttttagtgaaaaatagaacaatgtgacctctagtaccaaacattttaaatgtcaggaacttgcagttttagttgatataaaaatgctagtgtcttgcttttacctagggttacttttttttgtctcagtttttgttgttgtccttaaaactgaaaattaaatgattcctcacttttccatcttacctgtctcctatattcaaaaagtattttaaaatgtctgaatgcttagtgttatgctgggcattttggggttattggaagcaagcaatctctctttggtgtccaagaaaagcttcactctcatgtaggtaggtcattagctgcactctgatgagatgccatggccattcatttttgtgtgttgagttcactgaaagtattcactgagttctgttcttttgacctaggacactggggacaaagaaataaatgagccacttcccattgatggcaatacttattttagttttgacatttttatttctagagttttgaagttctttttagagtactaaacacatacacacacacacatatatatacacacatatatatatatttttcaaaatgtcaaataatcccaaaatgcctagtgaattaaaaatgacaatttctaacttttgccctctttctccttaccagtagtttgcatatatatttgtggagttttttcttaggaaaatagaaacagtcatacataccctcaaatttttacattttgagaaaataggccttattgtcctgtcgattacttttgtcacctaacaacacataataaatacctcttcatagtagtacctctagttccattgttaggcacagatttttcacgcctttctgtcaatcaattcagttccattggcttgctgtgcctagaatttttttcagtttttagtttgttgctgttaccctttcttgatttttatcataatttttttgatatatatttttttgtctggggatctattttgagttacaagaatgtgtttaatctactgtctttaaatggaagttagttttaaatttgtattggtttgaattctcctcatttattatttgagaatattttaaaaatcatgtcactaccacgtgatgaaaatttgtatcatagttcaaaaaattttcagtttctcctctgggtgttagttggtattttttaaataaatgctttctctttaaataagtaatttaatttgacctcgccccaaaaccctttaaaaaaattagaattgatccaaagaaaatctagccaaaaaacaatgaaaataaattgcaatttcataatcctaggaccttttggggatgtttagtgactgacaatgcatgttttgaattattttaaatatggtagcaaaatgaaaaatagaacatggagcgtagaatcagacccgagtttgaatcctgactctagagcttaaaactgagagcagtggaggttttcagcaacccagggaatcatcttaagactgcagagccttttctttacctcataatgttttgagaatcgcgggaaaggatatgtgaaaggctttataatacaagtttcaatacataataaggatttattcttactgcatttgctcctatcatctgaaagaaaacacgtagtaaaggagtaatgctatttttaggaaaagtggatgagatcattgtaatatactttctgtgaaggatcttagcaggttgatacaatagctgtgagggtgaagttccctcctctacttctaccccaaaataaaaagtcagcctctaaccaaaatatttggaagactcagaaaaaacctctctactgttgagtcataaaggcccagtgaacagagccaactgaagggggaatgtgagttcagcgtaaacacctaatgcgatttctctcttattttcagtgtatttgaatgaagcagggttcaactttgtgagaaaatgcattcaagctgtggaaacaagaggtcagtgttgcctgattggtacagcatccctgtcatgtgtctcattcttacatggaaaactctcagagtagataaatcattgaagatgtatttggtcattaaca

SEQ ID NO: 8147 - DNA, 2300 bp, Homo sapien
acactccttggcagctcagagccaacagcatggcagcatcttctcctgagaagcaaggagccattcagtgggagaaatgatatagagtgagcctcagctcttctcaggttatgttttttcagagtatgaaggtggaaagagagtattacaataaaaaccatcaatatgtcttgttcatatttggaaggtttcttaaagttattgaaagatcttctagattttacttttgggaaatgggagagaataaaaaagaaaaccccgtgaaagaatactccagataaatggaaaagttacaattgctctaggatacttatattttgcagctgattaagtagcatatggttcaaagcttattttataatgaaagtggcaatatcacccttttattgaccttggtccatttttcttatacgtagatttttcatactgctccagacccaagcattcctcttcctcagcctcagtctcgatctggatcccgaaggacacgagcaatctgcctctctacagggtctaggaagcccagagggaggtatactccatgcctggccgaacctgatagtaagtgcacccggccttagggagatgctttcttcattctttggttcagatgtatttcactgtattggtaattaggtagaaatagaagatgttctcactgatgctctttccccaacacctcctcttttatcatttgtatattctctgtcaatagttgtacagttgcttgggtaagcaaattcattattgatacaaaaaggaaaaaaagaaaaaagggctcaaggcccttttttctgcaactgtgattaagtacattgggtgctcctttgtagcaggttctgtcctattgtcaaagtggtaaagaagaaagcaagacaaagtctgactgaagctgtcattttcttccttcctttcacattatgttcttaaagcattatctcttgggtatcagtgtctgaaagagaaaagataaaaagaaacaacacacattatcatcaacttacaattctgagccaagccctaaggtgatgtgggtggcatcttgacaccatggcacacattaaactgtggctgttctcattttattttataccccccaccccaattttttgctcacagtcaatatttaatagaaaatagtcaattatatattttaaaataactaaaagaatgtaattggattgtttgtaactcaaaggacaactgcctgaggagacggatactccattaccatgatgtgcttatttcaagttgcacacctgtatcaaaatatcctatgttctccacaaatatgcatacctattatgtacccagaaaaatttaaaaaaatagtttactaatttttaatttagatatatgtgaatgcattattatgctttatctgatttttcttataacttgcttttaggaacattaggaaataaaaccagcaaaatagccagtttcttacatttctatattcttagcaggaaaggaaaaaagcctttgaaaattgaggtacttgtaatttactactgacatttaatggtgcctttgaatgaaagaaggctgagtactttgtaacttggaatcaatcacctatgatcagaaaagtaaaagaaagcagaaatatgtttttactataccccctttcattgattccttgtaatatcatgaaggaatcttatttctcttacttctgaatcctgtttcataaacaaattttgtgggaattcaagtcaacccacttatgcttcaagaagtaaagttattatctaaaggcaggtagttcataggtacatacataaacttcctaaaatagcattgaaaaatacgtttggcaagttcaaatgcatattttaaagcctttctccagtactgaggacagttctccgtactaggtaggggcctaccactttaatggggtcaggtggccgcagaacacatggtaagttggagaacagaagggttttggtgatgctgttatcaatagatagttacagttgctttcatctctctccctcctactccttaggtgactcctatagcagcagcccagacagcacacctatggggagcattgagtcactctcttctcattcctctgaacaaaatagcactacaaagtcagcttcctgccagcccagggagaaatctggagggattccttggattgcaaccccatcatcttccaatggacagaaaagccttggtctgtggacaactagtcctgaatcaagttccagagaagatgcaaccaagacagatgcagaatcagactgccagagtgttgcttcagtcactagcccaggagacgtttc

SEQ ID NO: 8148 - DNA, 2300 bp, Homo sapien
tatgccttttagtttacagtctttattagcaatttcagtgaatttgtagagcatagtaataggtatttactgtccacttatatatatcagcatctggtcatgcacgaaccattaattctatatttctatttcaataattctaatatattatttctataaatgtaatatctgtatgtggcaaagagcctttcttctcaagatcctgaaaagctggttacctgccctttgagtgccacagtcctgaactgcttgttcttgacatcttgcatattacttcagagttccccactgtgcagactctcaggtattaactgtaaaaaactctttacatgccattattatctgtaatctctatctcttctactttaaattaatgtttctagaattaataggttaaatacacatacacacacacaactatgcctcagaaaagttaggcttttacaaataaaaagaataagattagaattaacaagtagagagaataacggtaggcagagtcagaatcaggaataaatatcagtgaatcaaaagaatgaaaaatattatgtaataaaaattagcaatgtaatgtaaacgtttgataaaagagtatctttttcttttatctcttactgttgacctctgtgcactgtaataaggtgtgttgctggatcttcttggtcgaggtccttggtgaccttagtagtaataacagcattgctgacaccctaattgccctctgctggaacagaaggtagttttccagtgtaccagtcccttagtctatacagcacccttggtttaagcacacttgccatcatctggtatcctgctagactagaatctcttaaaagcaaattggttttctttcaaagaccaacttgactccaaagagagattcagaatcctacttctcctgctgctgcataaagaatctcaaccttcattttatttgaacacggaccaaagtgttcctgcttctgagttgtctgtaagctaattctgcagatgttccattcagatttaaagcttttttactgcataggatgtggataggaagcctaactattgtatctgatggcaaggcatatgttgcagccacagtactggctatggtccctttgctgaaacaagctacagaagcactgattcaagttgtgcttgtgcttgaacttttaatcttctagatttgtgaggatggctctttttccttcataatggattacaatgtaagcaagtcatggccatatactggagacgggctaaagctgcttttcccttaaagtaagtttcctacagataaggtatttatgagcactgagaaagtcaggacatgtactctaaatcacacagaatgttaattccacaggaaggcaatgccagacattgaaagaggatcacattcaacttttaatagtagttcaataacaaaaccttagcttttcaggaacaatgtgaagatacattagaattgccacatccatatcttcaaaacacgcaacctctgcaccctaataactgcttacggtataatcagtatgatgatgagattgagggggtctaaatttaagttccttatctcctgagttatgtgaaaatatccctcagtacaaaacatttgtgtgtttcacagatgactctcttgttttgccgtaatgctaccaagtttatggaaactagtcaactgaaggatttttctgttgtgttatgtgtaaatgtctgaacagtaaaatcatctgtgtattcctgtaacattcacgaagtatgaggaagtgggtttctccttgtttgatgtgagtggttttgcttgttgcatgggttccctgtgctttgtaacttgcatgaacacaaccaggtttctcaacaatgatttgtctgctgactcttttcagagatagtgaaggaaaaaaaatgtattaaaaccccaaattatctaggtttccaagtaggaaaaataaagatacatatgacttttattattattcgatgataattagctttatataatgtggcatccttcataaaaattcactatgttgtgaggcaaacagatttctcactatcatccagtgtaccctgctcaccttctcactcctagcaccgttcttctggtctgtgttgaaaagggtatcattcatgtggtttcagtttagaagagtccctcagagctttgcctcaagcaatttcaaattgtagtgataccttaaatcatgtattcaggatgccttctttagcatttagaaccccaactagacttatactttgactaaagtcagaggcagaccaatttagggaacagattttgttctttgctttta

SEQ ID NO: 8149 - DNA, 2300 bp, Homo sapien
tgggacagaacagtatgaagggatttaaaaaatggcatgaggaaacttttggaggcaaagggtatgtttatcattttagtttcacaggtctaacaacaaattatacaatttaaatatatgcagcttattatatgacaactatatcttgataaagtggtttttttccccaaactatagaaaaaatacttccacatttaaatcctcttctccaaaaacagtcttcaggaatatttgaagttagccccatcacacctgaatttaatcagtgaattttgttcattcaaagattcatacatttgggaagttcctgtgccaaaaatgctaatcacccagcatcaaaatttatggaataatggtgatttaggacatgctggacatctttattgttgttttcccacttcaagattttcaatcttttggaaacaacctccccagacattctgacaagggaattattataaccaaccaaaatcaagccaaatatagtttgtcagatttaaaatgaggccaagtgccaattttacagcagcgaccggaaaatcaaattatatggcatctgacatttaaaatcacactcctaagaaggctgtcatttgatgtcttgggtttgggttacagtacttaactttataatactgggtaaccttgtgcctcagttttcccaactatgaaattgggataacagtacctattttgtgagactgttgaaggattacagttaacacaggtaaaaggcttacaagactacctggcaatgctgtcctgattttacaaattctatacactgtgtggcattagccatcaggaaaatataaataaatcagtgagataccacttcacacacttggggggctataacaaaaaagacagataaaaaatgttgtcaaagatgtgaagaaactaggacccttattcactgctggtggaaatgtaagaagtacaatcatttgaaccatagtctggcagttactccaaagaccacacctagagttgccatatgaaccagcaattccactcctatgcatatatccaggagaaaggaaaatatacgctgcacaaaaacttgtacatgaatgttcattagcaggatttttcatggtagccaaaaggtgtaaacaacccaaatgtccaacaactgatagagatggataaataaaatgtggtttatccatacaatgaaatattatttgtcaataaaaaggagtgaaggagtgaagtactgattcatgtggaacatggatgaaccttgatccaaaatagccaaatcacaggtacaaaaagcatattagtggctgctgggagatttaggcggaaatgtggaataactgctagtgggtattgagattttagagtcatactcatgttacaaaattaatagtgctgatggttgcacaactctgagtacatgaaaaatcaatgaactgatactttgagtgagctgtatgatactggaattacacctcaataaagcatggtaactgttttaagataggctggaaagagaaagcctgaaaacaacaataatgatattaataaattagtttacttctctagtctcatatacttctgtgcccacacttgctcctgttctattcataatggtccccttgcagttgccatattatatcctgccatttgatgcccggtgaacattctatacctgcttcccagaattctctttacctttcctctatctgcctaacttccacatatctaaaattaatcagagtaaactatttactagaacaaccaactccaaatcctagtaacctaacatgataaaggtttgtttctcactcatatagcccctccccagatgatcgaggggtccaggctccttacctctagtggctcccccaccttctggagtcttctgcattctttatacatggttgagataaactatgagtcattagcacagctagaccttgaggtcctacaagaaaatttgcaaatcattcactctgttttgaacaaggtatatttaagatgatgttaaaatacccaatggtcttgggtcaaatacagtttatgactgtgtatctaaaatatatattgcaatattcttccctttttctactgacttcatgaatttagcggggatccattttataagctcaaagataattacttttcagactaagaatatttagggtaaaaagtactgttcaacatctctactgaggatgttatgatgtagcacactgtataagctggagctaaaggaaactttccttaaagtgctatttactaaaaattggaacacattccttaagacaaatcgaagtgtggcacacaac

SEQ ID NO: 8150 - DNA, 2300 bp, Homo sapien
ttgcttgtagtcaacaagcttcccacttccaacctctatgacagtatacatgttggcaccatctataaatacccaaatccctaagctttaaatactattcaattttcaaattgaattttcttttatgtacaaacgtgttgcagacttggatttccagacattaaataattgtacatggaaacaattatatattaggattttctgccaccaagtggtaataatacttccttgcaccattggataggtttactcttctctgtatcattaagttttttatgaaatatttactgaatttctatgatgtattagaaactgactagaatttttttctgaaaataaaatatgttatatatgcatccaaaacttggtatttaatacttagaaaaaaactagacccataaaaatgcttcatgtgagtttatatttagttttatgccatttaactataccagtgattctcacccaggggtgattgtgccctccactcctaatctggtgcctttgataatacctacagatatgtttggttggcacaatagggggtggtgggagctgtgactggcatctagtctgtagattagaggccaggggtgctgctaagcattccataatgcacaggagaccacctacaccaaagaattatctagcccaaaatgtcaatggtgagttaatgaatagatggtaaataaatcagagacatgatggttatgagcctgcccttacctgcatgctttatcataatgggcttagtgggagcttcacactggtcttcaccttttatgatgttcttaaggcataaatcatagtttcaaagccagggttcccattatattatttaagatgttatgtggaagtttttatgcatttcacaaattcataaattagtggggcttgaatgatagaaactaggtagaccacttccttcattgtcagacaaggttatagaaagttgaagcatcttgcctctgttccatggctagcttgtggcaaagccagatggtatttatccttgaggttcccttcaagtgctcgttttgggaacctaaactgcctctctttggttaatttgatgaattatgtaatttatcagagtggttttaaaattcagtataagtaaaattatatggacactaaaatttttagagtgagtaaaagaaaaaggaaataatagatacatgaaaaatgatgctattttcaaatttatatattgtttattattaatcttatcaatcttgccatatttttcataattgagctgttaccataactcagctataccataattgcttatgttcatttatacacagagcctagcacagcaccttacattttgaggaccctcaatatatacttgaatatatagatgaatgtctgagtagctgttttaattcagtatgtggctatttaaagtatcaaagcaaagcactgaagtgaatgcaaggattttaattcagaaaatgcattaaagaggttttaaatcatcctcttagcatgttaataaggtatgctttattgcagattgctttaattttttgttatttgcctatttgggttaatgtattttaatttgaaaagtgctgcccaaatgggatagtatacagtacctaaaattcaaacattaattagagctttttttgaaactgaattctgctccaccacagtcttaccctggtgtttctgcaggatccacatcagaccctgcttcaggtgtggatgtcttagttaatcaggtggcactgttgatcccccatcaatggacttctgagatcaccaccattatttcctcaatttgtttgactctttctctaccatgcattcatctgtgagaaggttaacgcgtgattctcatgacaacgtgattggcagccacaaagtctaagagactcctcagacaacctctaacaaacagccattaacaaactgaacacacctaaaatgtcactgatttgtcttggaagacagaatactaagcaagataaatggcactatacatatagataatttgtgtatgtaagactattagttcattagataactaatctcactactttatttaaaagaaaatgtaagtaggaatccatttctaaatcttttcaaattacaggttgggcacaataaacaaccaagtataaggagctcagaagatttccatctaaatagtttcaataatcctccaagacaatatcaggtaagcatggatttttaaaggaataaaactagttacttgtaatatttaggttcttgaactatgtgattctttaaagtatcaggatatttttctcaatatcaaataatgcatt

SEQ ID NO: 8151 - DNA, 2300 bp, Homo sapien
atgagatcccttgaagctcaaaagaccttaagacacgaagttatgaattaataacgaaaaaatcttcattatagcattttgatcagaggaagaatcacagcccccttcctttttttttttttttttctttgatataggatcttgttctatcacccaggctggagtgcagaggcatagtcatggctctctgcagccttgatctcctgggttcaattgatactctacctcagcctcctgagtagctgggactacaggcatgtgccaccatgcaccactaatttttctattatttgcagagatggggttttgccatgttgtccaagctagtcttgacttcctgggcaagtgattcgcccaccttggccctgcaaggtcctgggattataggcgtgagccatagcacccggctcactttcccttcttatcacagattgaaggactacgttgaaggctggccactgctctgaccactgcctgcaccatagaagtgttttttcctacctgacaacttgattataattttctccagtctgcagtgatttttaggacagcagagttcaagcatttattgcccatattaatgaaacctatactctaacatctagccgatacctctgctagagaaaactttctacctatacctaacccctgtctcaccctcctgaagtacactctcacctgacttctacttatccttccattttcagcttgtcattttctctcagaatctgggatagatgccccattataggcttatcattataattaagcagctgataacaaagcagtatgctgattgcccatctctctctttggtctataagacttgtagaggcaggaaaaagcatctatttgttttttcactattggccttcttggaccgaatatagttcctagacctggcatcagagggactcaataaatatttgttaacttgagtggatttgctattgtctctacttcttaaaatgtagtcttatattctctatcacattgtgactgcatatggataagagggtatggatatagacatctttcctaagtctataccatctatatagtacattagtttctatctgaatggcacagagtaattatggcaattgctagtctccaccccaaatgggaatgttaaaatctgcaaagtgcttggctttcttagacgtgaagttcttggaatccattaacaaataaatgcatcttcattttataatatagtaggtctagagatgatgagacaacatctaatatacttgaggattgtattagatgaatggcaagtcatttggcacactaaaatgctcttaatgtgatttgtttacaatctttctgttttattgcagccggggatctgacaacagactggctcaccggcggcagacagttctccgtgagaaggggagaaggttagctaatcgaggaccagcatacatgtttagtgatcgctccacaagcctatctatagaggaggaacgctttttggatgcagctgaatatggtaacatcccagtggtgcggaagatgttagaagaatgccactcactcaacgttaactgtgtggattacatgggccagaatgccctacagttggcagtggccaatgagcatctggaaattacagaacttcttctcaagaaagaaaacctctctcgagttggggatgctttgcttctagctattagtaaaggttatgttcggattgtggaagcaattctcagtcatccggcttttgctgaaggcaagaggttagcaaccagccctagccagtctgaactccagcaagatgatttttatgcctatgatgaagatgggacacggttctcccatgatgtgactccaatcattctggctgcccactgccaggaatatgaaattgtgcataccctcctgcggaagggtgctaggattgaacggcctcatgattatttctgcaagtgcaatgactgcaaccagaaacagaagcatgactcgtttagccactccagatctaggattaatgcctataaaggcctggcaagtccggcttacctgtcattgtctagtgaagatccagtcatgacggctttagaacttagcaatgaactggcagttctggccaatattgagaaagagttcaaggtaggtcactaacaatagagacttcaccctccacaagccagagtcaaggtgtatttaccagcttcccccatgtgctcagcactgtgctagttactgtggacactaggtcattttataagtttattcaacaagctctttattataatcattgtagcaaaagttgtgatcgctaccatttagtg

SEQ ID NO: 8152 - DNA, 2300 bp, Homo sapien
tctttgagaaaagttagatgctccctttactgcggctcacctcttacttcgaaagggcaccgcagcagggcttgaggctgggcagccctgacacagcacccatctatcaggagggtctgccaggcgcctatggggtggaatcctccctccaactaaagctgtttatagagctgagaacctcgggaaaccgcttgcgggtggatgtgacaagtcaggaaacttgactacccaatcacccaaaggggcaatgggacagaaatgctatctgcccgctgcacatgtggtcacagcggtgtcggggaagcggagtcttttcttctggagtccactctgcttactccctacctcccctcccgccacccacccagctaaaaaaaaaaataccctagattcataaacaaaagcttgcagttacccacagcccaatacaaacgacccgacgccctcacttctatagcccgtgagtctcccagcccctaacaggctcgtctccccagacgccccgggtgaaaaggttcgcgccgccggtggagagtcctattggttctatttctgtcttcactccaaggccccaggaccggggagaggtcctggtctaactttggctgtcccacggtccaaggacctcagcgctcagcccgaaacgctaagccaagcgtggagaccgccgggcgcacccagcacccaggcagctccaacccttggagttctagtcatctctcccccacataggctaagagtcacccgggcgcacatctgaatcagccccctgttcagatcccgcctgttacgtagcgatcctgtctcttgtagagcgcaggatgaaggggtctggagaaatcgaccacccatctaatcacctgcaatggtggtgttactatgcggtctcactctcgtgggcaaacatatccatgcgtacctacgaggagcaaacctagacaaccccgcctcccccactccccgcgcgcccctccactcactcaggtcccagccctggctctcgcggacctcccagcaccgtcctaggaggtacacacgcgggttcaggacgcgcgcggacggactcggccactcctgcgagcgcacaacctccctccgcgcagcccgcgcccgatccgccccgcgtcgccggcactcacaagcaggggtagtagccgtagcaaggcagcggggcttgcgggcagccgtcttctcccagctccgagtccatgagcagatagtcctggctctcgttgcgccgcgcagcggctccggcagcgccccggggagaactgcccctccggggcccgaacgccgggctctggctcatggcgggaacgcccgactggcctgggccccgctcccgggggagccgagtgggcagttccagcggggacccggtgcggagggttcgcgtcagcggccgaactggacctgggcagaccggtgcccaggggacgacggtgaagcagggggtgcagacgcccgccgcaagtggctcgcccactggcccggggaaaagtcaccacttaagggggtgcaaagaggatcttgacctgagcaggtcaggccgaggagaccccgcgaggatgcgtctggggcgcccgggcagagagggcacaggcggggccgctggtggtagcgaagcgtaagagcggagagcaagggagacggagctgaagagttactatgtcaacagagactctccagccctcagctcccgccttcatcccccgcactctccgtcaagatccccacctttaaagggatccgagcgacgttctagaaagcagccaaagcctgtcctgtagccacaactttcaggaggcggtatgagcctgaactaggaggagccaggcacgcactctttttttcccctccactatttagttggctcatttagtaaggataccaactgcggacttcgtaggaagcttcctttaagaaccactctcaaagagccaaggaaacctgttccttaaaagggacacgagcctcttctttctccagactgccttcattttctttggtcattttctctcttaccctcaactcataaagttattatgactctgctttaaaaatgaacaacgttctatgttccaaacgccagatgttcccagttcctgagaaaaccaacaaaaataggcaagcattttccaatgataccgataaagaggccaacaacctgcttacttcagagaaaaaattttccttccgtcactgcgaatgcaagaatgatttctctgccagatgtttcccacgtttccaagctgttttatttttaagacttagttttaaattctgattaatatgcatac

SEQ ID NO: 8153 - DNA, 2300 bp, Homo sapien
tttaatgacctctctgaaatcatgtaacttcagttagggaagtggccgaaataaaaatccaggctttgagacttctgatctaatgattccacttcatcatgtcataagctctttcagaatcttctaacatttgtacaccaccttattccttctgggtactcaataaatgactgggcttgttgttctagtactcacaataattcaaaaaaaaaaaaaaaaacagaggaaaacatgtcttaccacatgataaattgatgtcagaataagtttactgtagtaattttttcagtgtgaaggttgttacctgtgaatgaaaaacagtgtaacaacagcaaaataaattctgtctcagtttttgttttttttctttttatgtgaaaggttaacacttcaactgacactacaaatgtttattaatttggctttaactcacagaatttgaattgggtagaaaacctttgaatattacttttcccatgaatgttttccccatacttggtgttgccaaagagattaccttggcactgtttaactaaacgtttattgattaattcattcaagcatcaaagctaatgaatacttacagatagcagttgccacaaacaaattttaggaagaatatcttattgctaggtatagtaactagaaaattataagaattttaaatcatggctccacatgttgaaagatcaaaaaggaaggctgttaaatcagaaagaacagacttcagaatgatgcaggttgtttgtttccccagggaaaatgttctttccagggccaagagcattttcttattttttctatattccttccatccatccatccatccatccgtccatccatccatccatccacccacccacccactcacccacccaagcatgcatgcatgcaccctacacacctgtgtcaaatacgaagctggatcctcaggacacagtggtttctgctctctctgagtttcagttctaaatttaaaggcaaactcagaagtttctaaatgtgtgagctcttttcccttctatcaaatcaattgcattttcccacacttccaacattcattttgttgtccacctgttcatgggaagcaaaggcacctttgcagacagatttcagtctggctttctttcatccaattgcaatgggcctctgatcttttcatggctggctgcttgccatgcatgtctcaacttaacgagcacctccttggaggggcctcttttaaccatctcatctgaagtagtcattcaccagctgccatcacatcaacctgttttattttcattgtagcatttgtccttgatattttttcatttgcttatttaattggtccccctttctgccacgaaagctctatgagggcagacaggtgcctcatctgcttctttgcctccgaattctgaaatgatttgaaacgcagttggcattcattaaatatttgttgacttaatgaatggattcttaattggctactactgcttaaaggtctacaaatactgattcatccttgttgacaagtttttacttctcacacgtatgcatattaatcagaatttaaaactaagtcttaaaaataaaacagcttggaaacgtgggaaacatctggcagagaaatcattcttgcattcgcagtgacggaaggaaaattttttctctgaagtaagcaggttgttggcctctttatcggtatcattggaaaatgcttgcctatttttgttggttttctcaggaactgggaacatctggcgtttggaacatagaacgttgttcatttttaaagcagagtcataataactttatgagttgagggtaagagagaaaatgaccaaagaaaatgaaggcagtctggagaaagaagaggctcgtgtcccttttaaggaacaggtttccttggctctttgagagtggttcttaaaggaagcttcctacgaagtccgcagttggtatccttactaaatgagccaactaaatagtggaggggaaaaaaagagtgcgtgcctggctcctcctagttcaggctcataccgcctcctgaaagttgtggctacaggacaggctttggctgctttctagaacgtcgctcggatccctttaaaggtggggatcttgacggagagtgcgggggatgaaggcgggagctgagggctggagagtctctgttgacatagtaactcttcagctccgtctcccttgctctccgctcttacgcttcgctaccaccagcggccccgcctgtgccctctctgcccgggcgccccagacgcatcctcgcggggtctcctcggcctgacctgctcagg

SEQ ID NO: 8154 - DNA, 2300 bp, Homo sapien
caatcagctcacagtaaccttgaacccccgggctcaagtggccctcccacttcagcctcacaactagctgagactacaggaacaggccacctcccctggctaattattattattatttgtagagatgggattttgctgtgtcgcccaggctgatttaaaactcctggcctcaagcaatccttccacctcagcctcccaagattacaagcgtaagccaccatgcctggctcagagtacagttttaatatccaaatttccaagcattcacccatatactctaagataaaagagggtaatagtgaaagtgtttaggtattattttgtctttattctataagtcaagtaatacattctaatttcatattacttgagaataagaaaatatttataaagttccataaagcagactttttgaggtaaataaatttattagcattttacagatgaagaaacctaggcttatagaagaggtgtgaatccacgaccacacagaaaacagcagaactgagactaagcctagatctaacagcatatccatgatcgattgcaatttagctatgccctgtccccacatcaagacaataggaacaccggagcagggtctgggctatagggctgccctctggggaaccagggggagcctggtggtagggtgtctttgcatggctgtgccttccagccctgagtgcagcaactgagagctggcatcattaagagaaccagcgactgaaagttgggcagaacatccaatcaagttgtgggtatggaagggctctacagaggtggagagcagggcaaaatctggagaaattaggtaagaatagaagttccaagcatgaaatatgaggccaagcctagagaatatcctaggcctggagaacatggcacttcattataggcagctacctcccataccagtgaggagatagtgtcaaggatcagctacagctcaaattgctgctccctctctgccatggctccccatgcaggtgaaatgcattcctcttcacagcctcaagaagaccacactccctaaggcaggaaatggggaaagtcagatttttttgtctatgttcagctaccgtagaggaaaaggtaaaaaattatagactgagaaaggaggggaagtaatactctcaacacgtatttactggcaaattgtaaatgaacagttggtgaactcatcaacacagggaatgcagctctgaatcttgtgtcaatgttttcccctaaatcagctctcataactcatcgcatattacatccttccacctaatgaaattgaactcatcaagggtgaattcaagtattttagggagaaccatccaatttatttgcaatggtaaattggtgtgggatttatttgcatggctaccactcaatttcaacttgggtatcactggcctgcaaccagctctgtttcaaaacattgtttgaaactaggttagatgagatttcatggcagtggggtcatcgtctacctgtctgtttggggattttaggttttctgataagtcgacaaacatttcatgtctagtgtatctgattctcacccttctgcataatatacagttccctcagttagaacaacatggcactgtctttgtgttaggcaggttatataaccattaacatttcattttataaataaaaattttgctaacactctagctcaacaaacacttccatgctcagaaaggaaacaaaataggataatatatactagatgtggaagaactttgatattgtgtgtggggaaaagcaagagagatcagattgttactgtgtctgtgtagaaagaagtagacataggagactccattttgttatgtactaagaaaaattcttctgccttgagattctgttaatctataaccttacccccaaccccgtgctctctgaaacgtgtgctgtgtcaactcagagttgaatggattaagggcggtgcaggatgtgctttgttaaacagatgcttgaaggcagcatgctccttaagagtcatcaccactccctaatctcaagtacccagggacacaaaaactgcggaaggccgcagggacctctgcctaggaaagccaggtattgtccaaggtctctccccatgtgatagtctgaaatatggcctcgtgggaagggaaagacctgaccgtcccccagcccgacacccgtaaagggtctgtgctgaggaggattagtaaaagaggaaggaatgcctcttgcagttgagacaagaggaaggcatctgtctcctgcctgtccctgggcaatggaatgtctcggtataaaacccgattgtatgc

SEQ ID NO: 8155 - DNA, 2300 bp, Homo sapien
ttcagtggaaagtgttacctcagggaatgcttaatagtccaactatttgtcagacttttgtaggtcgagctcttcaaccagttagagaaaagttttcagactgttatattattcattatattgatgatattttatgtgctgcagaaacgaaagataaattaattgactgttatacatttctgcaggcagaggttgccaatgctggactggcaatagcatctgataagatccaaacctctactccttttcattatttagggatgcagatagaaaatagaaaaattaagccacaaaaaatagaaataagaaaagacacattaaaagcactaaatgattttcaaaaattactaggagatattaattggattcggccaactctaggcattcctacttatgccatgtcaaatttgttctctatcttaagaggagactcagacttaaatagtaaaagaatgttaaccccagaggcaacaaaagaaattaaattagtggaagaaaaaattcagtcagcgcaaataaatagaatagatcccttagccccactccaacttttgatttttgccactgcacattctccaacaggcatcattattcaaaatactgatcttgtggagtggtcattccttcctcacagtacagttaagacttttacactgtacttggatcaaatagctacattaattggtcagacaagattacgaataataaaattatgtggaaatgacccagacaaaatagttgtccctttaaccaaggaacaagttagacaagcctttatcaattctggtgcatggcagattggtcttgctaattttgtgggaattattgataatcattacccaaaaacaaagatcttccagttcttaaaattgactacttggattctacctaaaattaccagacgtgaacctttagaaaatgctctaacagtatttactgatggttccagcaatggaaaagcagcttacacagggccgaaagaacgagtaatcaaaactccatatcaatcggctcaaagagcagagttggttgcagtcattacagtgttacaagattttgatatcaatattatatcagattctgcctatgtagtacaggctacaagggatgttgagacagctctaattaaatatagcatggatgatcagttaaaccagctattcaatttattacaacaaactgtaagaaaaagaaatttcccattctatattactcatattcgagcacacactaatttaccagggcctttgactaaagcaaataaacaagctgacttactggtatcatctgcactcataaaagcacaagaacttcatgctttgactcatgtaaatgcagcaggattaaaaaacaaatttgatgtcacatggaaactggcaaaagatattgtacaacattgcacccagtgtcaagtcttacacctgcccactcaagaggcaggagttaatcccagaggtctgtgtcctaatgcattatggcaaatggatgtcacgcatgtaccttcatttggaagattatcatatgttcatgtaacagttgatacttattcacatttcatatgggcaacttgccacacaggagaaagtacttcccatgttaaaaaacacttattgtcttgttttgctgtaatgggagttccagaaaaaatcaaaactgacaatggaccaggatattgtagtaaagctttccaaaaattcttaagtcagtggaaaatttcacatacaacaggaattccttataattcccaaggacaggccatagttgaaagaactaatagaacactcaaaactcaattagttaaacaaaaagaagggggagacagtaaggagtgtaccactcctcagatgcaacttaatctagcactctatactttaaattttttaaacatttatagaaatcagactactacttctgcagaacaacatcttactggtaaaaagaacagcccacatgaaggaaaactaatttggtggaaagataataaaaataagacatgggaaatagggaaggtgataacgtgggggagaggttttgcttgtgtttcaccaggagaaaatcagcttcctgtttggatacccactagacatttgaagttctacaatgaacccatcagagatgcaaagaaaagcacctccgcggagacggagacaccgcaatcgagcaccgttgactcacaagatgaacaaaatggtgacgtcagaagaacagatgaagttgccatccaccaagaaggcagagccgccaacttgggcacaactaaagaagctgacgcagttagctacaaaatatctagagaacac

SEQ ID NO: 8156 - DNA, 2300 bp, Homo sapien
attactaggagatattaattggattcggccaactctaggcattcctacttatgccatgtcaaatttgttctctatcttaagaggagactcagacttaaatagtaaaagaatgttaaccccagaggcaacaaaagaaattaaattagtggaagaaaaaattcagtcagcgcaaataaatagaatagatcccttagccccactccaacttttgatttttgccactgcacattctccaacaggcatcattattcaaaatactgatcttgtggagtggtcattccttcctcacagtacagttaagacttttacactgtacttggatcaaatagctacattaattggtcagacaagattacgaataataaaattatgtggaaatgacccagacaaaatagttgtccctttaaccaaggaacaagttagacaagcctttatcaattctggtgcatggcagattggtcttgctaattttgtgggaattattgataatcattacccaaaaacaaagatcttccagttcttaaaattgactacttggattctacctaaaattaccagacgtgaacctttagaaaatgctctaacagtatttactgatggttccagcaatggaaaagcagcttacacagggccgaaagaacgagtaatcaaaactccatatcaatcggctcaaagagcagagttggttgcagtcattacagtgttacaagattttgatatcaatattatatcagattctgcctatgtagtacaggctacaagggatgttgagacagctctaattaaatatagcatggatgatcagttaaaccagctattcaatttattacaacaaactgtaagaaaaagaaatttcccattctatattactcatattcgagcacacactaatttaccagggcctttgactaaagcaaataaacaagctgacttactggtatcatctgcactcataaaagcacaagaacttcatgctttgactcatgtaaatgcagcaggattaaaaaacaaatttgatgtcacatggaaactggcaaaagatattgtacaacattgcacccagtgtcaagtcttacacctgcccactcaagaggcaggagttaatcccagaggtctgtgtcctaatgcattatggcaaatggatgtcacgcatgtaccttcatttggaagattatcatatgttcatgtaacagttgatacttattcacatttcatatgggcaacttgccacacaggagaaagtacttcccatgttaaaaaacacttattgtcttgttttgctgtaatgggagttccagaaaaaatcaaaactgacaatggaccaggatattgtagtaaagctttccaaaaattcttaagtcagtggaaaatttcacatacaacaggaattccttataattcccaaggacaggccatagttgaaagaactaatagaacactcaaaactcaattagttaaacaaaaagaagggggagacagtaaggagtgtaccactcctcagatgcaacttaatctagcactctatactttaaattttttaaacatttatagaaatcagactactacttctgcagaacaacatcttactggtaaaaagaacagcccacatgaaggaaaactaatttggtggaaagataataaaaataagacatgggaaatagggaaggtgataacgtgggggagaggttttgcttgtgtttcaccaggagaaaatcagcttcctgtttggatacccactagacatttgaagttctacaatgaacccatcagagatgcaaagaaaagcacctccgcggagacggagacaccgcaatcgagcaccgttgactcacaagatgaacaaaatggtgacgtcagaagaacagatgaagttgccatccaccaagaaggcagagccgccaacttgggcacaactaaagaagctgacgcagttagctacaaaatatctagagaacacaaaggtgacacaaaccccagagagtatgctgcttgcagccttgatgattgtatcaatggtggtaagtctccctatgcctgcaggagcagctgcagctaactatacctactgggcctatgtgcctttcccgcccttaattcgggcagtcacatggatggataatcctatagaagtatatgttaatgatagtgtatgggtacctggccccatagatgatcgctgccctgccaaacctgaggaagaagggatgatgataaatatttccattgggtatcgttatcctcctatttgcttagggacagcaccaggatgtttaatgcctgcagtccaaaactggttggta

SEQ ID NO: 8157 - DNA, 2300 bp, Homo sapien
cgcagttagctacaaaatatctagagaacacaaaggtgacacaaaccccagagagtatgctgcttgcagccttgatgattgtatcaatggtggtaagtctccctatgcctgcaggagcagctgcagctaactatacctactgggcctatgtgcctttcccgcccttaattcgggcagtcacatggatggataatcctatagaagtatatgttaatgatagtgtatgggtacctggccccatagatgatcgctgccctgccaaacctgaggaagaagggatgatgataaatatttccattgggtatcgttatcctcctatttgcttagggacagcaccaggatgtttaatgcctgcagtccaaaactggttggtagaagtacctattgtcagtcccatcagtagattcacttatcacatggtaagcgggatgtcactcaggccacgggtaaattatttacaagacttttcttatcaaagatcattaaaatttagacctaaagggaaaccttgccccaaggaaattcccaaagaatcaaaaaatacagaagttttagtttgggaagaatgtgtggccaatagtgcggtgatattacaaaacaatgaatttggaactattatagattgggcacctcgaggtcaattctaccacaattgctcaggacaaactcagtcgtgtccaagtgcacaagtgagtccagctgttgatagcgacttaacagaaagtttagacaaacataagcataaaaaattgcagtctttctacccttgggaatggggagaaaaaggaatctctaccccaagaccaaaaatagtaagtcctgtttctggtcctgaacatccagaattatggaggcttactgtggcctcacaccacattagaatttggtctggaaatcaaactttagaaacaagagatcgtaagccattttatactgtcgacctaaattccagtctaacagttcctttacaaagttgcgtaaagcccccttatatgctagttgtaggaaatatagttattaaaccagactcccagactataacctgtgaaaattgtagattgcttacttgcattgattcaacttttaattggcaacaccgtattctgctggtgagagcaagagagggcgtgtggatccctgtgtccatggaccgaccgtgggaggcctcaccatccatccatattttgactgaagtattaaaaggtgttttaaatagatccaaaagattcatttttactttaattgcagtgattatgggattaattgcagtcacagctacgggtgctgtagcaggagttgcattgcactcttctgttcagtcagtaaactttgttaatgattggcaaaaaaattctacaagattgtggaattcacaatctagtattgatcaaaaattggcaaatcaaattaatgatcttagacaaactgtcatttggatgggagacagactcatgagcttagaacatcgtttccagttacaatgtgactggaatacgtcagatttttgtattacaccccaaatttataatgagtctgagcatcactgggacatggttagacgccatctacagggaagagaagataatctcactttagacatttccaaattaaaagaacaaattttcaaagcatcaaaagcccatttaaatttggtgccaggaactgaggcaattgcaggagttgctgatggcctcgcaaatcttaaccctgtcacttgggttaagaccattggaagtactacaattataaatctcatattaatccttgtgtgcctgttttgtctgttgttagtctgcaggtgtacccaacagctctgaagagacagcaaccatcgagaacgggccatgatgacgatggcggttttgtcaaaaagaaaagggggaaatgtggggaaaagcaagagagatcagattgtcactgtgtctgtgtagaaagaagtagacataggagactccattttgttatgtactaagaaaaattcttctgccttgagattctgttaatctataaccttacccccaaccccgtgctctctgaaacgtgtgctgtgtcaactcagagttgaatggattaagggcggtgcaggatgtgctttgttaaacagatgcttgaaggcagcatgctccttaagagtcatcaccactccctaatctcaagtacccagggacacaaaaactgcggaaggccgcagggacctctgcctaggaaagccaggtattgtccaaggtttctccccatgtgatagtctgaaatatggcctcgtgggaagggaaagacctgaccgtcccccagcccgacac

SEQ ID NO: 8158 - DNA, 2300 bp, Homo sapien
gacctaaggccatgccaggcaagggttaagtcatgcactcctacacttaaagaataaactatgtttaacttccacaagttttctgtttttctctagcagctaaacaaacactggccttgagataagcaatagtaaaacaatcgtagctcaccaccagacactgactaactgaccctctgttccataagccataactacagctttgattggacaacagactgatttcaataactttctcctgatgagaacatcaccaaccatgaggtggttctggccagtttaagaggactgctcacttgagtgcctttgtgtcctaaaaaaaatttagacataatagggcctaattgtaatgcaattaaatgttaagtctccagcccaaaatgaacatgggtcatatgttactgtttgttcaatatacatgcatcagaactaccttcataaatattcatagctcctcctatatcctataaattatgtatgtttagccaacttttcagcataaatctcctacctcaacatccctccttcaaagtacctgcctctttaggcttcagttggaggcacactcccagcttgtgggatggccctcctttcaggctgtaaccctttcctctcctttctagattcataaattacgtgtttttttaagttaacgtaagaaaggatttataggcaattgagaaaccaaattatgcttcttagtgctaatataccaagccacaaagcagtgagatgcctaggacttacgagatcgcaaactaataatatagcaaaagctggacttctggaaagctaaccatgcctaaatattccaaatagcaactctaatattctcatattcatctgtactttgcactgccctactttactcagatcacccatggggagacaaacgtgtgatgacagcagtgggaatagaatcaaggccattgcctgtggctaggccaattaaaaacttgccaagatagccaagtgtccagttgtatacatttagcttttcatgtcagaattgtatattttatcctgttggtatgcttctgaaggagagttcatgtgttttgtgtcttaaatcgaaactggatttgttgtggcactttaaaatctgtcgccagtgtacattccaatttgagtcattgcaaccaagtttgcaaagattgttttaaacagtttcaactggaaaagtttattatttgaaatcttaaaatgaacaaattaattcacaaaggcagagacatttgaatggtgggtgaataatctttatttggtctgtactttctgcttccaatctgggaatttttccaagaaaacactgactgaaatacagtcagaatttatatatgcatttacattaggctccaacaataagattcagcctttttcaaaactgtcacttgcatagccaataaactagtgtctcaaaaatccatttaattttccatacttcccaaaaccatttcaatgcgatgatctcttttggcatatcttcccaagagattgctagttttgctgtgatggtccatttccagaatctggcagcaatgcgagaaccattaggaggctttgaaatgtagaccttctaagtagggcaaaggcaaggaagacgactgcagagggaatgccagaagcattaccgagtggatgagagaatgcagggaaggaaaatttccacttcacaaagacattttaaagagacggtgtttggggatgatgatgccacagaaagactcacaactcaaaatctcacaacaggattcagtagtttaacaaattcaactccaaattgtcccccagacaatcactgcagactcctcccggtggcaattgcctgtatctgaggattttacatctgtctttcgtcactgtcggtactgccacaaaaacactctcataaaaagggaggcagaactgcatcaggctctaaaacaacactcagctcacccctcgcgcaacaacccgggtccctagggatgcttgggttgccacccgccgctcgaagctggaggggccgccggagcctgcgattggctgcttcgggcacatcgtcccgccccgacctgtagctcctcccaggtttccgttgtcaaggacgcgccgtcggttgttgtcaagatggcggctgcagggttgctgccgccccatctgctattgcccggcgaggtcgccgctgcctcagctgccatcgccgctacaggcaccagtgccgctgcgcgggagctagggctgtcgaggccaacccttccgcgcccgtgacgcggggcctgagagacggagtgtagggaggggccgagcaggaggaggag

SEQ ID NO: 8159 - DNA, 2300 bp, Homo sapien
tatagaaaacttggctcctaagggggttatacaaaagtatatgccattagaaatgtattatgtacctaagtttcaaaatctcatgagcatggggcagtaccttttagaaacacaaggtacaaaactatgttttattatgtatgtattagcaaaatacaatttatttatttatttatagacagggtctcactctgttgcctaggctggagtgcagtggcataatctcggctcactgcaacctccacctcgcagtctcaagcaatcttcctgcctcagcctcttaagtagatggtactacaagcatgcaccacaacacacagctaatttttgtattttttgtagagatatggtttcaccacgttgcccaggctggtttcgaactcctggactcaagcaatctgcctacctcggcctcccaaagtgctaggattacagatgtgagccactgggcccagctgaatgggttcacttcactttctatagtaaaagtaagatcccatcagtgagcctggggggaaaaaaagacaggtgggtgggagtgtgtgtgtttgtgctgtttgttggaacagacctgtcagggcatccaagtcttatcaagtggtaagacagtctatcgagtgtgatggaaggtgacagagacctggcagaggcattcataggaaaaagaaagaaccctgttcctgtttaggtgaagctggaaaccatcaatctttagtggtacaatctgtattgttttgtgatttttctttgacagcatttttattattcgcatgaaggagtaaaggagcaggactatagtagttattgagtggctgaggcagaatgattggggtacaaatagccaaagatgttggtgagagaaagttcaaatagttaagaatagggtataaactggagaggaaaggagaggcaaggtgggtgctaggataaaatgggagggttgaagggtagagatatttatgaggaaaaaaaggcaggtataaggggacatgagagaccttccttttttttttttttttaaattccatttctatttgaactctcaaaagagaaaaagagattgaaatgacagaactttagctaattttaattaaataaacttcataaggttttgttgttttataacctttagagtcagaaaattctgactccagtgagaaaatgtcttcaacagaaagccagatggcctctgagtatcatgttcatatttgaaattgaaatgtaaatgttaccacatacttgcttattttaaggctgtggtcctttcatttgctttctttcctttttttcatttagtcatgtaaatttgagcacctactctgtgctaggtatccaatgggaaacattatagacacaaagaacattccaattaaacttatataaaaggtactttagtgtttttccagctagcaaacataatgttcttgatttagtgttataatctttattatgttcaaaaataattcctctgttccaatttaaatatatattatctaaacatatatatacacacatatgcaaactagcaaaaatatatataaaccagcacacacacacacacacacacacacacacacacacacacacacacacattgttggattttatcaaagtctattggtcatctattaaaatgttcatttataacttgcctaattttaactatatatttagcctttaaggatcttttttagtgttgtatttctttataggaaatgtcattctaattctggaatagagtctatttggttgtgttcattcaaagtattgctggattctatttatgaatattttctttggcatttgtatcaaaaatttataccacataaaatttaaaaaatgaggcctacaaccattttattaatgaaaataacagaaaatacactctcaatgagccatttacaatacttccctattttctgatttagagataaatcagggtcgtgtaatagcagttgtgtccaagaaaatataatgtcaagaggccagaattaaatccatacagaaaatgattgtgttcatttcagagtaacctttaagagggcaattttggggagcagcaagggcaaaagccaaactgaatggggttaataatgaatagatgagaggaactagaagcagctattgcaagctaccattttgagaacctgcccaaagaaagaaaagactgaagggatggaagattgcagaaagcatgatcggagaagagatattttacttttagtgaagctctatacacatttgtcttcctcactagatttgtatccctagaacctagaacagagtcagccaaagagcag

SEQ ID NO: 8160 - DNA, 2300 bp, Homo sapien
tatgccctacaatctataacttcagtataatctcatatatttctacatctaatgatgaggtactaaatgtgattacacggtaattcaatgaacttttttttttttttttgagacagagtctcgctgtgttgcccaggctggagtatagtggcgtgttcttagctcactgcagactcaaccccctccaagctcaagcgatcttcccacatcagcctcccaagtagctggggctgcaggcatacaccaccacacctggctgatttttgcattttttgtagagccggggtttcaccatattgcccaggctcatctcaaactcctgggctcaagcagtctgcccaccttggcctcccaaattgttgggattacaggtgtgagccactgcgcccagccaaatgaacttcttttaattcaaaatcattaaaaacagaagactcatgaaaaacagaaaattactctgacaaatttgataaagatacttaataatgtcaattaaaacgcaactaaataaattggagaaattactcatattgctacaacttatttaaggagagtttaattttataaaataaatttcaagtgaatagatgattaggataaccaaaatattcctctttttctctgacaagcttctggatacacagatgactatacatagttttcctagtggttttttataaccactaagtcactaagtaaataactaaactgtattcctaaccattctagttatattgctatttgattgtttaatatttgaaaatgtactttcctactatagattaagggatctggtgaaacatttactccatctactttctattagtaaaatacaatcttcttatttcattttcttatattcatgactatgagggcaacttgttagtaagtactcaaatatctgtgtaatgaggccaagcacggtggctcacgcctgtaatcacaccactatgggaggccgaggcaggtggatcacctgaggttaggagttcgagaccaggctgaccaacatggtgaaaccccgtctctactgacaatacaaaaattgactaggtgtggtggcacatgcctgtagtcccagctacttgggaggctgaggcagaagaatcacttgaacccaggaggcagaggttgcagtgagctaagatcatgccactgcactccagcctgggcaacagagtgagactctgtctcaaaaaaaaaaaaaaaaaaactgtgtaatgaatgaagatatacagtcctctttatctgaagttcatgatttctttttttttttttttttttttttttgagatggagtttcgcttttgttgcccaggctggaatgcagtggcgcaatctcggctcactgcaacctctgcttcccaggttcaagagattctcctgcctcagcctcctgagtagttgagattacaggtacccgccaccacgcccgcctaatttttgtgttttcagtagagacaggtttcaccgtgttggccaggctggtctcaaactcctgacctcaggtgatccacccgcctcagcctcccaaagtgttgggattacaggtgtgagccaccgcgcccagcctgagctcatgatttctaaaagtagattttttttctccaggaaaagtgagctatatcttactttctaataccaagtcagaatttttttttttttttttgagatggagtcttgctcttgtcacccagactggagtgcaatggcacaaccttggctcactgcaacctccgcctcccgggttcaagcgattctcctgcctcagcctcccaagtagctgggaatacaggcatgcaccaccacgtccagctaatttttgtatttttagtagagacggggttttgccacgttggccagccgggtcttgacctactgacctcgtgatctttctgcctcagcctcctaaagtgatggattacaggtgtgagccaccgcacccagccccgaattttttttacataaaatgtttgccagtcatatactaatgtgggcacatactaattattccacaaaaactatcattacatcatttgcatgaggctgtagttatatttatcatatagcactgacagtcatccactaaagatgtagaccattgttcttaacttaatgctatcattagagatatgaaaatccatctggagaaaaatttagaagaagagcgccagatattactgcagcaacaaaaaatatgtcgaaatcgagcacgtaaatattttgtggagtcaaatcggagaaaaaagtaagtaattgcactttattcagaagtatagaaattcaaagtcaatataaag

SEQ ID NO: 8161 - DNA, 2300 bp, Homo sapien
agacacacatatctatatttctgtatccatgtatctgtatctatatttttaaaattatgaatttacactcatatgttgtttttaaaattttaaaaattatttgtttagagacagggtctcactttgttgcccaggttggagtgctgtggtgcagtcatggctcactgcagccttgaacttctgggctcaagtgatcctcctgcctcagtctcccaagtagctaggactacaggtacatgccaccatgcctggctattttatttcaatttttatagagactggatcttgctatgttgcacaagtttgtttcaaattttggcctcaagcaatcctcctccctcggcctcccaaaatgttggggttataggcgtgaaccatcgtgcctggccttggtaccttatttttgagagcccccagctaaattggggttccaatatcagagtagctagcaaccctaccccaacaggatatgaaggggagatggatgtgggtgtttacagtgtgcctttcatgggatacttcttttacctggaggatggcctaagtcctagttgcctgacctgactgggggtccctcacatgggaaacttgtttatactggcagatgcccttgtggctcttgtctgatccatgtccagtttatgcctgcctgaccatcactttggcactgggagttcaaccttgtgctctccctggtgtcccctggttcttcagatggaaagcacaaattcagtacatcaccacaataggaaataagttcaaagattttcacttacagatcctgggcaaggagggcataatgagtcaggagggcagtcctctgtccccaggtcatatgaggcagaaaggaagagccagagagaaagtgtgtctagcagcatgtctaagggaatggagtgtgggccactttaataggcaaatgtctaaatggtccatttaaagagaggcaggaaagcagggagtgcagtccgcaaggcaggagagatccctctaagttcttgtcactggccaccagcttgagccatctgggtgtaatgtagaactggaaattgtgccaaagatgactgagccctgctttggtatgagaaagttaaacttgtattcaaaatggatgctgagcaacataaaattgtaagaattctctatatatctccgacatcaatccagcaccaaaagttttattctaatattccccctttctgggaaaggcaaaataatagaaacaaaatccagatcagtggttgctcagggctgtatgaaggaatttttggcatgatagggctgttctgcatggtacagtagtgatgggtatacaatgctatgcatatgtcaacacctacacaattctacaaagagtgaatttactgtatgcaaataggaaaaacatccaggatgttggaagaatccaacatgggatacagattgtgacaaatgaatctaaactgtattaaaattattcacttggtaaactatcactcctgcaatcctagcgactcaggaggctgagatgggaaggtggtttgaggccagggttccagtgtagcctgggcaacacagtgagatcctatctccaaacaaaaaaaaaaaaaaaaaaaaaaaaagaaaagaaaaagaaaaaaagctaggcattgccatgcatgcctttagtcccagatactggggagactgaggtaggaggatctcttgagcccaggagttcgaggctgcagtgagctatgagtatgccactgcactccagcctgggtgataaagtgagacccccaactcttaaaaaacaaaacaaaaacccaccacagtgaagggggtagagaagaaggaactggctttagtgactttggaaaacagtgtgttgactgaataagtaagattggggatgaaaagaatgataaaaatgctgtactttagttagaaatctgtttctcctaggtatgtggattagcaattctgaagcaaattttcatgtatactagagttaaattagtgcctgtattgtggctaatgagtgtcaggtttctcaatgtcaaagaaaatacaaacaaacattttgggaatttttatattaaaaatttacagttataaaaaccaaatcacatttagttatatatttaatgaatcatttttattgcaaagggtaaattacatgaaattgacaaaatttagtccatgtaatatctatcaaaatacatacatgtaagtgtgtgtatatttatatatgtatacagtacagttttcacaaaaagcttcaacattcctaagaaacacagacatagtcattctggtacaatatggatttaaaataa

SEQ ID NO: 8162 - DNA, 2300 bp, Homo sapien
agcaacagcctatgcaatcttgaagaaaaagaataacaaagttagacaacttataccatcagatatcacatctttatataatcctacagtaattaacacaatgtggcatttgtgtaaggacagtccaataaactgaatagaaagaacaaaaacactcacttgattttttttttaagtgccacagcaattcactggattagaaatagtcttaccaatatatagagctgcgtctactgaaaaaccacagggaaagaactaatcttcagcttcaaaaaattattttgagatggattatggacataaatgcgagactatcttcttgactttgtttaggcagaaatcaaacctgacacataaaaaagaaagttgataaattcaacttcattaaaattaagaatttctgagcatcaaagctacaggcaagctacaagcaaagagaatgttcgcaatatgtatatctggcaatgggctcatatccatattatataaaaacttcctaaacattagtaagaaaaagactgacaacccttcttcctcctaatggacaaaacactcaaataggcatttcactaaagaagatatccaaatgacccagcatattgcaaagttgctcagcaacattaactatcaaggaaatgcaaactgaaatcacaataaaaaattaatacaaactccctagaatggctaaaattttaaaagactggcaatactatgtgttggcaaggatgttgaacaacgggaaatctcattcattgctggttgggatgtaaactgatctttagaaaactttttgacagtatgtagtaaagctagacatacttatgccatgtaactgagcaattccaatcctggatgtatttccaacagaaatggtgcataagtccatctaaaggcatacacaggaatgttcatagctgctttcataacaacctcaaagaggaaacagcccaaaaggataaactgtagtatagtcaagtaacagaatactaaacatcaatgaaaaggaataatctatctctctctccctctgtttctcttttttgtctttgttccctgtctcttcttctgctaatgctgttaaaaaataatcaagttcttaagggctaggggaaaaggagagaaagcaacgagatggaaaagaactatccctccattctgaagtccaaatgcactgctataaggcaaaaataaaaaccatagaaacaggccgggtgcggtggctcaagcctgtaatcccaacaccttgggaggccgaggcgggcggatcactcgaggtcaggagttcgagaccagcctggccaacatggggaaaccctgtctctactaaaaatacaaaaacttagcctgtaatcccaggtactcaggatgctgaagcaggagaatcacttgaatccgggaggcggaggttgcagtgagccgagatcgcgccactgcactccagcctgagcaacagagcgagactccatctcaaaaaaaaaaaaaagtagaaacgaagataattttcaatagaaaataagaaaagtgtgttttctattaaacagcacgcataccagaacaaaagtggtctaaaaaacaaaaataaataaacagcatgttgtaatgtactgtgtatggaaacattttttttttttttttggccttcaagtgtacattttaaggaaaaaaaaaaaaaaacagatggtaaaacagaatagtttcctaagtagtcacatagacatttgtcttccaaaatagataaacctaattaattcagaataatcttttcttcagaaacgtttgagtcatcaaacgtagataactgtaaatctgaggttatagctcttgagactagaatattaacccatgctgagtaattattattaaaagttaatgtcaacaagtatcgattggcaatttgtctccatccccgacccctagtttccctaaccgccaagcccggggttggggagtggagtggcacaagctcctgggaaagacaggctaacctccctccctgcacccgcggcggcaaggccggaactcctgggtccctagagacgtgtggccccgcccccgcagcgtcgctccgacacgacggccgccgcgtctccatggaaacggcccaggcatccacccagccgagagcacgatggctactggggagctcggggacttgggtggctactacttcaggttcttgcctcagaaaaccttccagtctctgagctctaaggagatcaccagccggctccgccagtggtgaggaaccgaggcacagggagagaagaggcccttggtcttcgcggctgtggaggcgcagg

SEQ ID NO: 8163 - DNA, 2300 bp, Homo sapien
tattcaccagataattatagaatttacttaaactattttttttttgagatggagtctcgctctgtcagccaggctggagttcagtggcgccatctcggctcactgcaacttctgcctcccgtgttcaagtgattctcctgcctcagcctccagagtagctgggattacaggtgtgcgccaccacaccctgctgatttttgtatttttaatagagacagggtttcaccatgttggccaggctggtgtcaaactcctgaccttaggtgatccacccacctcagcctcccaaagtgctgggattacaggtgtgagccacagtacccggccttttttttttttttttttttttgagatggagttttgctcttgttgcccaggctggagtgcaatggctccatcttggctcactgcaacctctgcctcccaggtacaagtgattctcctgtctcagcctcccaagtagcttggattacaggcatgtgccaccacgcccgtctaatttttttgtatttagtagagatagggttttaccacattagtcaggctggtcgcaaactcctgacttcaggtgatccaccccccttggcaacccaaagtggtgggaccacaggtgtgcaccaccacacttggcctacttaaactattaattcataatgcattatagatagtgtcatttggtgatgagacaaagtttaaagttctacaaagaatgcctccttgtatagtgtaggcatatatttgggaaggtagtgtaaccttatttggacaaaatgttaaaagctttgattgaagcttctcatgaatgtggggctaggccctataagcttaggcgttggaataaaacacagataactggattaaaacagtataacagattcggttcattaaaatccatgagagaacgggattgaagatttagataattgtgagaaatttatttattattattattgttttttgagatggagtttcgctctttcgcccaggctggagtgcaatggcacaatctcggctcactgtgacctccgcctcctggatacaagtgattctcctgcctcagcctaccaaatagctgggattacaggcatgtgccaccatgcccggctaatttttgtatttttagtagagacagggttttgccacgttggtcttgaactcctgacctcagatgatccacccacctcatcctcccaaagtgctgggattataggcataagccatcatgcctggcatgggaagtttaaacaatgaattacgatttccaaactgaatggcaaggatgttatcttagtctgtttgtgctgctataaaaaataccacatactggataatttataaatactagaattttatttctcacagttccggaggttgggaagtccaagatcaaggcagcaacaggtttgctgtctcatgacagctgctttctacttccaagatggtgccttgttgctgcatcctcttaaagggatgaaggctgtgtcctcacacagcagacagatgaaagggcaaaacagctgaatgctgtgtgaagcctcttgtataaagttcttaatcccatttaggagggaggaaccttcgtgacctaatcacctccttaaaggccccacctctttaatactgatgcactggagacgtttcaacatgaattttggagagacagaaacacccaaaccataacagaaatgaaaagggaagggagtgataggttgcagaaaagggagaggttaaggataaatgagatgtgagtaatgaaataagagaaccagatgattattaagaatatggtataccatagtctgacttcactactggagtatttctggatgatgcagagtacagacgaaggggcaggtggctaaagtgaagtagagatgagggtccattttagttgacaggtcaactaattgggatacgcatgttttgagatagtgatctacctggacattgaaaatgatccaggataagggtgcatctttatacgaagaaggtgactccctattttaagatgctgccaacagataattggtccacaaaatgggcagaagaggaagggagtagacaaaggactgaatatgttatctttatcccctactacaccgtggttgaaattgtataaacgaggaatagtaaattacaaaatcttggttgatgatacagaagtgcttacagaacatagtcactccaaagaccctttcactccacttatcaaagtaattttgtcctcagtttaatggcaggtgaaacaatattgaacaaagcagcctctgctgtatctgaagccctttagttagtgttca

SEQ ID NO: 8164 - DNA, 2300 bp, Homo sapien
ctggtctcgaacttctgacctcaggtgattcccctgccttggcctcccaaagtgctgggactacaggcatgaaccaccgcacccggcccactttggttcctaaagttttctttcaggtaaagtttttaatgcatagtttctgcccaaaggttttgtttgtgtggactgattattggataagagaggaagggactaccaacagggtccctgaggctgtgcttagaaagagagggctgctgcaaggagaggctatgttactacctgtgaaataatctgtgaacatgggacaacaatgacaactgacattgatgtggaactcactgcacgtcccaaactgggctaagtactttatatccattgactcatttaatgccccaacaactatgaggtaggtgttattacccctgatgctaatattaaagaacaggaaataaataacttgtccaaaacctcacagctagtaaatggcagaactgggacctgaactcaaaactctgtaactccagaacctgcaagtctgtcgttaaatgcacttgacatttaggagtgggaacaaatccaagaactagtcatgggtgtcatttactctgatcctttttttcagacaggaaactgggggttcagagtagttgattggaatcttctgttagaattttgagtgtctgaggcctgctcctttggccgagccctaccacaccaagtgatacagatccttcagaattctcctgggcatgttctggctgaaggaagaaattacctttttgctcacggactttttccttgcttaatcctacttatacctttgtttcactagcattgtagacaaaatcattaaaacaagaaagccagatttccttagaatgggcttgtgcatttaaaattagactgatgttgcacaatcctatgaatatatttaaaaaaacagtgaattgcttaaatatactaatatgtacaactattgcaaaaactgtatggtatataaattatatctcaacaaggatgctttaaaaaaaaaaaacccagagtgtatgacttaaaaaacatttctattgtttttgagtggcttccagaagggctccttgtacatcaggtgcctgggatgacctccttgcccattcatttcttattcagtccacattaacggagtccaccgttgggccaggcacagggatagcaggggtagggacccagctccttgaggatgaaagacaggtacagaggcatgaatgcttgtacctgaagacgcactaattttttgggttgcggcttccagtgactattgcaaattcgagtactaaaaaagttgatgtgatttcactatttggaaaatgtagtgtttttgtttcttttaataagttacactgagttacagacctggtctcaaagcttcaattacagtaaccgtttacccctctcaagtgagtttttgcagactaacagataagtgaaacaattacaaaataaagttaatgctgaaaacaatggatctttattaacatcaatgccggctcacggtatctattttaactccaatctatcctcgcggctttaagctcgcacaggcgctccgctcggtcaagccggggtaacgcgaggaggaggaggtgggttcgcacatcctctctccacttctttcggccttggccctttcgcaggtccaggcgaactggaagcgcctttcccgagcacgggcggggaaaaggggccgagcggagcggaagaacttcctgcagccaagggcgcccgcgttctccgcagacaccacagttcggacccggattggacccatcgtttgcggttcgcggggcagaatacggggcacgcttcgggcccctgcccggctgagcgcgggcgaagggcggaccgggccagggcgagcgggtcacgtgcggccgggagaggcgccgcgggccgggagtgtgcaggaatgtagcaacttgcagcgaaaagtttccctgcgctgccggccgggccgcggtgcgggcgggcgcgcagaggaaggaagagccgagaggaggcggggccgcggcggcgcgggcgggcgcttctcctaactttagttttggcgtttgaggcgagtttctgtctcagtcgggcgcagccgccgccagggaaaagaaagggaggaaggaaggaacaagaaaaggaaataaagagaaaggggaggcggggaaaggcaacgagctgtccggcctccgtcaagggagttggagggaaaaagttctcaggcgccgcaggtccgagtgcctcgcagcccctcccgaggcgcagccgccagaccagtggagccggggcgcagg

SEQ ID NO: 8165 - DNA, 2300 bp, Homo sapien
tgagaccagctgggcaacatggcaaaaccctgtctctacaaaaatacaaaaaattagctgggtatggtggtgtgcctctgtggctgcagctactcatgaggctgaggcaggaggatcacttgagcctagaaggtcaaggctgcagtgagctataattgcatcactgcattccagattgggtgacagagtgagaccctgtctcaaaaagattaaaaaaaaaaaaaatctagaagcacatcttataacgtaactactgtagcattgaaatagcaatgatcataaatggtattttaaaatatttgcaacaactacaatgtgatatgaaaacatttatatgttctattggtgaaaagttaggtacagtgaatactaatggtgcatactacattggagaaaatgttgacaaatttagcgaaagttaatgtgtaatttttttttttttaccccattgaagttcagagactctctgaattctgtcatggtccgctggttaagaaactctggtttaaaggatggtatatccagaaggcataaacctaaagaaaaataagtggtatttgcatgcaggagaattgtagtttagaagtggcagcgtagagctaggagaagctttccatacttcaggaccccatggcgattgtggaggtgagggctggagatggtggggccgtgcctcagtgagcagacttggctcagaaagctgtgtggaaggatgacggagtcaggccagtatcctttgtgataagaaactgtatgtatttcaaatcaaacccaaaaagtagagggaaagaaagctgatggtctagtagagatgatgtttacgataggtggagaggcacagtgaaaattcttaggagggtaagaaacagtgaacagataaaggagagaaaaaggacagagtagtaatgagtgtgctacggatgggtcacagtgagatgaactgtttttgaggtcctgggcaaatacaggctgaaacctgggaggtttggaagcccttgaaggcaggccttctgcaaccatcagagtagcaacctacagcctttgctcaggtttacagggagaatcctgctgagaaattgttggatgaccctgaagaaattttaccccattttaaatattatgtttgtggtggagaagccttgggtttgtgttttaacttctgatgtctttttttcattttcctcctctctccctgctagaggatggaacatattctatccagctcaggatagaaaaacctaaagtcaaaatgagacatttaatagcaaagtgtgaaatagtgttgggggttggggaaggattggtgtcttatagtaaaatcatcagatgctattcttcctacttctttttttttggcgggggagggggtcggggggttccaaacacacaaaaccatataagagttgtcgagtaaaagcaaactttaagaattatttttttagggccgggcgcggtggctcacgtctgtaatcccagcacttttggggggccaaggcgggtggatcacgaggtcaagagatcgagaccatcctgggtaacatggtgaaaccccgtctctactaaaaaaaatacaaaaaattagctgggcgtggtggtgcgtgcctgtagtcccagctactcgggaggctgaggcaggagaatcacttgaacccaggaggcggaggttgcagtgagccaagattgcaccactgcactccagcctggtgacagagtgagactccgtcttgaagaacaaaaaaaaaaaaaaaaaaagaagaatttttttttaaagaccagacttgccattctataataacccaaaggaggatttgggagtatcttccagagtaaggaaaataacaaaaagaaaacaaagtagcaaaatgtatatagggtggggggtggttaatatgactagacagactttaaatatatgtaacttaatttttagtcatttgaaatggatagaattaggtcattctgattgggaaatgtattaactttaaagtagatgtttttaatctatctgcacggttactctgatgaacgttttatttctttaaacctaacattaaatgtgttaatcagtagattgattctctttggctttatttttaattaggagttagccctgcgtagccagttaccaacactggagcaggatggtgggactcaaaatccagtgtcttctcccgggatgtctcaggaattgagaacaatgacgaccaatagctcagatcctttccttaacaggttggtgaaagttgctactggtgaatatctgaaaaggatcattgctttaaaatcattctgcttagtgc

SEQ ID NO: 8166 - DNA, 2300 bp, Homo sapien
aggtaatattcatgactgcacacttgaaaaacttgcttaaaatacaagctgccacccccttaaattgtatttgtaatgcagttattaacatttacgatatttttatattgtattgaccaattatgctttaaaagtaatgaaaacaatatcaatgataatgtaatcaaagaggattttttttttttttttttgagatgcagtctcactctgttccagggctggagtgcagtggcactgtcttgactcattgcaacctctgcctcccaggttcaagtgattcttgtgcctcagcctcccaagtagctgggactacaggcgtgcaccaccacacttggctcatttttgtatttttgggagagaccggtttcaccatgttggccagactggtcttgaactcctgacctcagatgatccacccaccttcgcctcccaaagtgctggtattataggcgtgagccaccatgcctggtcaaagaggaattttttttttttttaacacttagatccttatgatcccagagaaaaaaatagatttcaagttctaatatgtatttgtttcagagatatgtgacagagagatgataaaagatgttcagtacaaacatgtattaacattctgtaggggaattggaatgttcaatgacaaaaggcaatgataaaatattttcagttattaaagatgacctgataattgcttcatggatgatcatgtatgtcaaattactatggtattaggatccatcaaatacatttaaaagagtgctctatcaattttttctgaaaatatctatgtttacattttgtagattcttgacatgtacaagagctttatgttttaatgttaagttaaaaatgggcaagggaatgcagagcttttcaaaattcttctggtgagtacataatcaaaaatgtgtaaggcctgcaaattattttcaataatctcaggagtgagttgaaaatggcttagaaagtcttgattgaagcagactcaaatgtggattaaaatctccatatgataaatacacttagtctttctgaaataattccaactggaacttcagctgctatggacagccaagtccacctaaacaagaggatgcctcagctcagtccaattgcgtgcagaatgcactggatgctgtttccacagaacgatgaagtctccaataatctttatgggctctgtctctggttggtaattgtctttgatctactggaagatagaaaatcagatgagctctccaaatccatctgttaccctggtacggatggctctcagataaagttgcttaaatttactgcttagagaacgttgagggaaatatggcagtgcaattagactcaaagatgtcaggtttccctgagaatggcactgcaactcagaaacctgccctgtgagatcaaaggctataaaggagggatttttttaagtagccaactccaccctacttattaaaaaaaaaaaaaaaacaactcaccaaaccaaacaaaagtatttccatacagaaaatttaccaagccatttcaatctttaaaatggtaaaataaactgcaaaggagaactgcatgatttttttcacatacccctacatttcctttcacctcttactttcttgatcagaacaaaaagtaaaaataaatagaaatatttcacaaagtttcgatttttttttttttaaatgctggacttctgcagctatagtagaagattgaaaaacctaacctttttacgtgtaaagtgtatggcggatggagggtggagaacagggcatattgaccttttccaggcaggctaagcaatgatcgtcctctctatatgggttgttatcaagatttcctctgacccacgagcaatgaagcaaatgtctttcagtaaatgccgcgaagatatgccacggttaagagtcatgcttttgggtcatggaaatccccgagtgggtttgccaggccactgattaagaggaagtgtgtgtggttattaccgctggagttcccctaagtcctaaaaggaaagcaccagtgcacatgcaaaccactgggaggagtgcggaacgcctggtacagataggggtggggatttgggtgacgcatttaaaagacagcgtgagactcgcgccctccggcacggaaaaggccaggcgacaggtgtcgcttgaaaagactgggcttgtccttgctggtgcatgcgtcgtcggcctctgggcagcaggtgggcaaggaaggctggtgtgtgtgtgtgtgtgtgtgcgtgtgtgtgtgtgtatgtgtgcgcgcgcgcgcgcctcccctggtgtaagaga

SEQ ID NO: 8167 - DNA, 2300 bp, Homo sapien
cagatgaaagttttgacacattaaaatacttctacagtgacaaagaaaaatcaagaacaaagctttttgatatgtgcaacaaatttagaggaagtaaaaagataaatgtgatgattggtcaagaaattatccagttatttacaaggccactgatattttaaacgtccaaaagtttgtttaaatgggctgttaccgctgagaatgatgaggatgagaatgatggttgaaggttacattttaggaaatgaagaaacttagaaaattaatataaagacagtgatgaatacaaagaagatttttataacaatgtgtaaaatttttggccagggaaaggaatattgaagttagatacaattacttacctttgagggaaataattgttggtaatgagatgtgatgtttctcctgccacctggaaacaaagcattgaagtctgcagttgaaaagcccaacgtctgtgagatccaggaaaccatgcttgcaaaccactggtaaaaaaaaaaaaaaaaaaaaaaaaaagccacagtgacttgcttattggtcattgctagtattatcgactcagaacctctttactaatggctagtaaatcataattgagaaattctgaattttgacaaggtctctgctgttgaaatggtaaatttattattttttttgtcatgataaattctggttcaaggtatgctatccatgaaataatttctgaccaaaactaaattgatgcaatttgattatccatcttagcctacagatggcatctggtaacttttgactgttttaaaaaataaatccactatcagagtagatttgatgttggcttcagaaacatttagaaaaacaaaagttcaaaaatgttttcaggaggtgataagttgaataactctacaatgttagttctttgagggggacaaaaaatttaaaatctttgaaaggtcttattttacagccatatctaaattatcttaagaaaatttttaacaaagggaatgaaatatatatcatgattctgtttttccaaaagtaacctgaatatagcaatgaagttcagttttgttattggtagtttgggcagagtctctttttgcagcacctgttgtctaccataattacagaggacatttccatgttctagccaagtatactattagaataaaaaaacttaacattgagttgcttcaacagcatgaaactgagtccaaaagaccaaatgaacaaacacattaatctctgattatttattttaaatagaatatttaattgtgtaagatctaatagtatcattatacttaagcaatcatattcctgatgatctatgggaaataactattatttaattaatattgaaaccaggttttaagatgtgttagccagtcctgttactagtaaatctctttatttggagagaaattttagattgttttgttctccttattagaaggattgtagaaagaaaaaaatgactaattggagaaaaattggggatatatcatatttcactgaattcaaaatgtcttcagttgtaaatcttaccattattttacgtacctctaagaaataaaagtgcttctaattaaaatatgatgtcattaattatgaaatacttcttgataacagaagttttaaaatagccatcttagaatcagtgaaatatggtaatgtattattttcctcctttgagttaggtcttgtgcttttttttcctggccactaaatttcacaatttccaaaaagcaaaataaacatattctgaatatttttgctgtgaaacacttgacagcagagctttccaccatgaaaagaagcttcatgagtcacacattacatctttgggttgattgaatgccactgaaacattctagtagcctggagaagttgacctacctgtggagatgcctgccattaaatggcatcctgatggcttaatacacatcactcttctgtgaagggttttaattttcaacacagcttactctgtagcatcatgtttacattgtatgtataaagattatacaaaggtgcaattgtgtatttcttccttaaaatgtatcagtataggatttagaatctccatgttgaaactctaaatgcatagaaataaaaataataaaaaatttttcattttggcttttcagcctagtattaaaactgataaaagcaaagccatgcacaaaactacctccctagagaaaggctagtcccttttcttccccattcatttcattatgaacatagtagaaaacagcatattcttatcaaatttgatgaaaagcgccaacacgtttgaactgaaatacgac

SEQ ID NO: 8168 - DNA, 2300 bp, Homo sapien
atttttaaatagtatatggtagtgatctaattttattttccattagaataaccattcattcagcattacttattgagtaattaatcattttctcattaatacataatgccagtatatcaaattcccaaatacatagatatgggtctcttcttggggctctgtatctccttcctttaattgtccatcttagggcgtttaataatacaagactgtctcaattactatggctttattgtaactcattacctggtaggacaagaccttccaatcttacttttcttcttcaaaattgttttaaatactgtaaattttttttctacataaatgtgaaaaacgttagaagggcaactgcagcagacatacatagcttatttttttaagattaacagcaactttatactagcaaaatgaaaaaaaattaactgaataaacaggtaactgaattaactagctgtaacactagactacaaagttatacaagattaaaagttatgaggtactatttattatatgtaaatattacaaatattttttgttaaaaatatctaaggcttttgagtttttgaaatgcaagctttcccctatacttaagtatattcattatcttactgctttggtcaggacaagaactgaaaaagagaaataatcttgagttcagaatgaacaattcttgctatatatattttcccacatgtgttaggaatgttctgtaaaccttccgagaaatagtgacttgaactaaatactaaactactaccaagccccaggtgcatttttggaagtttttagtcattgggagccatggcatttcttttctctgtattacaaactgttacactcactttctttgactattaacattggaacagtagacctcctgttctgtgactgactggcaggcagaaatgacacagacaggaaatgggaaatggttcagggtcttggaattcccccggctccctaattaagtggcttgctatttggaagttttttaaatatttgccccttggagttccccagagagaagcaagcatcggattcaacgggcaaagagcgtcaacttcaaaagtcgttcgttggttgtcataccacaaacatttactgcacgacactgtgtctatggcactattgggggagtatggcggggggatacaaaaggtccatgactagcaaaagccaagggtttttatttacaaattttctattacctaagcattaaaaaaaattgggctcctctctggtttatgtacaattatatgtgcatgtacaccaatacacaggcagacgtatatatttcattttattgaaacattcagaaaatactgggagtgaagcctgacttgcaatacagttctctttgctggcaatgagcatctgaaataatgacacttttttctttagtgcatatgaactgtttgtctccagaacagaaaaccaaaagtttaaaaacaagatactcccgttgacatcaagtcttcagaattattcatctgatgcttcctagtttccaaagtttcgcttttttcgatttgcacaggcagctgttgaacgctgatgctacacaaacggttacaattgtttacttaagcaaaaaatgccaccagactgactccatcctcaaaatgcagtcatctggacggggggaggcatcacacttggggagccttgccaggggccagatcataaccctgaggtgacacagggtaggacgcgcaaaaccaccggcgccagggcgtttccgcagggtttcccaaaactcaaacgcagcggctcacggtttgccacgtcccccaggagaatggtagacacagagaggaaatgtggagagggcacaaaccgcaaggtgaagaaaacgaacaaacaccgagttgatacggatagtccccgttcccctgagggccgaccccgtgactcccgatgagcgtccagttgcgccgggcatcctggcctcccagcgtctttcccggaggttcatcgccgcacggcggaaagcgctctcggttccgctttccggccccagcctcccgggcgccctcgcgcggcggctaacgctggtcctcggccgggcgcgctgacgtcatcgtgcgtcagagtgagcccggatggggcggcgggcttcgggagcgcccgggctgatccgagccgagcgggccgtatctccttgtcggcgccgctgattcccggctctgcggaggcctctaggcagccgcgcagcttccgtgtttgctgcgcccgcactgcggtgagtgctgctccttccgggctcgggcggcgtggggcgggtggggacgcgagggccc

SEQ ID NO: 8169 - DNA, 2300 bp, Homo sapien
attgaaacgaagatatttcggtggcggcgatatttcatatttcatagttgccactgcgctctgtcattccagtagtcgtctgttgtgtattgtgagaagcaactctgggaaattattgggtaaatcccatagtttctattcttttcccttccatcctatcccctgcccagctgcaatttgcgtaaagagaatgcagcagtgcggtgcacgtagataaaaatctttcatttaaagataggatataagaccgggtgtaattaaagcaatcatgccagtggtcgtagtgccggagccactgtttcacaggccactgtgttaggttttgttttcgagttgctttctgtggtcgttgctttgaaattgtaagggaatggcagagtttaagagtttatattaatgaactcgtggtgcattttactgcagttttcctagtcgtggagagacttgatattacaaactaacgttgctgtcttaattcctgctgtactgctgctgacagggtgtagtggagtgtctgtctgtctttttaaccaatgtgcctttgcctccagcagagtgccagagttacctttaggccagaaaaggggaggagagcaaggacaaaatgtttcctgtgtgaaaatttccatctgtctctgaagttgtgcgttttaaagacacgtatagttagtgctatggggagtatgttgcatttacttattttaattaatagctttttcatttagaaagttgtgacaaattgctggaattaagatgtattatctaaagtgtgaattattcttagactttactgaataaattgaagagtatgtaagttctatttggcatgcacatacagttttctaaaatactttttgttttttcttttcagatttacaaccctgaagaatctccctatccctattttgtccccctgcagtaataaatcccattatggagatctcgaaactttataaagggatatagtttgaattctatggagtgtaattttgtgtatgaattatatttttaaaacattgaagagttttcagaaagaaggctagtagagttgattactgatactttatgctaagcagtacttttttggtagtacaatattttgttaggcgtttctgataacactagaaaggacaagttttatcttgtgataaattgattaatgtttacaacatgactgataattatagctgaatagtccttaaatgatgaacaggttatttagtttttaaatgcagtgtaaaaagtgtgctgtggaaattttatggctaactaagtttatggagaaaataccttcagttgatcaagaataatagtggtatacaaagttaggaagaaagtcaacatgatgctgcaggaaatggaaacaaatacaaatgatatttaacaaagatagagtttacagtttttgaactttaagccaaattcatttgacatcaagcactatagcaggcacaggttcaacaaagcttgtgggtattgacttcccccaaaagttgtcagctgaagtaatttagcccacttaagtaaatactatgatgataagctgtgtgaacttagcttttaaatagtgtgaccatatgaaggttttaattacttttgtttattggaataaaatgagattttttgggttgtcatgttaaagtgcttatagggaaagaagcctgcatataattttttaccttgtggcataatcagtaattggtctgttattcaggcttcatagcttgtaaccaaatataaataaaaggcataatttaggtattctatagttgcttagaattttgttaatataaatctctgtgaaaaatcaaggagttttaatattttcagaagtgcatccacctttcagggctttaagttagtattactcaagattatgaacaaatagcacttaggttacctgaaagagttactacaaccccaaagagttgtgttctaagtagtatcttggtaattcagagagatactcatcctacctgaatataaactgagataaatccagtaaagaaagtgtagtaaattctacataagagtctatcattgatttctttttgtggtaaaaatcttagttcatgtgaagaaatttcatgtgaatgttttagctatcaaacagtactgtcacctactcatgcacaaaactgcctcccaaagacttttcccaggtccctcgtatcaaaacattaagagtataatggaagatagcacgatcttgtcagattggacaaacagcaacaaacaaaaaatgaagtatgacttttcctgtgaactctacagaatgtctacatattcaactttccccg

SEQ ID NO: 8170 - DNA, 2300 bp, Homo sapien
aacacaaataccttaaatgggatactttatcaacaaatttataaacaatagaaatctatttgtcccagttctggaggctgggaagttgacagagcaaggcctcaacagatttggtgtctggtgagggccctctgcctcacagatggcgtcttcctgctgtgccctcacagtacagaagggtgaaacaagttccctcaggcctcctttacaagggcactaatcccattcattagcaaccaaatcacctccggaaagcctcacatctttttttttttctcttgagacaagtctcactctgtctcccaggctggagtgcagtggcgtgatctcggctcactgtaacctccacctcccaggttcaagcgattcctgtgcctcagcctcccagctactcgggagcctcccgagtagctgggattataggcacgtcccaccacgcccagataattgtatttttagtagaggcggggtttcaccatgttggtcaggctggtcttcaactcctgacctcaaacgatctacccttctcagcctcccaaagtgctgggattacaggcatgagccactatgcccacccaagtcccacatcttattatcatcaccttgaggattaggtttcaacacatgaatgtggtggggatataaacatccagacctcttattccaccccagattcccaggctataagtacactgagccttaaaggaagtattagctgtgggttggtgaagagaattccagaaggaaagaacaacgtatgcaaatgccaggaaccagaaagcacccttctccatgggcaacagaaccaaggctggaaagacaggttgggcctagattgggaaatgcttggataatggggtagtcaccagaacggtttattcctaaaccagattccccagttaaatagaataaccaaaatcgaaatgtgcaatgcttgctttttgtccatgataagctgcaggggaaacatttgcaggttggctgactgaatccacagatggaagtctctgtaaatttaggacagattgtctcagttaatctctaggaccagtcagacctctgtaatgatggatttgcctgacatgagaaagttctacctctcataacacagttttcaaaagttaactgcaatgtggcctttatgtgatgaaatctggctcaggtgccaaagatctgcaacattaagacctttgcaggtggggattcactgtgattttaggttccttggatccttcagtcttctacttcagctgagggttcccacccaagccaggactcagcctttgttattctcatgcattagccacaggtagctatgtcacttcagagttctgagcacgatgaaaatgcagactttacaagcacttcaagtcaagacaagtgattagcattggctccaagggtttaaaaggaactcagccaaaaactgttcaaaactggccatttcatctgaactgggacagcagggcacaaggagagaaaaggctggttggattaatgcagcccccgctttccatggctctactgtatttcactgagagttgctaccaactcctgcgcgcgcccccacccgcccactccactaatctcgtgtcttaatcagagatacagggaacccgtggagaagatgaagtacaactgggataagaagatcgtaggtgttttacgtttgaatttaagcaacaaatctgtcgagctgtttttctccacttcccccttaggctgggtcacgcgaggggaaagctccgaccgcccaggactccttagagtgaatcccatcccctcaagttcctctccagaatctccccctcctcccgcctttgccctgcaactcctccctctcactctgagtcgcacgcacccctgtcccctccctgcccgcaaaactactcttcaaaggcttccttccgggcaccgcgaagccagcgtgctcagcattcagggaggcagcggcgctcgccttcatccaggacaacaaaactgccatttccgaagagaaaggaaacggctcgcggtttctggggttcccaagcgcgcgcctgcgagggaggccgcgagccgagtcgccacgcccagaaccccgagcccgcccccgcgccacccagcccggccccgccgccccggctgcgcacgcgacgccccctccaggccccgctcctgcgccctatttggtcattcggggggcaagcggcgggaggggaaacgtgcgcggccgaaggggaagcggagccggcgccggctgcgcagaggagccgctctcgccgccgccacctcggctgggagcccacgaggctgccgca

SEQ ID NO: 8171 - DNA, 2300 bp, Homo sapien
aattggtaagtagtggtatctcattactgttttgatttgcatttccccaatgacatatgatgtgaagaatattttcatatgcttattcactatctgtatatcttttttggtaagatgactgttaaggtttttggcccatctttaaaatcagattgtttgtgtttttattgttgagttttaaaagatacttgtatattttggataacagtcctttattggatatgtctttttttttttttttttttttttgagagagagagagagtctccctctgtcacccaggctggagtgcagtggagtgatctcagctcactgcaacctctgcctctgaggttcaagcagttctcgtgcctcagcctcctgagtagctaggactacaggcacgcatcaccatgtttggctaattgttgtatttttattagaaacagggttttgccatgtttcccaggcttgtctcaaactcctgacctcaggcaatccactggcctcagctttccaaagtcctaggattacaggcgtgagccaccgcgcctggccatggatgtgtctttgcattcattttcacccaatttgtggcttgtgtgctcattcacttgaggaaatgccttttgattttaattcaatgcaaatattaccaaaaacgtgatataattccatttttagcttattcaagtaaagttcataaatattcattattctacaaatatttatggtgcaccttatcacatgtcaaactctgactaaggataccaattactctagttaaactgtgaccgtacagaatcaagacatctctgtaaagagagcaaatttaattaactgatctgaaaattttacctttgctggctcacagtgctcaattaccatgtaattgaagtgatatgtgattaattaaattttttagctccagcatatttggagtgtttcccatgatgtattagagtcaaaagccatggtgttctcccaagtaatgtataatataataaaagagacagacctattacaaaatgaataggcagtgcagtgggatagaaaaagcactgagctactatctgtgtgagctgggagaagtataataagttaaattatcatcttggcctcactttcatttttggtaagaatggagtcattgggctagaatctgtaggtaatggattcttactgctatacgtagaataaccattttgtgtactaaggaccaatgcagccctacctgtagctgggcagcagccagagtcagagtgattggaagaaaaaaattggatctccaagttgaaggtctagccttggaagaatctgttactataaaatgagaagcagaataagtaagccagatgaagagttaaacccgtgcttgtagatttttgttggcttggtatttttttgtgtttaattcaagaagaattagaggcagtgttccccattaagaaaagacataaactgattaaaaggagacccaaagaagggaattatcactgctctgctaagggacgtggaaggtgaggggacacagcacagttgtatatagagtggccactaatccagccacacagcagcatttccatctgcctcctgccatctttcccctgtatggagaaccacaggattttggtgatgttctatttcttgactttggtgacggttacagtatttgcttaattattatttcattatttacatgttttgtgcacttttccaaaccttttaattgttaagaatatatggtaccatgtatttaagaatacatggtaccatataataagaatatatatttaagaatatatattattctttaagaatatatggtaccataatgtcctgaatgatacctatgagagcagtcatttgactttggcaaaaaaatgaggtttctcatggagtcaatttatgcagcagacagaaaaaaaaatcctttgaaagacaaatacattgtgtgcttcctgccaataacgatgtaatacttcctcgttttagttaatgaaaaataacacatactttcaaagttctgtagactctaaaaagaaagaaaacactcaaatgagtcacctatttccacattcgaggctgagaagctatataaatttctgcagtcactagcagaaaacaccaaatcaaccataggtccaagaacaattgtctctggacggcagctatgcgactcaccgtgctgtgtgctgtgtgcctgctgcctggcagcctggccctgccgctgcctcaggaggcgggaggcatgagtgagctacagtgggaacaggctcaggtatgtcacagcccacttacttagggttccattcttttgc

SEQ ID NO: 8172 - DNA, 2300 bp, Homo sapien
gtagatcacaccctataggcaattattaacttccatgtgcttccaaaaacagaacctagaatactctttagagtcctagaggtgagaatattttctctctattggtcccagaatttcttaccgtcattccttccactccaatgttcacttccatgtctgtctttgctttggggccatcataatgaattggaacagtgtttaaaggagagaaaaagggaagaggatgaccagttgaagggaagtttcaaagattctttttgttcttcaattttagcagctgttgaagataaggctctagaagacaggagaccatataaatgcaaattttgaaaaattattgcaatatcctattcctttcctgaaaccaaaaagcaatgattagtatatgtttgtacattcattcattctttttttttaacaaacttgattaagtaacattttttagaatacagtcttcaaacagcttacaatttagttgaatgaatctaatctgtggttttcttttttcttcttctgagacacatgttttgtctatctcacagtacatgccagaaattctgtttgcctgtgtgtattagtccattctcacactgctataaaggaatacccgagactgggtaatttataaaggaaagaggcttagttgactcacagttttacatggctggggaggcctcaggaaacttagaatcatggtgcaaggcaaaggggaagcaggcaccttcttgacaaggcagcaggagagagaagatcaatggaggaactttcaaacacctataaaaccatcatatcttgtgagaactcactcattgtcatgagaacagcatgacggaaccacccccatgatccaatcccctccctccctcaacacatggggattacaattcgagatgagatttggttagggacacagagccaaaccatattaatgtgtgacaaactcttgttcagtgcctggggttgtacactagataccaaacattggctgtaactccaccatcttctcttccatgcaaagaaagcatatcaaaatgcaacagagtgagaaagactataggaattcactgtattcactataggaataaccttgaatttagtctaaaatcaaaattaggatttgaatccacatctagtggatgccaagtggtgcttgcagatgtcatgctatatgtgttactccataacactgaaaagtttatacatagtagtagtattgtcagtcttttgtagattaaaaaaaacttgatattcagagattaaatgacatacccaacatcacacagctaggaaatatctttttaaatatttagtcttgctttgtctgactctaagtgcttttcccaccatatgacaccatttcaccgtatcatctctggatccaaatccatcttaatcagacccaggaaaaacaatatgactccaattaaccagagtacacagagattggggagttctggctattgttttggttaacgaagacgtaactcttgccttaattcatccaaaagctttctaacagttaccagttcactttccaccctaagtcagcacagtataatgtaatcttgccttgatgattcaggatcttatgtgtctcagagccatcattatgaacagcagttgctactaagaaattttgaagtgaatgcaggagatacaggcgattgggttgaatgcatggggagtttgggattacttggaggacaaattcaattatactgtaatcatctaacttttctgtaatcagaatggaaaaaggcccccaaatgaagactaatcaaatgtttcagttgagttgggttcaaatcaatcaagtttacttcaatttttgtaactagctgaccaacttcattaaaagtgactgtttttctccttttgccacttggtaaataacaaaaaaaatatgaagctttccctgattcctgtgtacagttgtgttaccccatcatcagggagagaaatgagctgtataattactgtttgagacatgaatcatccttgctcggagggtccagacctgtttgactctataaaaggagctcaaggtcgaagtgcaaacgtgcactgtctgccatcccccaggctgatataattaccaagctactgtgaggggatgaaggtgctccctgcatctggccttgctgtcttcctcatcatggctttgaagttttccactgcagccccctccctagttgcagcctcccccaggacctggaggaacaactaccgcctcgcacaggtttgtgaatttttgcccaattccttcttgctcctctgccctagaaaacctaaaagggcat

SEQ ID NO: 8173 - DNA, 2300 bp, Homo sapien
caattcaactatcaactgcggagaaaaaaggctatacaagaaaggagatgtaaggccaggcatggtggctcacacctgtaatcccagcactttgggaggctgaggggggtggatcacctgaggtcaggagttcaagaccagcctggtcaacatggtgaaaccccatctctactaaaaatacaaaaattagccaggcatggtggtgcatgcctgtagtctcagctacatgggaggctgaggcaggagaattgcttgaacccgggaggcaaatgtcgcagtgagccgagattgtgccaatgcactccagcctgggtgacagagcgagagtccgtctcaaaaaaaaagggaaaaaaaagaaaaggatatgtaatcatagtatactacgtgattctcttgtgaataatattttcatggtcataattgtatgaacgctgattacgggcttaaacattcctataaccaaattaggaaagcagaaggagtgttaagtccttcttttccataggaagatgttaataataacatttaactttgaaaactcgagaaatagtagcataagcacgttatttacaaatgtggagttaaacataaagataaaaagctataaaaataatttaaagaagttacctttggggagcaggacttgaaggagcgaaaggttagggcagagagatgctttttcgttacaacaagatagcaccatttgacttccctttttctggtaactctatttttttttaaattttgttctgaaatattttagagtttaaaaaacacaaaagaacaatacaatgagcatacttgtacttagcatacttgtacttaataccattataacacaaatcctgatcatgtctgccttctccccttcatcccattgctccagaggccaattaaacaatttaaactatatacatatattaaaacagtaaataataatatttctgaaacaagatttataactgggatgagctttaaatgcaaaggaagtatgtatctacttagatcctataagttcctcagctatgccatataaattttgtttaggatatggacaaggaagatttagaaaggtgtatcgattgaggagttaacatttgggaagaaagggaagaaaattttaataattggtagaagaaaaggggaggacaagtgagggaggacattgctgtaactaagactgttccttcatctaaaagtagcccaagtaaagaagaatatattgaaattaatccaaaaggctctcactaactatattctcacttctgatgttaattttggccttcatcatccatgacctctatgactcttcatcttcccagtcagctgtcttgtccatgagaccctccatcccatcttccatagctgtctacatatgtattttgttccagtcaggccagatttcctgcagcttatttctgctgtgttacctccttcccatggcctctttgcactcatacttcttcttccttcctctgtaaatccaaattctacacattctccaaaacccagagcaagccctagtgcaagccccagtgcaggctgtatttaacttgcataaaacctcaaggccacactcataagcaatgatctgcctttggcccttcttagtctttacaatctgcactgtgtatttgcccacttgcctcctttttgtcctacattaatttctgtatgtgtctgaattctccaacaagattgcattcacaggggcaggcaaacagtaggaattcaataaacatttgaagtttatcttagttaataagggtaatctgactcctgattcatttgtctttttatgataacatcctaccaagatattctgagattgccttcaaaagaaaactttgcaaggaaaaaaaaataacttggaggctcacttcccagtatattcaattcagtaataagcactaactgtgtttactaaacaattgcaggccaagattacaaaatcagctcagtcaaaaaaaaaaaaaaaaaaaagcaaatcatgacacactttatggcaagtgtccctttctgttattaattaaatgatgatacaagccaattcatgccacgtctcactattattttctaaattctgtgctaacagaaccggcttcagctgaagaaagagaggaatgaagcgccttctgcttctgtttttgttctttataacattttcttctgcatttcccttagtccggatgacggaaaatgaagaaaatatgcaactggctcaggtactgtcttaataaatgatatcgatgactattgataaaaagcttattttattgattctcttgggacctaaaaag

SEQ ID NO: 8174 - DNA, 2300 bp, Homo sapien
ggggagagagcctgagagaactcagtcccagggaccagaagcaggtgaggcacagacaccacggaggtagacagtggtcaggtgtggagaaaggattcagaaggcacaagctggagccctgaaagcaaatgcagtatagccttctccaccactgcaccagggctgggcctgttgggggaatccagacccaaccgttcaattttttaacatagcatttacccaaacaccaaaaactaagtttaccgaagttttagattctcaactaaatcacttgctgttatgttcagaagaaagtacatttataaaccttgtaagcaagccattgcatcaaaataactcaacatagagttagaccaatgttaaggcattttcgtggaggaaaaagcattttttcaccaaagacctaatgtaaagaaagccacattaagccatgaactcaaggaggatgaacatgaccgtgatctttgaacaatttggcaggaagctgtcacatttatattaatacaaagaatgggttgctacatctctgcatgtctacattctacctcttcatgatccggttcaaattccacctccctcatgaaaccttccttgatttcactccctccacaccactgctgtttcctccaaacacccacagcattttatccaaacctctattaatttatctccaatactctagcacccatcacagcatgtggcatgtagtagatgacaggaaatgtttactgaatgaatgtaggaatatacatcattaacattaatctgctgtccagatatgttctaacccaagacacctttctttggatcattttcaaagttcctaagtgacctcaggaaagatcagaactccttatcatagcatctcaaatacactctttacatattaatacatgctatgtatcatacatgtagacacatgcatttatacacaagaatacctgcctttaccaaatatgtatgcatatatgtaaatgagtattcacaaagactgtgtatgataacaaactacatgcatgtggactcagaataagtgggaccaggttacatgatttgaaaagcatgcccaggggcctctgacaaacagtctcctatgtagccatattgtctggaaatctctcagtgtcttactccttgaagatgtacaacatctcattctccctctcccttgtcttctgcctgtgaatataagccaaagtatccagctgttgaaggcctagagctgctgctccactatggcccagccagagactcaagtgggagactaccatgcagagcttatagtagctcccagctcagtctctctaaacataccctctggggttgaatcctggcccctccacaaatgaaacatgtgacttaaacaggtcatctaaatgtctctggatttgatttcatctgtaaaatggagatagtaatagcatctccctcccaaggctatgtgaagatggattggggtaatatgtggaacacagtacaaatgtctgggcaatcataattttttagcaaatgttcattattatcatcatcagtattgttctctttatcttttccatggaaagtctaacttatagactagggattttctaatatgttgataccaaaccacatcctccagaagcagctctaggccccatacaaagcctgctttgtaataacacagtcactcattctctccacatacaatgagggagggtaagtacagagattctctagttgggctccttggtcccaagatatctaccacaaacctcaaaatattcccctgcataagttaattcaacctcaacatcttacatagtcaaaaaatgtatccacataacttcaggattagtcccttgttccttttcctcaaccaattttgtaaaaggaaataactaaaacatccaaaagcaaagagtagaaagttggagttttgaaagactgttgaaagactcccccatttgggggtactaaatcacattataaaattgcaaaactgtcagagtgtaattaacctatgttgcttcatattcctgatgcagcaattgtttaagacatggctttaaagaggactgcaagagagctgtgagtgacacatgatgctgtgaacgtcagggtgctcgccagggaagggccctacccagagggacagaaagaaagccaggaggggtagagtttgaagagaagatcatgttctccctgaagacgcttccatttctgctcttactccatgtgcagatttccaaggcctttcctgtatcttctaaagagaaaaatacaaaaactgttcaggtaaatgaactatcagttaggtgatg

SEQ ID NO: 8175 - DNA, 2300 bp, Homo sapien
aatgccttctgaaggacctgcctgaagcagttttacagttaacttttaaaaaaaaggtacactctaaaataaatgataaaatgtatagtaaatgcataaacagtcatttatcactattatcaagaattatgtactgtacacaattgcatgtgctagactttcgtatggcagcacagtaggtttgcttacaccagcatcatcacaaacacatgggtaatgtattgtactatgacattatgttggctacaatgacaatagctgatgggtgcttatcagctctgtattagtttgttcttgcattgctatcaaaaatacctgagactgggtaacttataaagaaaagagatttaattggttcacggttctgcaggctatatgagaaccatggtggcaccttcttctggggaggcctcaggaaacttacaatcatggcggaaggcaaaagaggagcctgcactttacatggccagagcaggagaagaaagagaggggctaggtgctacacacttttaaacatccagatctcatgataactcactcactcactatgacaagaacatcaccgatgggatggtgctaaatgggcatgagaaatccgcccccgtgatccaatcacctcccaccaggcttcacctccaacactgggaatgacagttcgacatgagatttgggcagggacacagatccaaaccatatcaagctccattataatcatatgggaccaccatcatatatgtggtccattgttgactgaaacattatacagtgcctgactgtacttgctcaatgtccagctgactttatttgagtctagttgtcagtccttctccctctgatattcaagctgatgtcaccacactgtagagcaaactctttggcaacagtaagtcacaagttgacttggctggctcagtgtatatcccagtttctctccaactctggcttggaagtctcagagcctcttggttcctggaagtctcacctgtccaggctaccttaagtagggtggggatggtgggcgatactgaaaagatcattcctacacacttattattttaatctctcatcactttgcaattatgtacttcagacatggtagagttaatttatctttagtgagagaaaaatatagttctttactataagaatttcagggttctttatattaacaggttaatttgacaaaacagttattgcagacttactgtgttactgcgtaaaaagcactttatttggctgagaaaacaagaaagaaaatactatttgtgggcaggggtggatcgttagacatgtgaaagaaagggaggatttgaaatcatttcccattacagatctcaatccatctcctcctttgtaccttaagaggagaaagaaagggggaaaagaatttttaaaagcaaagaagaggaagagggtaggaggaccatttcagtctaacatgcaatttaattttttccatttaacaagttttatggagcagttactttgaacataattatacactgggaaatggagaatgagtgaacaccaaagcttctctctttggattcttttctctacatgctccatgtccttctcacaatacccctactccacggccagtaaatccatctgaaaatcaataatagctattgtaaacaaggactcaagaagtgaaatatttgttttaatatctttgtaaataacaactcccacatttagaccacgactatatttggaatttatttccgttgacctacttaattcttacctgcttatatttaagtttaaaacataatcttcttaaaagaaaattgcactgattttaaaatgtcaaaacatttggcattttaccaagcttgtcagctctctttaagtaaatacagagacgtgaattatctagccaattctttttcgtctttacaaacacagaaatcatttcctggggattaatcattctttcaagtttagaaagttgaaggaaaatactgatgtaggctgtatcaccattacattaaatgtttgtgaacattcagacttaaaaaacacatgcatgaatcatactgttggtgatctcagcattgtctctgtataaaagaaaggccactagggggtagagctagaagcccagtagacaaagaaggtaagggcagtgagaatgatgcatcttgcattccttgtgctgttgtgtctgccagtctgctctgcctatcctctgagtggggcagcaaaagaggaggactccaacaaggatcttgcccaggtaattaacggtggcatctattgcagctactggccagctcaattgtgtctacttggtc

SEQ ID NO: 8176 - DNA, 2300 bp, Homo sapien
tgaaattcttatagtaaagaactatatttttctctcactaaagataaattaactctaccatgtctgaagtacataattgcaaagtgatgagagattaaaataataagtgtgtaggaatgatcttttcagtatcgcccaccatccccaccctacttaaggtagcctggacaggtgagacttccaggaaccaagaggctctgagacttccaagccagagttggagagaaactgggatatacactgagccagccaagtcaacttgtgacttactgttgccaaagagtttgctctacagtgtggtgacatcagcttgaatatcagagggagaaggactgacaactagactcaaataaagtcagctggacattgagcaagtacagtcaggcactgtataatgtttcagtcaacaatggaccacatatatgatggtggtcccatatgattataatggagcttgatatggtttggatctgtgtccctgcccaaatctcatgtcgaactgtcattcccagtgttggaggtgaagcctggtgggaggtgattggatcacgggggcggatttctcatgcccatttagcaccatcccatcggtgatgttcttgtcatagtgagtgagtgagttatcatgagatctggatgtttaaaagtgtgtagcacctagcccctctctttcttctcctgctctggccatgtaaagtgcaggctcctcttttgccttccgccatgattgtaagtttcctgaggcctccccagaagaaggtgccaccatggttctcatatagcctgcagaaccgtgaaccaattaaatctcttttctttataagttacccagtctcaggtatttttgatagcaatgcaagaacaaactaatacagagctgataagcacccatcagctattgtcattgtagccaacataatgtcatagtacaatacattacccatgtgtttgtgatgatgctggtgtaagcaaacctactgtgctgccatacgaaagtctagcacatgcaattgtgtacagtacataattcttgataatagtgataaatgactgtttatgcatttactatacattttatcatttattttagagtgtaccttttttttaaaagttaactgtaaaactgcttcaggcaggtccttcagaaggcattccatggttactgccctatgcaggcattattatcataggaaacgacagctgcatcagcgttactgccctgaaagaccttctagtggaacttgatgtgaaggtagaaaacagtgatattgatgatcctgatcctgtgtaggcctgggctaattcgtgttttgtgtcttcattctcaaaaaatagtttaaaaaataaaaaaaattaaagatagtagaaagcttataggataaggatatcaagaaaaaaatatttttgtacctctgtgaaacgtttgtgtttaacctaagtgttattacaaaagagtcaaaaaaagttttaaattaaaaagtttataaagtaaaaaagttactacagtaagctaaggttaatttatattgatgaaagaaaaatgcttttataaatttagtgtagtctaggcatacaatgttcataaagtctacatagtgtacagattcactcaccactcactcactgactcacttagagcaacttccagtctggcaagcttcattcctggttagtgccctatatagttgtaccattttttatctttaataccatctttttattgtattttttaatgttaaaatatgtgtagatacagtaatatttattattatgttacaattgcctccagtattcagtagaatttcatgctgtataggtttgtagcctaggagtaataggcttgctgggcatggtggctgacacctctactctcagctacttggaaggctgagatgggaggataactttccccaagaaatttttaaaaggctataccacatagtctaggcatgtagtaggctgtaccatagaggtttgtgtaagtttaatccatggtgtttgcacaatggataaattgcctaaggacatgtttcttagaatgtgtccccattgttaagtcacacatgactgtgtgtaattaattcaggccattattttgtcatctgtaaaatggggtggatataaccacactcacaaagttattttgtatgctttatgctggggaacaaatctcttcttatttcactccaacacctttaacagacaaagcttgttggcctgacaaatctgtgacaatgcccctaggccctgatttgacaagctgtgagatgcccattttcgcttgagtcataactttatta

SEQ ID NO: 8177 - DNA, 2300 bp, Homo sapien
ctgcgaaatctaaacacaaggtttaaaagcagttctctgttttggctaaaacttaatgccatcaatttttagaataatgagaaagatttcccatgcagtgtttcgataattttcttttgtcagaaatacctggaaaaatactacaacctgaagaatgatgggaggcaagttgaaaagcggagaaatagtggcccagtggttgaaaaattgaagcaaatgcaggaattctttgggctgaaagtgactgggaaaccagatgctgaaaccctgaaggtgatgaagcagcccagatgtggagtgcctgatgtggctcagtttgtcctcactgaggggaaccctcgctgggagcaaacacatctgacctacaggtaggcagactgagggccagagtgagagagctatttcccatgacagtggtaagaagtcatgtccaatgtgtctctattttgtttcattctaaggattgaaaattacacgccagatttgccaagagcagatgtggaccatgccattgagaaagccttccaactctggagtaatgtcacacctctgacattcaccaaggtctctgagggtcaagcagacatcatgatatcttttgtcaggggaggtaagttcttcttatagcaccttaacctcaccttgcccctagatctcgtagctttgcaactggaattgattgtttaagatgaatgttgattttatgggctcgaagagggaaactgcatcacagttgatggaagtctgttggcctcttaacaaagctaatgcttgcccttctggcttagcttacataagaaccacaaggaatctttgttgaattgtttctttcagatcatcgggacaactctccttttgatggacctggaggaaatcttgctcatgcttttcaaccaggcccaggtattggaggggatgctcattttgatgaagatgaaaggtggaccaacaatttcagaggtaagccaatcaaatttgcctctctcaattctcccaccccttcatgtttcattgtaatattggttgatttagttgaaagaatgcattcatagaagtatatatttttctattaccactcagaaaattagtgatacacttagaaaagtgaaagagcggtcttttctgctagctaacaacatcttagcagtgacaactaggccactctaaaatttttattaagaaaattgttgaaaactttgatgttttaattgtgggcatcaacattgaaactttttcattagaagaaaacagtgaaatttaacagcggtcataaacttatgtggaaattaaagaaaaggaaggctttttgtgttttccaaaatttccagcagtcaacatttatcagttttgtaaataagaaaaatattaaatattaggctgggcgcagtggctcatgcctgtaatcccagcactttgggaggccaaggcaggcagatcacaacgtcaggagtttgacaccagcctgaccaatatggtgaaaccctgtctcttctaaaaatataaaaattagacaggcatggtggcacacgtctgtaatctcagctactcaggaggctgaggcaggagaaccgcctgaacccaggaggcagaggttgcagtgagccaagatcatgccactgccctccagcctgggtgacagagcaagactccgtctcaagaaagaaaaaaagaaaaagaaaaatattaaatgttaatagaacattttgcttctgtgtgaaatagtacgtgtcatttaatcattgataatattgattaatctgtggtgcgctttcagtcagctgagtttgtcttttaattgtatcaatgtaatcatagagtttaggtttcaacatgtctcttcgttattaataaatgcatgccttctgccttcggaaaaaagatatacatgcatatatttcaaaagtcactgataaaatagtaacatgagtccttgtagttgtaaattatttattagttaaatgcctcaaaactgaatacctttcaaataattacaaattgatttattggcctttttagagtacaacttacatcgtgttgcagctcatgaactcggccattctcttggactctcccattctactgatatcggggctttgatgtaccctagctacaccttcagtggtgatgttcagctagctcaggatgacattgatggcatccaagccatatatggtgagtatggggaaaaacattacggacaagggcctggtggtctttatatgtatttcaaataaaacagccattagcgatatccttgaagaagctgtcttcattgtttatgtagttttctaatactaggc

SEQ ID NO: 8178 - DNA, 2300 bp, Homo sapien
gagataaaccaacttttcttaccaggaatgctacagatagcactggtgacaccggtcaccagtacccaagacaatttaatgtggaacataagtacaggaatacacatctttcattacagagccatgtatttattttaatgggcaggagatgctaaataagatcttttgaatggaggaatgcataaatatatgaatgaatgcatacatgaaagaataaataaatgctgcctagcaccaaggagcgaagatagactcatatcaagggaaacaagtatgattaaaaataagaccccagagtcacgctcagtctctttccagccttttcatcatccggtacattcagacaagtttcagggaaggatcctatttgtcccatgataatgatgggcaaggggtggggagttatctcatactccgcctgtggatgaggggtcttctcaggtaaggctcttaaatcctaggcctgagtaaattttttcaaattttattttagacagggtccctctctgttgcctaggctggagtgcagcggcacaatcacagctcaatgcagcctcaacctcccaggcccaagtgatcctcccacctcagcctcttcagtgactaggactacaggtgcatgactccatgcttggctaactttaaaaaatgtttgtttgtttgtttgttttttacagagatggggtctcaccatgttgcccaggctgatcttgaactcctgggctcaagtgattcccctgcctcggcctcctgaaattctgggattataggcttgagccaccatgcctggctctgagtaaagattaagggaagccatggtgctatcgcaatagggtaccaggcagcttaacaaaggcagaagggaacctcagagaaccccgaagagccaccgtaaagtgagtgctgggggagctgaacttcagtcagtacaggtgccgaacagccatcaggtgcgcagtgttagtaattccaccctctgccctgggagcaaggtgtgtggagaaacctgtagcactttatgaccatcagaaccagtctttttcaaaaagaccatggagtactctttgacctgtgtatataacaagaacctttctcaaataggaaagaaatgaattggagaaaaccactgtttacatggcagagtgtgtctccttcgcacacatcttgtttgaagttaatcatgacattgcaacaccaagtgattccaaataatctgctaggagtcaccatttctaatgattgcctagtctattcatagctaatcaagaggatgttataaagcatgagtcagacagcctctggctttctggaagggcaaggactctatatatacagagggagcttcctagctgggatattggagcagcaagaggctgggaagccatcacttaccttgcactgagaaagaagacaaaggccagtatgcacagctttcctccactgctgctgctgctgttctggggtgtggtgtctcacagcttcccagcgactctagaaacacaagagcaagatgtggacttagtccaggtaaatgctgcattgcatgtgacaataatgtaaatttttagtttgtatttttctgcagtaatgtaatagagttttttaaggataggtttcttataaagagattttttttttttttgctagaaacagcaccctccacccaaaatgtatctagccatgcatacgctctctttttccagttggaggtgagagtgaactaaaggaacaacatccaaacttgtctccacaaattgtagacttgtaacagtatgcaaatcttgctctacaaaaattgctctactatgaagttcttacttcacaataactaatagtagggacatttctactctgaaatttcatttctcaccaaaaataaggataaaagcaactgcgaaatctaaacacaaggtttaaaagcagttctctgttttggctaaaacttaatgccatcaatttttagaataatgagaaagatttcccatgcagtgtttcgataattttcttttgtcagaaatacctggaaaaatactacaacctgaagaatgatgggaggcaagttgaaaagcggagaaatagtggcccagtggttgaaaaattgaagcaaatgcaggaattctttgggctgaaagtgactgggaaaccagatgctgaaaccctgaaggtgatgaagcagcccagatgtggagtgcctgatgtggctcagtttgtcctcactgaggggaaccctcgctgggagcaaacacatctgacctacaggtaggcagactgagggccagagtgagagagctatttcccat

SEQ ID NO: 8179 - DNA, 2300 bp, Homo sapien
aaaggatacagaggtttataaaagtttgaaaacttctacattgcaggatgtgcaggctcttgccagatgggacagtgtatgagactcttccagggtgacgtcttaggcaatttcctgtccaatcacagatggtcacatgctgctttcctgagttaacctattaactcacccttgtttcccaggcctcagtggagctaggcttgtcacgtcttcacagtgactagattccctcacagtcgagtatatctgccactccttgacttttaaaacatagtctatgttcaccctctaatatgaagagcccctttcactattttctttgtctgtgctggagtcacttcagtggcaagtgttctttggtctctgccgcaccctccctctgatgcctctgagaagaggatttcctttttgtgagaatgtcttcccattcttcttaccctcttgaactcacatgttatgccacttagatgaggaaattgtagttaaataattagaaaggatatgacttatctcaaatcaatccaagatatactgaagtattgtttatgagtaagatatcagtcttgacgcagaaagaaaacaggaatccataaggggaggaaagtgttgaaaagcaaacctgatacagtgggaaaggtgggagacaccataaggtgctgaagtgataaaacaggtcagtgtttctccactgtatgttttcaataaatgcttccaaggaaggagagtggggcatgagtaggggagctacagagataaaccaacttttcttaccaggaatgctacagatagcactggtgacaccggtcaccagtacccaagacaatttaatgtggaacataagtacaggaatacacatctttcattacagagccatgtatttattttaatgggcaggagatgctaaataagatcttttgaatggaggaatgcataaatatatgaatgaatgcatacatgaaagaataaataaatgctgcctagcaccaaggagcgaagatagactcatatcaagggaaacaagtatgattaaaaataagaccccagagtcacgctcagtctctttccagccttttcatcatccggtacattcagacaagtttcagggaaggatcctatttgtcccatgataatgatgggcaaggggtggggagttatctcatactccgcctgtggatgaggggtcttctcaggtaaggctcttaaatcctaggcctgagtaaattttttcaaattttattttagacagggtccctctctgttgcctaggctggagtgcagcggcacaatcacagctcaatgcagcctcaacctcccaggcccaagtgatcctcccacctcagcctcttcagtgactaggactacaggtgcatgactccatgcttggctaactttaaaaaatgtttgtttgtttgtttgttttttacagagatggggtctcaccatgttgcccaggctgatcttgaactcctgggctcaagtgattcccctgcctcggcctcctgaaattctgggattataggcttgagccaccatgcctggctctgagtaaagattaagggaagccatggtgctatcgcaatagggtaccaggcagcttaacaaaggcagaagggaacctcagagaaccccgaagagccaccgtaaagtgagtgctgggggagctgaacttcagtcagtacaggtgccgaacagccatcaggtgcgcagtgttagtaattccaccctctgccctgggagcaaggtgtgtggagaaacctgtagcactttatgaccatcagaaccagtctttttcaaaaagaccatggagtactctttgacctgtgtatataacaagaacctttctcaaataggaaagaaatgaattggagaaaaccactgtttacatggcagagtgtgtctccttcgcacacatcttgtttgaagttaatcatgacattgcaacaccaagtgattccaaataatctgctaggagtcaccatttctaatgattgcctagtctattcatagctaatcaagaggatgttataaagcatgagtcagacagcctctggctttctggaagggcaaggactctatatatacagagggagcttcctagctgggatattggagcagcaagaggctgggaagccatcacttaccttgcactgagaaagaagacaaaggccagtatgcacagctttcctccactgctgctgctgctgttctggggtgtggtgtctcacagcttcccagcgactctagaaacacaagagcaagatgtggacttagtccaggtaaatgctgcattgcatgtgaca

SEQ ID NO: 8180 - DNA, 2300 bp, Homo sapien
gagagagacagataaaccatttcactacagttcagtgtggaaaatagagtagcagaggcaggtacaaggtaccattgaacaatgattaatgactcttcctgggacttgggaaacatctttcagggaagtcgtcgaagctgttttaaaatatagcaaacttttgtatttagttcaggaacagcatggcccattttgccaatcacatcttaacagttggaaaagcaaacatattatctatcaggctttcctctaaactttaaatatgttttataagttataactccagagaaaatttacaaaggataaaccttaatatagaaggaattagagctgccacagcttctacacttttaacctctcaatattttatctgttgggctccactgtttcttcctggaattcacatcactgccaccactctgttctccttgtcctcatatcaatgtggccaaatattttccctgtatttcaatcaggacaagacatggtttttccccccatcaaaggaatggagaaccatagaatactagttttaaaatgtctttaggccaggtgccgtgacccatgtctgtaatcctagcactttgagaggttgaggcaggagaatcacttgagcccagagctcgaaaccagcctgggcaacatagtgaaacctctgtctctattttttaaataaaatttgaaaaagtctttagacataatctagtctaaaaatgaaggcttaaatgtgatgtatagccccctgccaagtggctatcaactgtgtgggcatcttcagtcatagggatcttattgccacagagaaatccctttaaacttattgggtaaaatctctccaatgtttattaagaaacacacaaaaaataaagcaaagaagaaaatgcaaaagagttataaatgagaggaagcaaaatgggcacttattaaaggtctaataaatgcacatttgtatccatcattctactgagttcttactcccaagatgttcttccctttagcaaacaaataagcaagtcagcaaagaaagaaagaacaaacaaaatgtggtgatcagggaagcattgaggagatggatggtggcaggtggcaagaggactataaaagttttacaaaatgtcttcctctgaatatgtttagagtcttgcattcaagcatttattatacaccaataatgtgagcaacactttacttgacaaagaaacagaaaagaaaggaaaggaagaaaacagaagagcatgaagagaaaatttaggatggattctgttcttcaacttcaaagcatctgctaatttgaatttagggaggaggggaaaaggttgaaagagaataagacatgtgtagaagacaaggacagagagaatttcagtccggtaagcaatgtaattcatttcaattctacaactatttatggagcagctacgtgggcccatcacccattaataaattggttacagaattaaaaccaacccaaagggaatatacttccttctttttcacagaccctctttgttctattctgcccatgaggttttcctcctcaagaaccagcaaatccaacgacagtcaatagcaggcattacaaatcagattcagaaaaataaatcaccccttctaaatttcttctagatattatcttttatgttttgagtataattgtatatagtatagactatagctatgtatgtacactttccacttacatcttttatttgcttttataatgtgtttcttaaaataaaactgcttttagaagttctgcacaattctgatttttaccaagtcaacctacttcttctctcaaaaggacaaacataaattgtctagtgaattccagtcaatttttccagaagaaaaaaaatgctccagttttctcctctaccaagacaggaagcacttcctggagattaatcactgtgttgccttgcaaaattgggaaggttgagagaaattagtaaagtaggttgtatcatcctactttgaatttggaatgtttggaaatggtcctgctgccatttggatgaaagcaaggatgagtcaagctgcgggtgatccaaacaaacactgtcactctttaaaagctgcgctcccgaggttggacctacaaggaggcaggcaagacagcaaggcatagagacaacatagagctaagtaaagccagtggaaatgaagagtcttccaatcctactgttgctgtgcgtggcagtttgctcagcctatccattggatggagctgcaaggggtgaggacaccagcatgaaccttgttcaggtaattaacactaactgacctggccaggtggg

SEQ ID NO: 8181 - DNA, 2300 bp, Homo sapien
agcataatgtttggagccatcttaggcagttgtgttcacatagaaaaattatctagtcctacgtgtacatcataaggtagagacaatgtgatgacatatacatatgtgctgttagtgatttgattattttcctgttcttactctccaacaacaaggtaaatatctggggacagagagaatgactcaagcatctttgaactgactttgactttgcagcctggtttaatggaagcagaaaggctttggaaacagacttggcctcaaacctcagctatgccacctactagttgtgtggctttggataagttaagttcagtttcctcatccataaatgactactgtgaggattaaataagatggtgcatgaaactgctggcagctgttaaagcctctccataaattttagttctgtttcctttataatacatagatcagggtttctcaacatttattactattcctgataaagaggctttgtagacactttaaagatttccccccatacaaatttaatagcagacataaattgtatatctgctcatgtgctgtatgcatatctgtcttttatacacaaaaatatatatttttgcctttgatgaccaatttttcacccagttgggggtgatatcgcccccattgagaaaggacatcttaatggagtagcctgtaatctacaccacaagatcagtaagtgacccatgacaccagtgtcacctggtctgatgtggcatctcaccagaggattgataacaattttctggaaaacatttataaagccaagtgatctggatttagagatactatttagatcacagaaggcaagtctgttaaactttgtgtcattaaaaagtgacattctcacagcagaataaccagctgtatttgtaggttagatagacacagagaaaacaaatcaatggctagagagaggagaacagatcagcaagaatctgcatagttctctgcaagagtgaggcaagataatttttaaattggaaaattatttttttctatatttttctccttttctttaagcctcactcaagcagccagcagactgtttcccaggccactgaggtgggtaagagcaatggctaaatcttaacacactcttacgtgcaccctaccgcaccatccagaccgtccccatacaatcaggaggcagcgaacttatggtgtgatttgaaggggtgttgagtagaatctatcctcacaccgcagcaccactgcttgcaattctacctttggaattttattccctgacttgtaaaagtttttagtgcttaaatattctctattgagtaagagacagattctgtgcaatgggacaattaggtcaagagggaaagaagctgaggtgataggcagatagattccagaggcaaacttttcccatctgctaaagttgaaaagagttaacccacatcctaccaacgctagacaatctaggatgtagggaaagtttgtctctggaatctatccaggtacccagttgggactgagcttcagcttagatgtctgaagatgttaagttatagaatcaggatctgagccggtacaacacgtggaataaacaatgaagtcgatgttacaaatttttttttgctacatgtaaaatctctgtatcacatttctctagggagctggattccgtttagaaagcactcatttactccaggaaaaggattttatttaatctttcaacatttactttaaaaacttttttttatctataatgaatataaggaaagtattataatgaaaatcaagaatatcaggctttaagaaaatatattttaagttctccttctcttttagttgcttgatatttcttttacaagggcttattttgtaggataggtggacgtagaggcttatttatcattttgaaggtacatactctgaattgcttgagtgatggactagatgctaattgatccattgtcgtctgaataaagtcatgcttttgtttgcatgtttttgagatagatcaagggatgatatcaactatgagtcactcataggattcatattcacagaacccggactaagggctatataaagaggaacagttcaggaacttaggctagaaaggaacacagtaaactgaattgatccgtttagaagtttacaatgaagtttcttctaatactgctcctgcaggccactgcttctggagctcttcccctgaacagctctacaagcctggaaaaaaataatgtgctatttggtgaagtaagtatggacactacagtatttatcgagcttgatgtttgtctttaagatttaattgcattaac

SEQ ID NO: 8182 - DNA, 2300 bp, Homo sapien
atactaaagttgtttgataataaactttatttttaaagttgaaaaatagtggcatgtatttattttcatttgttattaaaaatgttttttttaatgggggaggtaatattgtaatgatcctcagaaaaaggccctcattttagccttcatttcatttccatagacactagcatggtatcctatatggttgatgctcaattaatatattcattaaattgatagataaaaaagcttcttttcttctagtttgaagtagtaacatttctacaaatatgtgaaaatctataagaacagttagcctatttgattctttttctccactttcaaatgtttaataaaatgttatttgttttccagcttcttaagcacttcttatctaatgagattttaatatattatgaaaatttatttgtaaaaacaaatgctttctaataaactaacttttataagcttagtcgatgaatcaaacttttttggataatttttcacttaatctcaaaattaaatattatgatacatggaagcaacttaaaataaattattgctttgcattcctgattgagcaccaatctaatcttgaactcactggaaacaatctatttgaaagggtatatttggctgtattttgtttggataaaggcatatagtaaatttccctcaaatgatcacatacatgttgtaggcttttctgatttttctctaaggcactggctactctagattataggattttactcatatgttaggatacccatttcgtactcaccctaaagctgtattcatgctccttctctttgtcttactatgttcctgacctgagcagcattttctttctgactcttagtcactcaaattaacctgcatttccaatcatttatttaaagaagtccaataaatccaaagatcatggcctatattgctctacccatttacttctgcaggggaccaaagatggcactttgatttcacggtactgaatgtgtgatgttctgaaaggaataatagggtagaggcccctaggactattttcctgatggttggaccaagattacttctattattcaaacttaaaaattgagaaacttgaaattggcctactgcagccctagttttcttgggcactccctgaggtgtaggaaccaaacagctcagcttttaagaaaatatctgagaatggaaagggtggaggtcataattagacagggacggtggtcaagaacattgagttttgagttattggcctaggttcaaatcctggtatcatttataaactatatgaccgtatacaagtatttaacttctcagtgtatcagattattcatatgtaaaatggaaaacaagctttctgacagcacctatgtggctgttgtaaggattaaatgagataatgccttttaaacctagaatgcagtaatccctgtttgtgctagccattacagttgttccgttccaatgtaattcttctacctctgtctgaatctgtagggaatttatgcaggactccatatttgtcgagaggtcatgccagtgtgtttaaattccaaccatggggctcaatcctgcggttgtgccgtagcacctccaagtcatcaagcttggttttggtccaatatcgtgaacttcaggtagacacaagacatctctctgtagttattctagagaaaatgcagtttataatttaccaggcagtagtaaacattctagaatcagtactaagtttctctttatggaagtaaacatgccatcttgatacacttattattcgaagaagcaaaagtagatacgttcttacagaaggcaaaaaaaaaaaaattttgctaagtgaagtaaaaaatgtactactctctgcttcttcccacagtatccataaatatgctgaggccgtttattttgccagatgggttttgagaccctgctgaaacaagagatgctctcatttatatttccctcaaattctaccacaaaccacactcgggagggaaaagaaaaagtcgccacgtaagcatgtttaccttcaagtgactgggaagtggaaacctatccataagtgatgactcaccattgcaggcctataaaagtaaaggtaatctctgcggaaagacaacagtccccaggcatcaccattcaagatgcatccaggggtcctggctgccttcctcttcttgagctggactcattgtcgggccctgccccttcccagtggtggtgatgaagatgatttgtctgaggaagacctccagtttgcagaggtagagtatcttgccaatcctgatgatgcggttggtacatctcagaaatgt

SEQ ID NO: 8183 - DNA, 2300 bp, Homo sapien
agcaataatctacttcccactctcgcccaataaataatggtgaagaagggacacaattatcacaataaaaaaattcctatttaaaaaagaacagaagatgagatgtgcagtggtctttggtctatagcaatgctggtagcctgcaagacaggcattatgaaattccctactctttgatcaggccctgattctactctgtggaaggacacccctttaacatcatcctctgagatctttctttctatcctttaggttttattccatttctttggtcctccttgggaaaaggggctgtttagcttttgcagctcaccagttgaagaaataagtttggctatctctaatagttttgtcattatcatttattttgtgttttgttttgcacattttatataaattttatttaggaagaatatgcataaaaatatcaatttttaagtgtacaattcaatgaattttgacaagtatatatactattacttcaatcaagacatagaatatgttcattacccaaaaagttcccttgtgtttctttgcagtcagtcttccccggcttactccatccctgtccccaagtgtcactgatatgccattgctataagtaagttttacatgttctagaatttcatcaaatatccagccagcattaacatctccaattgccacagagatgttatcatattgtttaaactgtttgtgtgagtcaaattcaaataagaactgcatactgaaaatgattgacatatcctttaagtcttttaatttccttctctctcctctcgtcctaataatttgttgcagaatttgggtcattgtcctgtagacttttctgacgtctagatattgctgattgcattgggtatttaacatgttcctctgtcctgtactttttgtagatggtagttctatttagagactttatctgattctgttttgattttggcctcaggcatttttaaatgggttgaaggatcatatactttgacattcttttggttttaagtaacagagaattgaactaaatatgcaaaatagtgaaatttgttgcttcacataagtgaaaattccagggcatatcatggattttgggctcatatcatataatcacatcctggtttttctatttttctgcttgatactagtctcttctgagttttggcttcattctccataccttctctggttcaaatccataggaaataaaattgctttctggtggttcaattttgtgtcattggcactcattggcctggcctgagtatgtgtccatcctgaaccaattaataacactaaggaaatatgatattcggattgaccagattagggtgccattgtgagggtagtttcacaggaaccacttcaactattactcaaagacttttagtcttctcccatcacagttggtttgcagagattattttaccaacagaattactaacgactttctactatgtctttacatacaataaccattatttaaaaacagtatttccacctaagtggagatgaatagattacagtgtgttttgggtctagggggaggttccttagaactgtcccccaaatttctctctactgagtcgcagtcacctactgtctcttatcggagaggtgagctctgtggaaataatggcagagctaagtttcaatacaggacaaagtgatatgcaaaggtagggagaagggggagtgggtggctgatcacaggcccataaaaaaaacacgcaagacacagggtgacaatgcatttacggggtgggaacacttcaggtgaggttatcgtgtggaagagctcagaagtggaacttggtctactttaccaggttgtttttaacgtcaactgcaaagtattagtagtttcactttttggcggtgactgccagcatcagagcgcggtagaagcttcatgagaaaggtcaggataccctggacaggatacaagaattccgcggactgccgcagtcgacgggtcagacagcttcgctctgcctggcctacctacgagtggcagaggctaaccggaaccacgccccttcccgggaccggctccgcgattgcgtcacttccgggcctcagcgattcgcctccgggttaggctgagcctcttgcttgctgtgactggtggagctgccgcgctgtccgcgttatctcctcccggtgagaacgaaccgcagtgtccaccggcgaggagccagccctgtcccggtcagagaaagacgacgaggatacctgggagcgggcggcggccgggctgggccgcgccggtgcgggctggcgactctgctcctccgcttgctgct

SEQ ID NO: 8184 - DNA, 2300 bp, Homo sapien
catccctgttgctttattgttatctgcaaccagctggcaaaagttaaggtattctcacttctttaaaactttgccttgaagacgcacacattacttcttctcacattttattggtgagaattagtcacatgaccacacctggatggtagccacttcttagctatggaagggaaaaatagattttggtggatatctggctaacactgtgatatggtatatagagattggctcagaattggattttggtaggaatcttggttctaccacttaccatctctgtgtttttgtgtaagttatttaatctgtgaggttctttcttctttattgtatgcttgatacaatacataaagtccgtatctgtcttttcttcccactctgtgcctcatttttcgtatatagtagtgaaaaggaaacacaaaacttctatttcatggggtttacatgtcaacgggagcttccatgtttgagatcggtgttaaacttgattcaaacacaatttcatagtttgtggaagccctaagtttcctgaagagttctaaaaattcttgggaggatcacatactcatgatctcatctgctttctagactcatcttcctacatgtgttgcctttttatttaccatattgttatggaagctcaattcagccatttcatacatttccaccaaaacaactcaccaaaccgagcacttgtgggtaatggagactttcctgaagaccttggtaagagtgataatgctcattgcagagcaggaaactctgtaaccatagtggtcactttggctttcaaaatctttttattagctacacagtcatcttgggttcctgttaggattttttccctcacccagtggtcagcatcccacctcactgtttggatgttttcccatccagtggccagactcccatctctcactgtttggatatttcatgagaatttacattcatttccttttataatttagagcagttcagcttttttaagttcccactccaaaatcttaagttgctcagcaaataaaaggactctctccttccaattctcaaatagtatagttttaaggggaggttatgattattaagtgcaaacaaaaaaaatctgcatatgtttgtgtaccctaggatcttgggtcaaaccagtgctgaggtgatgaatgactacagcaaaaacttcctgagggcaggaactgtgtccccagggcctagttcggtacttggcaaattgtgttagattggtgcaaaagtaattacagttcttgccaaaaaaccgcaattacgtttgcaccaacctaatagcatgtagtaaatatttttagaagagaattactgaattgagaaagtgtttgacgaatgttcggatgaatgaccagcaatttagtagtttatagtaatgccatgaagtagaaaatgacaaagaccgttttcatatctgtattttcacagaatttggttgcggttgttataaaataaactaaaaagtatcattttacattttagctattttacaaatatggttgtgctcgggtaatgattgcaataaaaaattgctggttaaattattctaaaattaataatagaaaaaacgatgttgggaaatgcagcagcacagaaaggagcagagggcgactgagaaagtaaattaacattgtattgaattcctagtctttataagcttctctaaaaagcgatttttaaatagtaatcttttacaatccgcactacacccctggttgtgagatagtatttccccttcttaacagatgtgtaccttgacgctgacagactggtttgctaccaggtgcacgtggagagcgagcactggaacccagctctcctaaatctagatcacgctgctgtacttgaaggctagatgtctctcttctgattatgcgtgataagaaatcagtaagaagaataaaagacatgtttgagagccaacataaacttgtccgaaccccttacaatcgatgaccgcagggagccgctgaagagctccgaggcggtcgatagcctccgcgagctttgcgtgcgcgtgccccgagagggcaacgcccaccgcgcgccgccagcgacgccgccgtagtgctccgtcgccatagcgactacccctggcaaccgcgaagctctgcggtcccgcggtcgggctacgggtttgagcaaagctcctctcttcccttcacttccctccggactggtttcttcttccttcccccttcccccaacttccctccaccccttccaatcatggcgaacgggactgcggacgttcggaagctcttcatcttcactactacccagaa

SEQ ID NO: 8185 - DNA, 2300 bp, Homo sapien
aggcctgcccaattcagttatatttgaatttcctttgttgtctgttttattatatatgcatactgatatttaaaaatgtttaaatggattttattgctttattgaatagtaaaagtacagatattaattataggatactgttgttttacagagctttaaaagccttagaggcaattccagcagtttagcacccattgacctacacccaaactgtttaacaaactgttagctatatacaacttagggcacttcagttaaaaaccctgaatgcatgagcttaatttcacttctttagttgtctgtttcttaagtaccttttttcatgactttccttctctattaagtcggataatttagttaacttatgctcttagataatcactaattttagctcctttagaaacctctttagcattttcttgtgaatggaccatttataataagaactttactttgataaactgtagtattatctttatggatttcatttagtctcatattactactttatcttttttaacctctgatgttagagtgccttagttgaatttgtgtatagtaaaaaataaccatcagaaagtttatatccaggaatttttttctgccaaatcagaatatataggaatttaacaaactgtttaaatgcaaaaatcttaatttaaaaaataaagttatgaaacaaaaattaaaataaatgaaatcttaagagatttgataaaataggttgttattcaatttgtttttttttttttaacctttagattttgcccttatttcaagaagctgaagacaaaaacagacttttacgaactgtggctggtggaggtttagaaacaattagtaatttgaaagccaagtgggataaatttgagttaatgatggaaagtcaccaacttatgattaaagaccaggttagaatcttttaattatttattaaaatgggaacttttttcttacttaagatttcttgcttatcttttattcctttatagcccaggtttataataatttaatgtggctgttgaaattgacctccctgactacttttatagtgaaatatataaatgatgattgtttcacatggtttttctttacttcctatcacaccaagaagaaaccaatgtctttgaaatgtaacattatttgtaggcctgtgaatgaatctgttgcttacctactatgtatggcttattgctgaaactcatgttttctttaattactaaatttattaggatatcagtttaactactctaatggagaccccaaaaattgtagcttatgtttctgtctcacattagactataagctgctatggtgcctctgcttcataactttgtctgggtcctaggttttgtcaatctttttgtctaccatctctagcgtattgtccaggatgggttattcagttgctgtgtagtagggttgggagagagaaaaggagaaaaaggcagcatctgtcttttaaagacacaacctggaagttgcacatatctactgcactcatattttatcaaccagaagttagccttagggcccagtccttagctgcatgggagactgggcaatgccttccttaatttagcagctatatactcaggtagaacaatcagcagtcatcaaacaaacattttaaaattatcttacctttgttgttagttgtactaggtgcggttaaccacatgaacgatttttaaatgattttatttgaatgttatctcttgttattataaatttatggtctaatttatatgtttgaattattttattgaacttggaattaataattaaaataacaaccatcctttgaaaagttgacattggtcattgatattttttcacttttaaatagaaaatattagaaagaaaagtatgaacccaaaatgaaattttactctgcattaaattatttaaattttattggcttatagattgaagtgatgaaaggaaatgtgaaatcacgtcttcagatctattatcaagaactggaaaaatttaaagctcgttgggaccaactaaagcctggtgatgatgttattgaaactggccaacataatactcttgataaaagtgcaaagttaataaaagagaaaaaaattgagtttgatgatcttgaagtcacaagaaaaaagctggtgtatgttttttctttaaaattgatagtgcttattttgaaaaaacaatttatatatcaagctagtaattttcttatgtctgttatcttgataactttcctcataaacttcatcactttttaaactacaaataataagcattcatatactgttgtcttaggagtcata

SEQ ID NO: 8186 - DNA, 2300 bp, Homo sapien
cctaacttatacctaagttttaaatttgttaaaacaattgtaagtgctcaaactgtgttttgaaggatgaatatagtaagcgaaggatattccagacaagggaaaaacaatgtgcaaagaaacagaggcttgagaaaactagagtatatagtgcagagagagatagaagattcaaacaatcagtgaagccagattgtggagggccatcattaggagtttggtgttttgttttgttttaagaagtggaaagctatatgggatattgcagtggtgtggcacaatcaggttttgtttttatatgtgttatgctagtggtagtaaggatgtacttgaggaggcagaaacttatagcagggatacaaggtaagagcctactgcaatagtccaagtgagaaatgatgagatgtgaggataatagttcagttttgtacatgtgctttgaatgtttgcaatctttcttcatgtcttttggaaatctacatggagttgatcatttatgagggtaggaatcatgtttgtcttactcaatacttatctcaggcagaaagtaccttgtttaaacacaggtgctcaataggtaagtattgagccaatgaatgcatgaattatatgtctgttaagcaattggaagtacaggactagcccagaacataggagttttgcctaaagataagtagtaggtgagtttttggtatataaattattgataatttaactgacaaaaaaagattaaatgattcggggagaattttagaattaaaagactagaaggctgaaattggaccccagggagtatcagtatataagggataaagcagaaaactgaaaaggactggtagttgtggcgtgataagtagggttacatagatgcaagcacaaaagaagagatgcacaaaggtcatgttgggataatgattgcaaagaagatttagatttggagattatgactgtattattgttcccaaataagttttagtatagtagcctgtacagatagaaaataatgtaaaaaatgtgatggtgaaagtagggagaacatgacatagcttggatctagggaaggtaaggttgtttttttaggggagtttggaactgagcatgtgacaaggatgcttggtggaacagtctcccagaagagttgggaaggaaaaagttcaatagaatgatgaatagactttccttgtatggtaacaggaacattgctataggtagatttaagggaagtttgggggatttttgttttctaattgaaatttggtcagttttttttttaaacattagggctctttttggtattaatacatctatgtcctttctcaaggagagttttgagattgttttatttgctaattttatgtgaactatttttaatttacaaattttatgtagattctgaaatagaaggaggaaaatgggacaaactgagaatagacagtggggagtagtgggagaaaggtagaaggaatccagttcatttcaggagaaagaagtgagggggcagaatatagactagtggtgccatcagtcacttttcaggtagagtttgatattgcaattgaaggtctttgtatttcttttctatttatttatttttttgagatagatctcactctcttgcccaggctggagtgcggtggtgcaatcatggctcacggcagccttaaactcctgggctcaagtgatcctcttgccttagcttcccaagtagctaggaccacaggtgcgtgccaccacacctggctaatttttaaattttttatagagatggagtcttgctatgttgcctaagctggccttgacctcctgagctgaagtaatcctcctgccttggcctccaaaagtgcgggtattataggcgtgggccaccttgcctggctcagtcattgtatttcacctgattttattgaccttacaatgtacactttaaagtattttgcctttgcccttctggagatgatcttatttggattattaacttaaaaatgttttagtaggcaatgtatttgttgaactctcattacgagtaatgcatataaaacaaaaatatcatttatttccacagatagtttctacgttacatggggagctcggcataattcaggagcaagggcagccccaggacaaccattacctccacatggaaaaccacttggaaaactaaactctactgatctcaaggatgttattaaaaaggtataatatgaatcattaattggaactgggatttggtcattatagtcttttaaaaatatttattgtaaatatttagagggcatgaatatgatagattgtagaatagg

SEQ ID NO: 8187 - DNA, 2300 bp, Homo sapien
tttaaaaatactgcaactcaataatagcaaaacaaaaatccagtttaacatgaacaaaagatttgagcaggccatttatgaaagaagacatataaagggacagtaaacacatgaaaatatgcttaatttcatgatcatcaagtaagtgtgagctaaagtcccagtgatatgctgctacatatccactagaatgggtaaaataaaaagactgaaaacacctcagtctagtatggcaaggccgtgtggagcatctggaactcttataattgctggaggaaatgaataatgctacagttacttttcaaaagtttgacacagtctcataaagttaaacatatcttagtacatcagccagcagtcccactttcagatttttagctgagagaaatgaaaacgtgataaatcttagaagcattacacttaagcgaaaacagccagacacgaaagactgtatactgtatgattcctttgtaagaaattatagaaacagccaaactatgatagaaatcaaattagtgagtacctgacctggtaagtaatacatcagaaaatgtaaatataatttttatactggaaaactttaacatatttttttctcaaggtattttggaacaaaattaatataaatatttacttaatgaagacagccatttttattgttaaaaaatctgtcaattattttgaccttaaaagagttgtttgaaatatcaaaaagtaaacactatgtaaaggataacactgttgattaccatgtgtttataaaggaaaatatttggtgttttgattaccatgtgtttataaaggaaaatattcggcattatgtgtgctttgtgtactctctggctagtgacattagtaatacacattgagtatctgctacttttttctctgcgctgttctgagaagcgatatttctaagactgtagctaattttattatccagcaaagacccaggagaataactgtgcatctcataagttaataattttgcttaattataaatagcagatatttctgtttggtattttgtagaaagcactgtctgaagagatagcttaaataccaagttgtgtaacttctaaggcttgcaattctaggttaatggcataaagaaagtgcaaattaaatgctatacaaactcagaatagagataccttccaattggaacaggaggttaataaaagaaggaatccatgagctgtgcctgggctgtttaagtgtttaatatgttttattatgattgtttaagaaattatgcatttcaggatctgggcatggcaatacatgcctttaatgtcggctatttgggaagctgaagttggggggaccccttgagtctgggagcctaattaacatagtgagaccctgtctcaaaaagaaaaaaaggaaaaaaaaactcagaatgacaaatatatacaaagatgttcaacctcatcaataatcaaggaaatacaaattaaaatcataccttgaaaattgtgtatttctgctgggcgcagtggctcacgccagtaatcccagcattttgggaggctgaggtgggtgggtcacaaggtcaggagtttgagaccagcctggccaacatggcgaaaccccgtctctactaaaactataaaaattagctgggcatggtggtgggcacctgtaatcccagctacttgtgaggctgaggtaggagaatcacttgaacccaggaggtggaggttgaagtgagctgagactgtgctcttacactccagcctgggcgacaagagcaagactccatctcaaaaaaaattaaaaaggagaaaattacgtttttctatcttgtttaaattttatataaaaagcatttattgctttgctaagtagaaaaaaattaaagcactgaaacctttctgatagaaaatatggagtaaaatatatcattggtttcccaggcattttggaaactctcttgtcatagattcaaaactagtattaggaaacatttaatagaaaatgttattttgaaatgttatattttggatttcatgcttttaaatatcaagcattaaaattgattggaatgccacttaaatattcttataggatgctagtgagcaaaaaacagaacttgaaagactgaagcacagaatagcagaagaagttgttaaaattgaagaaagaaaaaataaaattgatgatgaattaaaagaagtacaagtaagttaaaaaacattctaagatccatttacatttttgcttaccagttatatgtaggaatttaaacattatttgtaactcaagttgttttctcatagtattataaaatgtggttt

SEQ ID NO: 8188 - DNA, 2300 bp, Homo sapien
agatcaaaaacctaggtgcagcaccatggtaacacttcacaggctatttactaaccacatcattgtgcttcgagtagtacatttacgtgatggagcagtaagtgaaatctctagaaatagatgctgggtgatgctcatacagtgtaacgtggcaggaggtatgatgggagtagtctactgtgggtgcaagtgaaaacaaggtaccttgtctgtggaccattttaaaataataataataaagctgttttaaagtcgttcttctctttaatatcaccgtgtgctagcaattgtaaacagcattggtgatataaaactattcgtccacagggcagataattcccactatctccctccctcttggtgtgccactgagataacctgtatgttcttattagatatacagtgttccccccttttctcctgggcatgtgttccaagaccctcagtggatgcctgaaagttcaggtagtactgaaccccatatttatatatggggttatacatttttatataacacatacatactattttatatacacatacatactatgatatacatacatgcatatatatacatacaatgttttttctaaacatacatactataataaagttcaatgtataagttacacacagtaagagattaacaacaacaataataaaatagaacaactataacagtatactgtaataaaagttaagtgaatgtagtttttctttctgcctgtcagaatatcttattatactgtactcacctatttttggactgtggttgaccatgggtaactgaaaccatgaaaataaattgttgataagggggactgctgtaccccattctaagttttcatcttactctgactttcatatgtgttctcttattcttatagcacacaattgcattacatttttcaaataaatgtgaaaacttaagaaaaattagatcagtttaaattttagtaggtagcaatgattgttaaatgacttttaaatttatcatacatatgatatacattttatacatttataattggctttcttctgtctactaagtgccattgtgtgtggagggcattttcactggtttctaactccctttttttttgagatggagtctctgtcgccaggctagagtgcagtggcgtgatcttggctcactgcagcctctgcctccagggttcaagcgattcttctgcctcagcctcccaagtagctgggactacaagcgcccgccaccacgcctggctaatttttgtatttttggtagagacggggtttcaccatgttggctgggatggtcttgatctcttgacttcatgatctatccacctcagcctcccaaagccaccacaccgggcctgacttccttttttttagaatttaattagtgcaggatgttctataatgaatttagtttttagttcatttcattagatcttaacctacagcccatgtaattttctcttccaggatactcctttagtaatattggatatatactgctttagaagaattaatgtcttaaaatgtgaacaattatattgataattagcagtgttttaatgatttgctcatacttctttttatggcctttatagtttttattcaaacaaagaatatagatagatagatagatagatagatagatagatagatagatagatagataaatagagaataatttgactgtgtattataaaagccaaaaagaatgctgcaaatgacatcagcttgagactaaagctcttgcttagcataatgttagtacagatattctgtgttattttgtgttaagtaggactgtactctctatactctggctaaatgtaattacctaatattaactcctggtcactgaagatttgttaatatggcttgtgatgcagctaaaaactgtatttttgtttctttttcatggttgtatatttgtgttctccaaagcttgagagaaaagatcatttagtaattgatttataatttctagaaaactatttccatttaaatgaaagcttataatcattaaaaaacattacttttccttttttttatactagagtcgagtgtgcccatttcttatagatccttcttcccaagctacagagtggttaaaaacacatttgaaagactcacgtttagaagttatcaatcagcaggtatgtattatttataatttacataccaattaggaatgacctcttatagtgaaaagatcttggagtctataatcagaaaacatagattcaacactgggtcctactgtatgggaccttgggcgagagatataactcttagcttcagttttc

SEQ ID NO: 8189 - DNA, 2300 bp, Homo sapien
ttcttctttatctctataaatgtttcaagctttagagtctgatattagagtggttacacaaactttttggactagtatttacatggtatatactttgccattctttaactttcaacttttttgttgggttttttaaaaaatattttattgtgcatatttaagatttacagcattatattatgagatacatatatatcataaaatgcttttctgtcgtaaagcaaattaacatatctatcaatttacacagctagccccctttttgtgtgtcaagagcagctaaactctactcctttagcacaacatcccaaatgcaatagttttgttacctacagtcctcatgttgtacattggatttctagacttaatcatcctacatatctgctattttgtattctttgactacatctcccatcccctccttcattcccctgctacctgcccctggtaaatactgttttattctctgtctctatatatttgagatcaagcagtaattttctttctgtgtctggcctactttactttgtataatgttttccaggtttatacatgttatggcaaatggcaggatctacttttttatgaccgaacattattccattgtgtgcatgtgggtgtttgtgtatacacatcatgttttcttttcttttcctttcatttttttagaacagggtctgactctgttgcccaccaggcttgagtacagtggtgtgatccatagttcactgtaacctcgaactcctgggctcaaatgatcctctggcctcagcctcctgagtatgttggactataggcacataccatcatgcccagctaattaaaaacatttttttttttttttgcaaagacgaggtctcagtatgtttcccagatggatcttgaacttctggtctcaagtggtacgtccgtctcaacctcccaaaatgatgcgattacaggcataagcagccgtgcctgacccacattttctttatccgatctgttgatggacattcaggttgtttccatgtcttggctgttgtgaataatgctgtgaagaaatgggagtgcagatatctttatgaggtggtgacttatttcctttgggcatatacccagaaaaaagattgctgggtcatatggtagttctgtttttaatttctttaggaaccttcctaccatttttcataatggctgccctggtcttcattcccaccaacaattcccttttctccgtatcttcatcaacatttgttatctcttgtctttttgataatacccatcctaacaggtgtgagttgatatctaatagtggttttgatttgcatttcctcatgataagtgatgttgagcatcgtttcatatagctgttggccatatttgtatcttctttggagaaatgtctattcaggtcctttgcctgctttttaatcaggttatttatctttctgctattgaattgtatgagttttttctttatacattttggatattaaccccttatctgatatatggtttataaataactccaagtttttaggttattctttcattttgttgataatgtgtatttttcagttactcatgtgataatctgtttttttaaccatcattctgttttcaaatactgtatcttaaatactagtgcaataaacacttttaaaatgatgaatttagaagtaaagaaaaaatataattgaggatttctatttttgtcatctataatcagccatttcagagcaatctggaatatgaaacatattaatgttaaaaccatactgaatgagaatagatattccttgggtgcttcagtatcccaggatcttcttagtgaatattatttatcattgcttgcataagtgctgataaatagaacattctgctaatagtatctcaggtaacccaacttttgccgtcttagactctgtcgaaaagcctatatttagaagtacttaaaaattatattttcaaatattgtatagtgaaatacagaagattcagaccaaccaattgtgtgttttttttaaataggaccacgttatgtggtacaaataggtgacaaaattattgactacaatgaagaattccgcctctttttgtcaacaagaaacccaaatccttttattccaccggatgcagcttccattgttactgaggttaactttactacaacaagaagtggattacgagggcaggtatacatagataataataatttaccttggaatcttttcgagctttatatacctattagacattgtgagtgagaagctattttgttagactaattagtatttacatttatgattttgaaaata

SEQ ID NO: 8190 - DNA, 2300 bp, Homo sapien
acccctgatatttcctcttagtaattttccatccactgacctcactttgctccttggctataaatttccacttgcctatgctatattcaaaattgagccctgctctgtactgaagtctcttttcgcctattgcttcctctattgtaatagtcctgaaaaaaaatctgtttttaatgctttaactactgacaagctctggttttttgttcataccagtggaatgacaggtgtattaagagactctgccatgaacaaacttacattgtagagagcatatcaaataattaccttgtcataatggttgacagtatacaaggtagccaaatacatgatgataatataatgtgtagcacacctacattagcaatgatggggccttgtatactaaatgtcaataaagttaacagaccaccatcaagcattactttaataggcttagatcatttattaaaaagtaattaaattgaaatgtaatttattttctgctatttaatttaagttacataatgaaatttgggcaatataatggattatttttatatgaatataaatgtttggataatgcattttttatatacttgatttatgttcatattatatgaagttctatactgaagatatagatcttctaaatttctcatttgttttcaatgaaaattcttcacctttacagatttacatttctgatcttacaccgcactcttgaaaaatttgggaaaagagaacactgtttgaggtagagggattaatgtgtttgggaaagcctctgaaagatgatattgtttaaagtgaatattgaacgtggaatagaaatttgtgaggtagcaaagagggttagaacatttagagacaaatagaggcatttacaaatagagacataaacaaatagggtttagaaaaacattctttgtttttggatttgatactgttttagaaaaacagagcttgacagagtttaaaactgaagataagttttattgccataggggaaaagagatgtcagtatagtactgggctcaattctgaatatagcatggacaagtgggaatttgtacccaagaagcagggtaaggattagtgctgggggtcagtgaatagaaaactattaagtggaaatgtcagtggcaagtggggattctggctaaactgatttagctggtgaaggcagatcaagatgatcagacaccaacagataacaagggtgggagaggaggaatttttctttttttcttttcttttttttttttttttgagacagagtctcgctctgttatccaggctggagtgcagtggcgtgatctcggctcactgcaacttctgcctcccgagttcaagtgattctcctgcctcagcctcccgagtagctgtgatcacaggcgcccaccaccagcctgactaattttttttgtatttttagtagagatagggtttcaccatgttggccaggctggtgtcaaactcctgacctcaggtgatctgcccgcctcagcctcccaaagtgctgggattataggtgtgagccactgtgcccggctgagaggaggaatttgattagatattcaaggtagggattcttgctaaagttacttagcaaaattcttattaaaataggatacaaggcaggacacaaagcccctgattgaggcctagtcaaagagagctcagaggagcctgaccgaagttttgacaaagagagtctttgttaatatgaaatttgacatacttaacttgacaatccttaaaatttgcacttgatcttaatgacagcacttgtttccttcacaaggtggagatagctaggtacaaatgtttttacatagagaaaagattaactcatgagtactgatttagtactactttggaagtgtattttaattctggctttaatattaggtgagtttaccatagagttgccaacctagaaataattagacaaggcaacacaaagtagaagagtaataaacatcaaccaataattggttctcacttttagtttttttaaaaataaatgtatgtgcttatatttgcttatagctcactgtatatggccatttttattttttagattgctctccccagtctttatcagaccctctgctttgaagatgcagctctgtggcgtacttattataataattcaatgtgtgagcaagagtttccatctatccttgcaaagaaagtttccttatttcagcaggtaaaatttagtgttatctaaatgcaaaaaagtgtttaatgtttctcttattattcagaagccatttaaaggaaagctttgcttttagagtgttactttacct

SEQ ID NO: 8191 - DNA, 2300 bp, Homo sapien
ccaaatctcttgaatggtctgatttttctgtaaattatcttttacctcaacatgtttgtaacttcagttttaatgtatggctatcagaaattactcagactcctgttagaaactcagtttctttctaccagtttttagctaatatcaacagctacaatgaaaagcccttgtacatgcttctgcgtccatatcctgaattgtttcttaagttattctaattttaattactgatcaaggccatgtacatttttaagacttttgatacactttattaaatcagacaatatatttaattggcctagatgtttattgagttaatgaataaataactgaatgcttgaatcaatggaaatatttcttactgcattgcaagtatgtaagaattctttattgctaaatttaaattgctaacaattgaatagttgttagcaatttaaacttagttaaaaagaaaatttataaaatatgcctctaaaagcaattcatcaattttaagtggctcttggagtaaatttcacctgttattaggaatatttctgcctttggaaattcttagcattatgggtagttgttgtgaagaacagacaagggtgctgctttaggcgtgaaatgtaccttttctggttggctatctagaattgtctcttttgacccatcatgataacacagagtttatattttaaagtgtttattattcttaattctttaaggatgtccatatctgaggtgcagtcttgtctattcacttctatttttgagaatatatggaagcctttcttgcccatgtactcattcagttacattctcctaatttttcgtttatttttaaactcctgtgtaacactcattttagctcaattcaaacaagtatattttaaattattaattgacatgagccttttcagtttggcctttatgaaatatattaataatggaaactttcaagttttagcagaagagatttaaatataatagcaaaattataatctcttatctgaataggactttatagtttgtgaagggctacagagcagaaaaatcacagatgaattgtttaaatatagttaatggtggcagctgggtgccctttggcaagataatcaatttctttgagtattagttttcttacctataaaattaatatagtgatatttgtttctcaggagcattgtatggtttatatatcatttaaataaactacccagtataatgcttagtattcagtaggtgatgaataaatagaatttgttacaattattatacttattttgcttccagagtacctgtggattgctttatccttgttttgcaattgaggaaactgaggcacagtgcattttaatgatttgcatagagtcatttggctaacaaatataaactgacagctatgtacttctgtcttaaatgaagcattcttttcactctccatacaactttttttccccataacacatgggcataagaaataactttttggcctatatcatgccagtgaaatcatttactcagatcatgagaaatctgattccccatatgcgtgacacagagtaggcactcaactatcatatcagttaatgaattgtattgtactaatgagatatatagattgatggttgggttcagtcttctcttgcattgtggtctcaatttacagtacagctacaggcctgtattgtggtctcaatttacaacacagatgttaaatgtggtaatcagggtacctacctcatagcattgtaataagaagatgatatcatacgtggaaaacatttagaaaaatgcccggcaccttaagcataaaacagatgttggctattactagtatattattttagagtagaaaaactttaatgtattatgagattacaactcacctgggtattctctattatatatcatataattagatttaataaactttttaataatgcatactgcttttatttttaatttttaaaatatatattttaggactgaaagaggtgtccccactgcctctaaatctcaaacgtttatacaaagagacactggaaattgaacccatcttgataattatttctccgggtgctgatccttctcaggaacttcaagaactagctaatgctgaaagaagcggagagtgttatcaccaggtaagtacatattgtcccgctgtttttgtttttgctattgctgttcccacacttgatgatattggtcaaatggacattttttgttgtgataagccaaataatgcccccaaaaatgtctatgtcctaatcctcagaactgtggatatgttattttccatggcaaaagga

SEQ ID NO: 8192 - DNA, 2300 bp, Homo sapien
tctccataatggaataatggtgtaacagtgcaggccttctaacaacccttcaaagaagggggtgaaactaggcagaggatatcgactatcttggttcataagtaggtacacctgggagtaccaagccagggaaacatgagctctgcacagtgcaaaacactttttttttttttttgagatggagtctcgctctgtcacccaggctggagtgcactggcgcaatctcggcttactgcaagctccacctccaaggttcatgccattctcctgcctcagcctcccgagtagctgggactacaggcgcccaccacaacgcctggctaattttttgtatttttagtagagacagggtttcaccatgttagccaggatggtctcgatctcctgacctcttgatccgcccaccctggcctcccaaactgctgggattacaggcatgagccaccgcgccaggcagcaaaacactttattaaacatagagaaaaataactggcatgcaaggatttctacccaatcatcatttgccttgaaggacttttcaccatgacagccttgtatgtgtgtgtgtgtaagtgggggtgggggagagtagggagaaggtggctgtgcccaaatgtcagagagaggcatattggcctctagggtggcatccttaatgaattttcctacagaactgatgtcaaatgggtcacctcaaaggttcatctcactcattcattcattccccttcaaggcaatggcccatctaccctatatcccattttagagaccctctgtgttatccacacattccacttttttacactccccacctccaaggggtatgcacactctgtccattttactcaagaaacatgtttattctctactgctttggctttgggcctcctgactttccacactctagcaacagctccctctttgaaccactggaaaagcctcctgactggccctcctgccacattatgtcctccatgtgttgcaagaagcctcttccttaagtcaatttaaaaaaaaaaatcacaaacacctgcttcaaatcttttccctttcctttccttccttacttctttttctttttttttttttttttttttggaggaggaattcttgctaattgataatatttaatatttaaactccgtagattcacatatgacttcatcaattggctcaactaatttttttccagcttcatatcctggtattcaaagtcatgtacaatttttttattgcacaaaatgtctcatctttctctagaaataacagcccttgccataaattcctgcttttgtaacatgaaactgctttcctttggagtgagaccactttgcacctggaagatgctcatccttcaacatccagcttgtctcctccttaggaaaatatcctctgttctgttggtgatactaaaggcagtaccctgaacatgtctttgtaaaagattttgcctttagtattgtgattacccattcacctgtctatccctttccagaaatgtgagctcctcaagggcaggctccaaatctgactttcctactatgcacatagaatggtacttgccatgtaagaaacaaatccttactgtttggggaaaaaacaaaagtacaaagaatacaactctaaaatgaacaaaacaaatgataatatgctgtttagaaagtgttgaaaaactaggcatggtggctcacacctgtaattccagcactttgggaggccgaagtgtgggggattgcttgagcccaggagttggaggccagcccggacaacacagtgagaccccaaatctattaaaaaaaaatacaacaattagccgggcatggtagactgtgcctgtagttccagcttttcaggaggctgagagaggaggactgcttgagcctacgaggtcgaggctacagtgagctgtgattatgccactgtactccagcctgggtgacaggataagatcctgtctcaaaaaaaaatgtgttgaaatcatttctttcatatcatgtgttaaataggctttgaagggctggccttgaaacctgacagctttgagccatcgtgtatccatgggagtaggcattctaggttccaaacagcacacttagaaatggactttggaacacaacgtgctacctcaaggctccacctggccacacagcaggcactgaggctgggagacagcccccagacagatgagtgtccgcgcctctctgagaggtgaatgagcccggacggtccctacctaccaagtcctgaggagcagcggcaccaacgacgcaggcccgccccagcccgccagtgagccgccc

SEQ ID NO: 8193 - DNA, 2300 bp, Homo sapien
aaacactacattgaatatttaaaattcattattttatataagatattaagacacaattttagcattttgatacttgtaataagtcagtatcttgatacatgtcataattacataattataagtcatttgcaaattttctccgtttttctatagtctcatatcagaagctaagtatgaaattgaatgagcatttccaaccacttctaaaaaacgatatcacatatttcaattagtccctactcctatcccatctatctctaccccttttcacttattaacacagttacatacttacttgtttatgttccctttcctctattataatgtaaactcaaagagattaggaactttatttcttgttcacaatttaatccccaagatttttagaccagggcataacacaaggggaaaaactaatgcttaattaatacctgttgaatgaataaatgatccttagtgtctctcccagggtttcactatatcctgaaacaatgtaattagatctttttttccaggggctttcaaacttttttgatcatgccccaaagaaataactattatattgtagtgttcgtgtatctgaaacaaaatattcataaaacaatattattatctccaatgaaccctgataattaaatttctaaactattgtattccaatccatttatttaaacaattattctggtattgaagttgatttcatggcccacaaacctaaattttgtaaaataccattttaagccaaaaagccaatagagatgaaacatgttgatctttgactatgttgaagggacacatgaaccctcgtccttgttggatggtataataacttgacaaggctaccttttccagaacttcctgcccttctcagccacttaaagttccctatgtatggatatcacttaccatatgccagactttcaggagctggaaggcctgaaaaagactgaaaattttctcttctagatctcatcagcggaaaattgagaaatcatataaatttggatttggattcagctacaaacaaaacaatatgctaaacattttttcacatcattctcaccacaaccatacaaattaacaattgctactcttgcaaataaataaactgagtttcgaaagatcagatgatttgctcaaggggacaaagccagtgagcagcgagtctggactcattccttttccaaatacagtcccctcccatgggcagacagacacacgatgtaaaccagaggcagcccctttcaactgctgagcttccagacgcagagtagggagaatcccaaaagcctcaacgacccatgcctcttcctatggactgtgaaggcaagtgagcacagtgttctgcaacttcttccccttgctcagtctgttcctgctcaaccccactctgtcctgttgccctttcctgtggaagggctggagctagtgcatataaaaacgctcgtgaagacttcttgcccttattgtacactgcaccacatggcccatcacgtctacagccctgtgtgataggtggttcatcttgctgcaccctagaaaaggcattttggtgtccaatactctctggtaccaggatgccctgactcatcctggagttcgcgaaaagtgaaagctacgccatccctccatcagtctcgaccttttctcgggcatttttgatagatggagggactcaagagtagctttctctgggtgatatacttttatttttattttattccctgaaaaggtacccttgactcacccaaaggtcacactgatgggagctcaaagaaaagctcggaattaagctcctttgtgattgtattttttcactataaacagtgaaattttaactaagtagagtctcattttggttattgtaaaataaacactcccaactccagtccctgtccccacatcccaccaccatcaaggcggagagctgtggcttgtgggtggatgtgccagtcacctctgaagaagtgctgggattctaccctctcccacttcctcctggcgagtttgtttcctgagcccttacaggtccaaccaggagggtaaagcccagggcggtgggaagagtcccggccggcgattaaactgggcatgctcagtggcagagcaggtttaggcccggcctgggaaactggggagctgaggtgctcgcgccgccgctctgagcccgagtgcgcgcctctcaggggccgcggccggggctggagaacgctgctgctccgctcgcctgccccgctagattcggcgctgcccgccccctgcagcctgtgctgcagctgccggccaccggagggggcgaa

SEQ ID NO: 8194 - DNA, 2300 bp, Homo sapien
tagaatctcagttttacaagataaagaagaattctggaggtagattggggtgactgttatgacattatgaatgtatttattatcaccaaacaccacatgtaaaaatgttaagatggtcaatttgggggtatgtttttgttttgggttttttttttttttttggagacagagtctccctctgtcacccaggctggagtacagtggcccaatctcactgcaagctctgcctcccaggttcaagccattctcctgcctcagcctcccgataagctgggactacaggcacctgccactacacccagctaatctttttgtatttttagtagagacgggttttcaccgtgttagccaggatggtctccatctcctgacctcgtgatctgcccaccttggtctcccaaagtgctgggattacaggcgtgagccactgtgcctggccgggggtatgtatttttaccacaataggaaattgggaaaaaatggtattaattggaggtgagaagagatggagtaaattgcacccaggaaactctgatcaacttacacagaggagaattaagctactatgcaaaattgatgaaagaagaagtgagagttaggtatattattatttcaaaatgaatcaaggaaataattggaaatcacactattatcaaatataagatagaataggagagagaattcgcagtgtgaatgagctacatctcatttttcatatgagacagttaatagcattgtttgtaatttttgtatcatgaaatagataaaacaggcatcactgggtgttccaaagattgttagcaaaaaataaagcaaataacagagaaattacacctagtttgtgggaccaaagatgaaaagcataaaaatctgatttttattgtagtgttttctgtactactgacaaaacttttaaaaattgtaatctatccacattttaaatagtatacagccatcaaaaatcagatagtgtttcatgtgttgattttttaaaatgtttgtcacacattgtgaagttaaataaagcaaattatcaataatataattttaagatactgccactatagaaaaaacaaaaaacaatctgtaggtaattatgtgtctgttagttatctattgttgagtatcaaaacaccccaaaatacagtggcttcacacaagaagcatttattattattacaaggtggccagtcagctgaatgtttctttttgtcactgctaggattgtgtctgagatcatctgtgtgtagggtaggcatctctgctgacaaggctgggataccccataggttgggaaaacacttggctggaggctggcctaggttggccttggctgggatgactgggctcttctccacatgaggtctctattcagctagcaatctagcccaggcttatcctcatttagcttcaggtgttcaagaggaagaagggcacaaggatttgtaaaactcagactggaaactccttcagatccctctgctccatcatgctggccaaaaccaacctataaggccagttcagaataaagtaaaggccaaaaaatgctaggaggccattgattagagccatggataagatcagtattgcattaagtgttttgtaaaattatttaaaatattacacacagatacaagctaaacgtatcgttgtgattaccttgccatgtgaaattaaataatctacatttttccattttataaacttttctgttgtttgattttaatggcacacatatatctgtttcaaaaataagtgaaagagcctcttgttcatttaatgaacaaaaatacattgatcttgtggaaaaacaacatcccaatttaaaaatgagtggatcaggaaagagaagaaaagagatcacttatgtgagtttctcaaatagtgaagggagtatcaccatttggcagtcttcagttagcctctttcccttaacttccaaaatcacacttccggggttgagtaagtatcagtgaagtaaagactcctgaccatttagaggctgatggcatcagacagacaaacagagatttaacttaatttattaacagtgttaaaaatagacaggaaaacagaacacagagacgggttctcatgcaagtgtacatgatttcattctgttcactttgttatgtcaaaaagaagaaaacaccttctgcttcctattttccaaaggaaagcagttatacacgagatcagagtctaattttatcttggcaaagaaaaagagaatttgaggactgggaattttccattcagggtaatatcaacaagctggtccactgagaggagagcaagcc

SEQ ID NO: 8195 - DNA, 2300 bp, Homo sapien
atatatcaagcctgcacgttgtgcacatgtaccctagaacttaaagtataataataataataataataataataataacaacaacaataaataaccattttcctctttaaaaaaaagaaaatgcttattgaagaatttcagatttcaggtttttggatttgggatgatcacctggtaattataatgtggatattccaaaattcagaaagttctgaaatccaaaacactttttgttctcagcattttggaatagcagtactctacctgtaatataataaacagtgaatactgaaggaatattttccttctgatcagtgcagtgtacattgctcttctctcaaagttctgttcttagtgccctctttctgtgggtcagttgattatttttgaggtgaccataagattatgaatgctcacttttaggtgtttctctctaatttcagcaggggaatatttacacacagcgtggacactttccttttcagagtgtgtatattaccactggtggtgtgactttataacttgcatatcttttagtggggccattttttaaatgtttatttttttctcataggaagtcaggaattccctcattgtgcacctgtttttagagtcatgtctgttaaaaaaacaaacatttacttaagcattccattaagtctgatataaaaacaaaagggtgtcctgtttttgttgttgtttttcaccccattgaaaaaacaggagctgaatgtagaaaaggttatggatttagtctttagacttgactcataagacctgaactggctaatagcaccattttttttctttaataaaccattttctgggctttctcctttaggaacacagatataaattacagcaggtacccgacttcaaagaatttagaacttagcaggagagatggggagaagaaaggcagttatgacagtgacagaatggtgtgcaaaggggatcttttttcccaaatcccagagcttactattgaaaaatccatgaacaagatctgcatatttgtacctttagctaagagaattgagaaatacaaagtaaattttgattaacgctttcatccctaatagctcagtctccttgagaaggtatgacagtcaacaaacataaaagtattagcagacagaacatacaactatgaagaaacactacagtgcactgaatgcaaaattatgcacctgcatcacctgcattgtgcaaggaaaaagagtttagggtcaaatcagtcactcagtgctgtgaagattttgaaggactggaagaacaaccagttgggttgtaatcatgagcctcttctaatcctaaactcaaaaaaggtaagatgaatttctgacctcttgaaaactttcaaagttcaacacctcactgtcttttactttctccttttactaactattcttctgggcatctctcttttgtacaatcacacattaattgtactacagcctgagactgcttctacaatcagcctttgttcagggaatatcaaaaagcagaggtaaactttcacttttggtaaaaattaaatattatggccatattaggtagctaaaggaaagcatgccatggagtagagaagagggtttcttcagcactatttccaccaaaggttaagacaacaatgagacagaaaagcgaaggcaccttcaggatccaataacacagtttaaacaggaaatataaactatctggttaattcttatgaggaaataaaaggaggcttgttagattaaactccttcagaatttgtgtttttatgtgattagagaaacaaaaactgagcgatcaaaaagaggagacagatggatagaagaaggtgtggggactacagagcaggaaaaggaaaaggagggaaaaaaacaggctgaagtgtcaacgcacataacaatgttggtcgtttccattctttgtttcttcccacgggaagaaactagagtccagtacttggatgccaatttgctgatgacaaggaatttcttgacaatgagcctagaatttctaagcagcagtctctcaatctgtgattacatatttccattctttgcaataagtacatacacagtttactttcatttttcagtctgagccttttttcagtgctgtaagaaaggacggaggctgttatctatggcaggtgagtcctcttctgaataggagtttgggactgggatcttagaaaatactttatttattgctgtgtaatgaacacaaaacatgaaatgggccaatagagtgcatgctgaatcttttttcttactggttgtgtgtagtttgaatcacgggagcta

SEQ ID NO: 8196 - DNA, 2300 bp, Homo sapien
agaagcagggttttaccatgttgtccagcctggtctagaactactgacctcaggtgatctgcccgccttaacctcacaaagtgctgggattacagtcgtgagccactgcgcagggcctaatttacgttttaccaacagtgtacaagagtttctttttttctacatcctctccaccatttgttatcttttgtctttttggtaatagccattccaacaggtgcaaagtgatatttcattgtgacttcaatttccctggtggctagagaggttgatcatttttcatatacatattctctgtatgtcttcttttgaaaagtgtttattctggtcctttgcttatttctaaatcagtttattttctttctattgaattgtttgtgttctttgtattttgcatattaattctttatcagatgtatggtttgcaaatcttctctaccatactgttgattatctctttaatcttttgattgtttctttgactgtgtaaaagctttttagtttgatgtaatttcatttgcatattttagcttttgtttcctgtccttttctgtcatatccaaaaatcactgtctagaccaatgttatgaagctgttcccctctgttttcttctagtagtttcacagttttggttcttacatttacatatttaactcattttgagtttatttttgtatatgtttagagatttttattcttctgcatgtggttttacaattttcccaatatcatttattgaagaatttgttctttcccagttgtgtgttcatgaaacctttgttgaaaagtcaaattaatgtaaataattgggtttatttctgggttttctgtcctgttcatttgctctctgtttctatttttatgcaactattgtgctattttgatgactgtagtactttgtagtctattttgaactcagatagtgcgatgcctgcagctttgttccctttactcaaaattgctttgcctattcagggtttgtttttttgtgtgtgattccatataaattttaggatttgtttctatttttgtaaaagctgccattagaattttgataggaattgcattgtatctttagatttctttgggtattagggacattttaataatagtaattttccagtccatcaactcaaaatacatttctacttatttttgtcttcttcagttttccctatcaatattttatagttttgagatttgttattattgctgttatttttgagacaggatctcattctgtagccaagactggagtatagtgtcacaattatagctcactataatctcaaattcctgggcttaagcaatcctcctacctcagacttccaagaagcaaggactatagacacatgctactatggccagccaactttttaaatttcttgtagagacatagtctcaccatgttgatcgggttgaagttttatacttttacgtgtacttgttttttacctactcggttaaattgatttctaagtatttttgcagcaattttaaatggaaatttatttattttttaaagatggtttattgttatacagaaacactacagatttttgtatgttgattttttttatcctgcaattttcttgaatctgtttatttgttctaaaagatttttggtggatcctttagggttttccgtatataagaccatttcatctttaaacaggcacaattaaacttcttcctttccaattttgatgccttttatttctttttgttggcgaattgctctggtcagaactacgttgaatggaagtggtaaatgtgaatatctttgtcttcttcctgatcttagagaaagggttttcaacttttcaccattgagtatgatgttagctgtgtgtttgtcatatgtgactttttttgttaaaaactcttcaattttattgcttattatatttcttcacatatcatttattcagtcaacactatattagtttactgagcacacaaataaataaaacagaagcccagaactcaggtagtttggatatcccacacactaatctgtgtactgtttgcaaatcacactgtgttgcaacatctgtacctgatgttgcaagactaacatttttgctacctcttctcagaagcctttgtgatctcacctgttggaatgcactaatgttttctgagccccttaaatatcttgtctacattcttttaagaagctcttcaccaactgtcaggtaatgtagtttgatgaattaagaatgggggctctggattctgaacccctagatttcaattcttgttcccagttactatatactcggtgttcttttacatt

SEQ ID NO: 8197 - DNA, 2300 bp, Homo sapien
cttaacattttttcctttcatttcaaccttggagaatctgacgattatgtgtcttgggattgatcttcttgtggagtatcttactgggactgtctgaatttcctgaatttgaatgttgacctgtcttgctaggttggggatgttctcctggatgatatcctgaagtgtgttttttgacttggctccattctccacatctctttcaggtacttcaatcagtcataggtttggtctttttacatagtcccatagttctggaaggtattgttcattgctttttatttttttctgtaatcttttctacctgccttattttagcaagatagtcttcaagctctgatactctttcttctgcctggttgatttggctattgatacttgtgtttgaatcatgaagctctcacgctgtgtttctcagctccatcatgtcatttgtattcctctctaaactggttattctaattaacagttcctgtaatcttttatcacggttcttagcttctttgccttgggttagaatataatcctttagctcagcaaagtttgtcattacacactttctgatacctacttctgtcagttcatccatctcagcttcagccctgttttgtgcccttgctggagaagtgttgaaatcatttgaggagaaaaggcattccagcttttggaattttcagcggttttgcgttggtttttcgtcatctttgtggatttatctacctttaatctttaaagctgttgacctttggatgggatttttgtagggtcttttttgttgatgctgtgttattgttgttttatttttttttgtttttcttccaacattcaggcccttcctctgcaggtctgctgcagtgtgctgaggatctactccagacactgttcacctatgtatcaccaatggaggctgcagaacagcaaagagtgctgcctcctccttcctccggaagcttcttcccagaggatcactgacctgacgcctgttggaactctcctgtatgaggtgtctggcaacccctgttgaatggtctaacccagtcaggaggcccaggatcaggaactcacttaaggaaagagtctggctatcccttagcagagatggtgcactgggctgggggaatcccccttgtctggatcgctgatactcttcagagccagcaggcaggaaagattaagttggctgaacctgagaccgcagctgcccctctccgcaggtgctctgtaccagggaaatgagagctctgtctgtaaactctaggtggagttgctgaaattcctgcaagcatttcttgccgggagaggagggatggatcccggtcccacctaaagaagcagtctggccatgatctgccacagcggctgtgctgcactgtgaagactgctgcccagtccaatctgcccagcctccctagcactggtagggaaaaaccgctgactagagctgcagtaatggcagtcgcccctcccctggggaactcggtcatctctggcgtactccaggctgctatgctggctagtggggattctaatccagcggatctaagcttgcaggcttctgtgagaatggacctgctgcaaggccattttgctccctggcttcagccccctttccatgggagtggacgggactcctgcctcactagagttccgggagctgctggactatgtaaaaactcctgcagctcagtgcctgcccaaaaagctggaaatatgaactattgggttaattcttatcaggaaatgaaaaagagttgttagattaaacttcttcagtcattgtcgttctttgtaatcagagaaagaaaaactgagagatcaggaagagaagagacagatggatagaagaagtttgggtggccacaggaaacaagaaaagaaacaagctgaggtgtcaacccacaggataatattttgtcattttcatttttttcccccaagtcagaaactaaattccagtaattggatgccaatttgctgatgacaaggcacttcctgataatgagtctggaattctgagcagcagtttcacaatctgtaattacacgtttccgccctttgcaataaggaaatacatagtttactttcatttttgactctgaggctctttccaacgctgtaaaaaaggacagaggctgttccctatggcaggtgagtccttttctgactaggagtttgggagtaggaacttagaaaacacttgatttattgctctgaaataaacacaagaaaggaagtgagccgatagcacacatgttgaattccttttcttactgattgtgtgtagtttgaatcatgggacc

SEQ ID NO: 8198 - DNA, 2300 bp, Homo sapien
cctgcattagtctgctgcggataacatcttccagcttcattcttgtccttgcaaaggacatgatctcattcatttttatggctgcattgtattccatggtgtatatgtgtcacattttctctatccagcctaccattgatgggcattttgattgatttcatgtctttgctattgtgaatagtgctgcaatgaacatatgcatgtatgtaatgtatctttataatagaatgatttatattcttctgggtgtatacccagtaatggtatttcttggtcaaatggtatttctgttctaaatgactcaccacacactcttccacaatcattgacctaatttacattctcaccaacagtgtctcttgaatacagcacactgatgagtcctgtctttttgtccagcttgccattgtgtgtcttttaattggggaatttggcccatttattttaaggttaatattggtatgtgtgaatttgattctgtcatcatgatgttgcctggttaattttgcagacttgttaatgtagttgcttcatagtgtcatgggcctgtgtattttagtgtgtttttatagtggctgctaacagattttcctttccatgactactgtttcctacaggatgtctttcaaggcaagcctggtggtgacaaaatccctcagcatttgcttgtctgaaaaggattttatttctccttcacttatgaagcttagtttggccagacattaaattctgggttggaaattattttctttattaatgttgaatattggtctccagtcttttctggcttgtaggatttctgctgagaattccactgctagtctgatgggcttccctctgtaggtgacctggcctctctctctggctgcccttaacattttttcctttcatttcaaccttggagaatctgacgattatgtgtcttgggattgatcttcttgtggagtatcttactgggactgtctgaatttcctgaatttgaatgttgacctgtcttgctaggttggggatgttctcctggatgatatcctgaagtgtgttttttgacttggctccattctccacatctctttcaggtacttcaatcagtcataggtttggtctttttacatagtcccatagttctggaaggtattgttcattgctttttatttttttctgtaatcttttctacctgccttattttagcaagatagtcttcaagctctgatactctttcttctgcctggttgatttggctattgatacttgtgtttgaatcatgaagctctcacgctgtgtttctcagctccatcatgtcatttgtattcctctctaaactggttattctaattaacagttcctgtaatcttttatcacggttcttagcttctttgccttgggttagaatataatcctttagctcagcaaagtttgtcattacacactttctgatacctacttctgtcagttcatccatctcagcttcagccctgttttgtgcccttgctggagaagtgttgaaatcatttgaggagaaaaggcattccagcttttggaattttcagcggttttgcgttggtttttcgtcatctttgtggatttatctacctttaatctttaaagctgttgacctttggatgggatttttgtagggtcttttttgttgatgctgtgttattgttgttttatttttttttgtttttcttccaacattcaggcccttcctctgcaggtctgctgcagtgtgctgaggatctactccagacactgttcacctatgtatcaccaatggaggctgcagaacagcaaagagtgctgcctcctccttcctccggaagcttcttcccagaggatcactgacctgacgcctgttggaactctcctgtatgaggtgtctggcaacccctgttgaatggtctaacccagtcaggaggcccaggatcaggaactcacttaaggaaagagtctggctatcccttagcagagatggtgcactgggctgggggaatcccccttgtctggatcgctgatactcttcagagccagcaggcaggaaagattaagttggctgaacctgagaccgcagctgcccctctccgcaggtgctctgtaccagggaaatgagagctctgtctgtaaactctaggtggagttgctgaaattcctgcaagcatttcttgccgggagaggagggatggatcccggtcccacctaaagaagcagtctggccatgatctgccacagcggctgtgctgcactgtgaagactgctgcccagtccaatctgcccagcctccctagcactggtagggaaaaacc

SEQ ID NO: 8199 - DNA, 2300 bp, Homo sapien
tctcctcctggaattttctcatcttttctgagttccttaagcatcttatctgtgttctcttaagaagctcttcaacaactatcatgtaatgtagtttcatgacttaagagttggggctctggattctgatcacttgtacttctattcctgctccggagttactgtatacttcattttcttttcacaggattacactcaatttcttaagtaacttatctgtatatgtttccttttccatataaaagaggttaatatacattttgcatggagtttttgtgaaatttcagtaaagcacttgacctcatgggggttcaacatatattattattactgaaagcctgtcatggttaactctatggaatgtggtgtaaaaataggatttgaaccctaattcatgtgatttagggcagcctattatttaaatgacttataaaattgataaaataataaatattctactggtttattgtgagagtccagtatactactatttgtaaagtacttagaagagagacttgtaaataataatgattattactgatatgatataataataataatgataattactgatttattatatcagtataatgataattactgatttattatatcagtataataatgataattactgatttattatatgagtataataataatgataattactgattaaatcattataataatgataattactgatattgttaataataatgataattactcatgatataatgatgattgtcattgctttatgtgaattcattttttaatcacaaaaaatacataggagatgttacatttattaaatgtaactttttgtcctgttttgtaacttccatgtgtctttctaataatggttggttcattattggcatatgaactcaagataacctggaaaatgagtctggtgcttctaggccaaaattttgttcaatgtcctgacatgttttctttagaaaatgtattttgtgtgaaagctatccttatatttagataaactagataatgatctttatagagttaacagaagagaggagatatctggcttttccacatacaacctgcttaaatcatatctcttgtattgaaataagtgatttattactttgatatatatatgtgtgtgtgtgtgtgtatgtgtgtatatatatatgtgtatatatatgtatatatgtgtatatatatgtgtgtatatatatgtatatatatgtgtatatatatgtgtatatatatatgtgtatatatatatgtgtgtgtatatatatatatacgtgtgtatatatatatatatacgtgtgtgtgtgtatatatatatatatatatatatatatatatatatatatgtgtgtatatatatatctcctggtaaaaatctgaattataccaaggagtaatacattaactcagtattatattaatctaccataatatttgttaaatattttcaattctaaattttggtttgagaaaaggcgctgaagaattaggtatctagatgcatttatccacttaatgattaagttggatgtttacttatgtattcagcaagcagattaagcacttttaagcattttgagcagaaaattgttaattagcacaattgggtatagcttgtgtgttaaaaaacacaaattcaaagatatagttaattcaccaaggaagctaaatacagagaaaaggaaagatcctgcagtctagtaggaataatttacagtctagacaagagaatggactgtcctgggtgcacacacttcaggtaggtcatcatgagtttgagcaagagagagaaatctgaatacaatggatgaccaggaatttagcattaggcccaatgctgcagaaaggaaaaagacaagctataaaaaacaaacttaagtggcaatgaattgttaaacacagcctggtaggaatttgatgggtgagagaatgctacaggtacaaagaaataatgagtatttgttgaagacatggtaagacagaatgtattttcaagggtgtttcacattacagagctttgtctaaagcaagggcaaaactctttaagctgtgcccagagttgaaggagtctttatatttctgatagaagacagtggcaaaaaaaaaaggcgtaagaattttgaagctatgttcaaaggtatccttcagagtggattggataacttcgtgataaaccacatgctaaagaacaacgtggctggacaaacatctatccagaccctagtacctaatacggatcaaaagtcgaccagtgtaaaaagtaagactggatattttacaatggatatttccaa

SEQ ID NO: 8200 - DNA, 2300 bp, Homo sapien
ccttttataaaaccatcggatctcatgagacattcattatcaagagaacagcatggaaaaaaaacagcacccatgattcaattacatcccaccagatacctcccataacacatgaggattattacaattcaaggtgagatttgagtagggaaacagagacagaccatatcaccagccttcatgtttgtctttccctcttgaatgtgagaccaaaggggaaaggaccatgatatgttttgactgaacctctggcacctagagcaatgtcgtccgtatatgtttgctaaatgaatgactagatgcactgcttgaggattctaacaaaagataaacttagctaaataatctgcaaataatcatccttgattatttttctaaccttaaacatttgtattaattataataatatcactcattatttgcttaccatttgccaggctatgttccatgcattttccacattttctctcacttaatgctcaaaactgtgtaggtacatactattaataaaattatttcacatacagaggaaccaatgcatagggaagttcattatcttgccaaggaagggaagtttaaaatgctaagttcgacattctcattccagagcctatgctctgggcctctacaatgcaatttccctcaaaaataaaccctccaggatgggtgggtggctcatgcctgtaatcctagcaatttgggagaccaaggtgggcacattgcttgagcctgggagctgaagacaagcctaggaaacacaaggagaccctgtctttacaagagatacaaatattagctggccatggtggcatgtgccagtaattgcagctactcgggaggctgagttggaagaatcatctgagcctgggaagtggaggctgcagtgagccaaggtcaaataactgcattccggcctgcacgacagaatgataccctgtatcagaaaaaaaaaaaaacagaaagaaaaaagcaatgtgaaaagaaggacattaaataagaaaagctttaattctggtgaaaaatgtttctatttcttaaagcaaaaatgtttcacagggacatacattacccacaactttcccaagagctatgaggtggggtcaggggaacagtggttcacatactccaaaggttgtgttacttttctccgtcaagctttctaatgattgagaaactcttcactgtgtgaatttaattgtacacatactttttcaatcctgtcttactctccaagccccattcccctcctaccctgatctatccaagggctggtgaagaaaatttcccatggatacactacctgatgcaggctacagttctgattctttaatgggaagaaaaataaagacatgcatatgcatgcacagtgagtatttcccaatacatgtacaggccctgccaaaaaggaaggcgaagcatactttcagtttcagtcacacaagaagggaggagagaaaagccatggccggtgagtcttttactgttccaagaacaggtccctgggaagaaagagttttggaaggggctggctcttctggaagccataattagcatctgtggaagtttacttgagtagaagcaaggaaaaggggggagagggaggagagaaggaactagaagattcttgcagactttagaaaggaaaggcaagcccagaaaggaactgaggctttaggggaagcctgatgtcattttgcaatcttaattaaactcttacttacatgttgaaagtctgacagagggtacagaattggcacaggaggagtactagcagcagtggttcctaaatgaaatgggctatttctgcttcattactttattaaccagagttaaataaacatgcgacataagaggatgatctctgctttccagggactgatgtggaaatggtaaactcagtcttcaggtcactccatgcacatgtatggagactattgagggaaacaagtaggacagcaatacagtaagaagagggattacccaactgtgaggagggggacatttcactgatgaaatctaaatgaggtcactttctgttgattacatgagaggaatatgaggctgttttcatgatgtgagaaatccttgtgctctaaacagacaaggtcctgaaggagaagagaaagctgtttatccgttccatgggtgaaggtacaataaatggcttactggatgaattattacagacaagggtgctgaacaaggaagagatggagaaagtaaaacgtgaaaatgctacagttatggataagacccgagctttgattgactccgttattccgaaaggggcacaggcatgc

SEQ ID NO: 8201 - DNA, 2300 bp, Homo sapien
gcacatcatctggctgcgaatgtttcaaacttttatgctctgcttcccttttaaacataagttccaattccaaaccatatctttgcaaatacataaaaatgaatgcttttaacagcacccaaatcacttctggaatgctttgctgcttagaaatttcttctgccagatgccctaaatcatctctctcaagttcaaagttccacagatctctagggcaggggcaagatgccaccactctcttcactaaaacgcagcaacagtcacttttattccacttcccaacaagttcctatcttcattcgagatgagcagcatttagtcaaagccattcaacaagtctctagaaagttccagattctattttcctatctttctctaagccctaagaactgttccaacctctgcattttacccagttccaacatcgcttccacatttttggagatctttacagcagcactccattactcagtataaatttactgcattagtcatttctcacactgctaataaagacatactcaaggctgggtaattatatagaacaaaaaagatatttaatagactcacagttccacatggctggggaggcctcagaatcatagcaaaaggcaaaagaggagcaaggacacgtcttacatgggtgcaggcaagagggtatgagcagaggaattcccttttataaaaccatcggatctcatgagacattcattatcaagagaacagcatggaaaaaaaacagcacccatgattcaattacatcccaccagatacctcccataacacatgaggattattacaattcaaggtgagatttgagtagggaaacagagacagaccatatcaccagccttcatgtttgtctttccctcttgaatgtgagaccaaaggggaaaggaccatgatatgttttgactgaacctctggcacctagagcaatgtcgtccgtatatgtttgctaaatgaatgactagatgcactgcttgaggattctaacaaaagataaacttagctaaataatctgcaaataatcatccttgattatttttctaaccttaaacatttgtattaattataataatatcactcattatttgcttaccatttgccaggctatgttccatgcattttccacattttctctcacttaatgctcaaaactgtgtaggtacatactattaataaaattatttcacatacagaggaaccaatgcatagggaagttcattatcttgccaaggaagggaagtttaaaatgctaagttcgacattctcattccagagcctatgctctgggcctctacaatgcaatttccctcaaaaataaaccctccaggatgggtgggtggctcatgcctgtaatcctagcaatttgggagaccaaggtgggcacattgcttgagcctgggagctgaagacaagcctaggaaacacaaggagaccctgtctttacaagagatacaaatattagctggccatggtggcatgtgccagtaattgcagctactcgggaggctgagttggaagaatcatctgagcctgggaagtggaggctgcagtgagccaaggtcaaataactgcattccggcctgcacgacagaatgataccctgtatcagaaaaaaaaaaaaacagaaagaaaaaagcaatgtgaaaagaaggacattaaataagaaaagctttaattctggtgaaaaatgtttctatttcttaaagcaaaaatgtttcacagggacatacattacccacaactttcccaagagctatgaggtggggtcaggggaacagtggttcacatactccaaaggttgtgttacttttctccgtcaagctttctaatgattgagaaactcttcactgtgtgaatttaattgtacacatactttttcaatcctgtcttactctccaagccccattcccctcctaccctgatctatccaagggctggtgaagaaaatttcccatggatacactacctgatgcaggctacagttctgattctttaatgggaagaaaaataaagacatgcatatgcatgcacagtgagtatttcccaatacatgtacaggccctgccaaaaaggaaggcgaagcatactttcagtttcagtcacacaagaagggaggagagaaaagccatggccggtgagtcttttactgttccaagaacaggtccctgggaagaaagagttttggaaggggctggctcttctggaagccataattagcatctgtggaagtttacttgagtagaagcaaggaaaaggggggagagggaggagagaaggaactagaagattct

SEQ ID NO: 8202 - DNA, 2300 bp, Homo sapien
atggctcagtgtttacattcccaggacatgactcaaagctcatgattctacatccccagacacatggtctaatcattgtttctgtgtcctggatgccactttggcatgcataaactccgtggttcttggctctggctggtggggagaaaccctcatgtgaaacccttaagcagcagaaaaaataaatgagtcagtacataaatttaaaagtaaataaactaaagagaagtggtgcacagacaatttctgctttcttccatgctacaaatccttccagcggcaaggagctcaagattttgctgcaatcggattaggtcattggcagagtaaagataaaaacaccatgaaaaacaccttagattaaaagccacgtcattgtcctcctacacagtccgttctacttaaccaatgacatttaactcttagcctggagcacaggaagtaaaactggtagcccacatgtcaaaccgtaaatatttttgtaaatctggtcattatcctccaaaggtaataacgtaacagcccaagaaaatttttggtaaaaaaaaaaaaaaatgataaatgaaatgtaccgtgtgcattttgctattagtccatcttccatcaagtttattcatgaaataaattagccacattgagtttatttctgggataatcaattcagcatgtactgacaaaggcagagacctcttctggccttccctggctcctctgtgtacaattttcatgagtcctgcaatactttgtctcccacttctccaattaatttcttattcttctcatcgcttggcatattttcacattctaaatattccagttacatattacataccaggtttcatgtgtatctttccctcttgaatgtgcgagcaagagggaaaggatcataatatatgttttgatggaacccctgacaccgagaaccatgttgtccacatatatttgctaaatgaatgactggaggcactgcttgaggattctaacaaaagataaacttagctaaaaaatctgcaaataatcatccttgattatttttctaaactgaaatatttctattaattatagtaatatccctcattatctgcttaccatttgccaggcaatgttccattcatttttcacatttttatctcaatactgctcaaaactgtgtagatgtgtatgtactattaataatattattttacagacagaggaaccaatgtataaagaagtttaatatcttgcccaggaaggtgagtttaacttgctaggttcaacattctgagttcagagtctatgctttgggcctctgtgatgcaatgtccctcaaaagaaagccatccaagatgagtgagtggctcatggctcatgcctgtaatcccagctctttgggaggccaagatgggcggatcgcttgagcgctggaattcaaaatcagccaaggaaacatagggagagcccgtctcaacaaaaaatacaaaaattaaccagccctgatgggatttgcctgtaattttaactactcaggaaactgaagtgggagaatcatctcagcctagggaagtggaggctgcagtgagccgtggtcatgccactgcactccaacctgggcaacagagtgacatcatgtatcagaagacaaaacaaaacaaaaaagccatcaggaaaggaagaacattaaataagaaaagctttaatattggtgaaaaatgtttacatttcttaaagcaaaattgcttcacagggacatatatttcccacaaactttccccaaagctgtgaggtggggtcaagggaacagtggttcacattctccaaaggttgtgttaattttttcggtcaagttttcgaatgaatgggaaactcttcactgtgtgaatttaactgtacacatactttctcaatcctggggcttattctctaagccccattcccctcctaccctgatctatccaagggctggagaaaaaagaattcccttggatacactctctgatgcaggctacagttctgattctttctctgggaagaaaaataaagatatgcatatgaatgtgcagtgggtgtttcccaatatgtgtacacgccctgccaaaaaggaaggcgaaacatactttcagtttcagcccacacaagaagggtaggagagaaaagccatggccggtgagtcttttactgttccaagaacaggtccctgggaagaaagagttgtggaaagggctggctcttctggaagccataattagtatctgtggaagtttaggtgagcagaagtgagggagagggaggagtgggaggagagaaggaactagaagatt

SEQ ID NO: 8203 - DNA, 2300 bp, Homo sapien
acaaaagactcatggctcatggttctacatccctatatatatggtctagtcatggcttctgtgtcctgggtgccattttgtcatactttgtacaagccatgaactcactgattcatggctctgcctgggggagaaaactatgtgtgaaatccttaagttaatagagaaaataaaagaatcagtacataaatgtaaaagtaaatgaatggaagagaagtgatgcacaggtaatttctgctttcttccatgctccaaatcctcccactgtcaaggagctcaagattttgctgcaatctgactaggtcattgacaaagtaaagataaaaaaaaatcatgagaaagcccttaggttaaaagccacattattttccttctacacagtgcattctagtctaacctaaacacgtttaactcatcgcttagagcacaggaagtaacattggtggcccacatgtcaaaaggtggatgtttttgtgactcctggtccttattctccaaagataacaaggtaatgacacaagaaagttttttttaaagaaattgataaatgtgaagtactgtctgcattttttttattagtccaacttgcatcaaagaggttcataaaataaattggccgcattgagtttatttctggaattatcaattgaacatgtgcttgcaaagacagagacctcttctggccttctctggcttctcattctacagttttcatgagtcctaaaatattttgtctcccatttctccaactaatttcttattcttctcatcacttgccatatttgcacattctgaatattccagttacatactacataccaggcttcatgtttgtcttcccctcttgtatgtgagagcaagggggaaatgaccatgatatgttttgactgaacccctggctcctagaaccatatcgtccatatatatttgttgagtgaatgactagatgcactgcttgaagagtctaacgaaagataaacttagctggataatctgcaaataattatccttgatttttctaatgtaaaatatttgtattaattatagtaatatcactcattatctgcttaccatttgccaggcaatgttgcatgcattttgtacattttgtctcacttaatgctcaatgtgtaggtatgtactattattaaaattatttcacaggcagaggaactaatgcatagggaagttcaatttcttgcccaagaaatgaagtttaagatgctaagttcaacattctgagtccagagcctgtgctccaggcctctatgaggtaatgttcctcaaaagaaagccatccaggatgggtgggtggctcacagctgtaatcccagcagtttgggaggccaacgtgagtgaattgcttgagtgcagaatatcaaaaacagcctaggaaacatagggagaccttgtctttacaaacataaaaatattatccagccgtggtagcatgtgcttgtgttcccagctacttgggaggcagagctgagaggatcatctgagcctagggaggtggaggctgctgtgagccctgttagtgccactgcactccagcctgtgtgacagaataaaattctgtatcagaaaaaaaaatctgaaaaggaaggacattaaataggaaaagctttaatttttgtgaaaaatgtgttcatttcttgaagtaaaattgtttcacagggacatacatttcccatgactttccctagactgtgaaatgggcccaggagagcagtggttcaaattctctaaaggttgtgttacttttctccatcaagctttctaacgaatgagaaattcttcactatgagtttaattgtacacatactttgtcattcttgtcttattctccaagccccattcccctcctaccctgacttgttcaaagggctggtgaagaaaatttcccaaagatacactctctgttgcagcctacagttcaggaatctgaatcttactctattaaaaaaatgaaaaaataaaaaaagacatgcatatgcatgtgcagtggtttcccaatatgtgtacatgccctgccaaaatgtataaaaggaaggtaaaaagaaaggtggtgcatgctttcagtttcagcttacacaagaagggaggagagaaaagccatggccggtgagtcttttactgtcccaaaaacaggcccctgggaggaaaaagttgtggaaggcgcttgctcttctggaagctatcatcagtatctgtggaggtttatgtgagcaaaagtgagggacagggaggagagtgaggagagaagaaattagatgactcttgcagcctttagaaaggaa

SEQ ID NO: 8204 - DNA, 2300 bp, Homo sapien
atatttgttcattaaatacttgcaataaaactgcaaggtaggaattatcatcaaacctatctggcagatgggaagactaaagcttggttaatttcctttcctaagatcagcagttaaaatatggatccaaccattctggcttcagagtctgtgcccttaatctttgtaatacagtgttacttaaaatggtgccatctgaagaaaaagagccttacgtaacaaagcacttttattccaaatagcaaaactgcttcatacaccatttctgcgtctggagactgcctagagcttaggtaaaaaacaatgaaaggaaggtaagaagtcttagtccatctcacacccattaggatggctattatcaaaagaacagaaaaataatatgtattggtgaggacatggaaaaactggaacgcttctgctttatatgtgggaatgtaatacagtgcagctgctatggaaaacagcataccgatttcacaaaacaaaatgaaatagaattactctatgatttgtcagttccacttctgggtatatattcaaataattgacagcagaatctcaaaaacatatttgtataccatgttcatagcagtgttatttacaatagcaaaagggaagaaatttgtgctcaatgaagaatgggtaaactaaaatgtggtacatacatagaatggagtattattcaacttcagaaagaaaggaaattgtgacccatgccacaacatgaataaacaccgaggacattacactaagtgaaataagtcaggcatcaaaaaatgaatactgtataattctacttacatgagatacctagagaagtcaaattcataaagacagaaagtacaatgttagttgccagggactgatggaaggaaaggatagagagttactgtttaaggagtatagagtttcaatttcccaaaatgaaaacaactacagttggatgatattgatggctacacagcaatgtgaatgtacttaatgccactgaactggatactgtaaaatggctaagatggtaaattttatattatgtgtattttaccacaatttaaaaaaggaactcttagtacttgatttaggtggcacaactaccctatactgtgattttactttccatttaaatctcagtgaattaaagattgtttactgcatgtgtttagctctgtgtgtgccttctcaattctctcctattcttgtttctcacccaccaaggaatggtaaagcaattttcttatgggcacagttcatgctacaatctgagattcaattgtgtaaaaataccttgggaaatgacaatagttaacagcttcttgggcaataattataaatacacatgtgtaggtgtaagtattgttcattgatctgtgtacacgccctgcctaaaaggatagagctaccttgcctgtcattgcaagtgtaacacacattgcaagtgccaacgtgaggagccatggctggtgagtcttccccagtaagaggataggtcttagggaggaattagtttgggaaaggactgcctttctcattaggctttgtgaaggtttgtgtgggcagccttggggtggagagagaaagaagaagggagaggcagggtgggaagatgcccagacttgcacagcgtttttgaaggaacagataaaggccaggaagaatctgggatcctactggtatctgctataattttgctagtgttgtccacatttgaagagttatgtagttcaggatgagaatgggcacaggatgggtatcagtagctgttgttctcaaaggaaacagtcaattcccttcaaaattcatgaaactgtcaattcccttcaaaattcaagaaactgggatgtgtcagaatagaatgacttctgatttttaggagattcacagaaaaatcatgaagtcaagtttcccaggtcactcagtgagcatatgtaggtaatgctagaatcagaaggaagtacgtggagtaaatgcaaaggtataagaccgttccttgggattactgtacttgtggagagaaatgtttaaatgattgttaccctgttggtaaattgagagggaaattgtgtcatgttcattatttgaggaatctttgtgcttccaacagaccaactcttgcgtaaaaagagaagaatttttatccattcagtgggtgcaggcacaataaatgccttgctggattgcctattagaggatgaagttattagccaggaagacatgaacaaagtgagagatgaaaatgacactgtcatggataaggctcgagtcttgattgaccttgttactggaaaaggacccaagtcttg

SEQ ID NO: 8205 - DNA, 2300 bp, Homo sapien
ttgagtttgatcttcgtatgtaaatcagggcttacaaagtcttaaatgatctggtcctcactaacctctccaacatctctcacctgcctgtcctatcaaaatgtgtaattaaaataaaaagtgctcatcagttactccacattttacatccttgattgcacttagttctgtcttgactcaaggattaacatgtgccatttttcttcctgtatccagcccttgctccttcccccttcacctggcaaacctatactctttgtcagtttcagcttcatgacactttatcaaggtagtcttcgctgactctgggtatctgggaaagatacctcttttatgtgttcccataatctctacgttttccctagagtactactttggagctgtattattttactttctagattccctacactaggctaacagctccatgagagcagggaacatgatattctcttctaccaatggactccagtgcctagcaaagtatcctgcacatagatgatcaatacatgtttgttatgaagtgaattgtgtgccccctcttcatatatggaagccctaacctgaaatgtgatagtcttaggagatgggccctttgggagacaattagatttagatgaggtcatgagggtggagtccttatgatgggattagtgaccttataagaagagatatcagagagattgtgctctctctctctccccctctctctccccctcccccctcccccctcccctctccctctccctctccctctcccttttgctctctctctgccatgtgaaaacacacagtgagaaagtggctgtctgcaagccagaagagagcctttaacagaatccaatcacgccggcaccctgatcttggatttgcagcctctagaactgtcagaaaataaattgtttttgttgaagccaccaagtttatggcattttgttatggcagctcaaactaactaatgcacatgtttgatggattaaatgaataactaagtaaaaaaatcaatgactgaatgattatttaacagtgataattatcttatgatcctaggccactttggtgtctcagttggcctggtatttttgagcctgtagatgttatattttcttgcttttttttttttaatggacattttcttggtcaacatgatataatggaaactccagatcttctagtacataacaagactttgggttttatgttagaaaggtattttccaagctcaatttaagaagaaccatatatctggctgtagaaatattgacactatgaaatccaaaattgttgactatttaataactactgctatgatcgtgttaattatattgaaataaatctcccagctagaaaacaactgatatggagaaataagaggtatttcatatatatgaaacaaagacatggagaaagtaaagcatttatactacataccacaagaggtaaatatatttgcagaatagtaaatggagaaatatttttctcttttttttttttttttttttttgagacggagtcttgctctgtcgcccaggctggagtgcagtgacgggatctcggctcactgcaagctcctcctcctggattcacgccattctcctgcctcagcctcccgagtagctgggactacaggcgcccgcaaccacgcacggctgattttttttgtatttttagtagagacggagtttcatcgtgttagccaggatggtctcgatctcctgacctcgtgatccgcccgtctcggcctcccaaagtgctgggattacaggcgtgagccattgcgccctgccgagaaagattttctattcctggtggatccgaggagacagaaagcttttcaagggcaaatgcctgccttgtataaatatgaataacttcttaaagaagttacccttctttagttaagaactcactgtgatgttatgtaaaaagaatttgtctaacattcagaaggtctgagtttgggttacacagttagtaaatagtggtccactaattcttttttttctttctttctgagacggagtttcgctctgtctcccaggctgcagtgcggtggcgcgatctcggctcactgcaaactccgcctcccgggttcacgccattttcctgcctcagcctcctgagtagctgggactacaggcgcccgccaccacgcccggctaattttttgtatttttagtagagacagggttttaccgtgttcgccaagatggtctcgatctcctgacctcttcgtccgcccgccttggcctcccaaagtgctgggattagaggcgtgagccaccgcgcccggccggtcc

SEQ ID NO: 8206 - DNA, 2300 bp, Homo sapien
gcacattagtgagcattcataaacattaagagtcttctaagaatatcagggattttgttttgttcaactttatatctcaaacacttggagaataaatacacatcataggtgcttaatatataactatttgacatatatgtacatctatatacatgtatatacgtatataatatatgtatatatgatatttctatgtatcatacagagaaaatatatttgatacatacatttataaatatatgtgtatataatacagataaagagagtttaggtttagaaagtaaaatagaggttttaactacttgggaaaatagaaattaaaaacaactggattactattttggaaaaatatagttgtgtcatctgtggttatattagtccaggtgttatcatgacagttaagtggggaaaaaaaacttgtcctgcatctatatcaatgatgctattacatcatatgaaaactgaaatctttcaattttgagaagaattaaagttaataattgcctctggatcaggaagagcttcactagttacccaagcaagtgatgagtttaacagtttggtggattttgaaattttaatttaacttgaattttatgtgtcatactctattatcctttttcaagagaaaacagaatgctattattcacagccttgttttttaacacagaaaaataaaaaaaggaaaaatgcttcaaatttcacttgacttgcaagactaaaacttcacaaactaaaatgacaaatgtatgatttgtaaaatacagttacaattaggttttttttttcataacaatctgtggtgaaatgtaacgggaaagcagacacttattttaaagatgcaattttaaaaataaaattcaaaacttaggaaatagaaaagcactcaagttttagcagggattttaaaatgtcatctacaaactacaaatacaggtaatcagtgacaccaaataaagtattttgaaagagttaaggtaatgtatatttcaaaaagccgttaccaggctttctgtaagtcccttgcaagaattccactttaagcattgtagtctcaaatattatatcaggcaaacctaggcatttgctatattctttttaaaaatttaatggcagacatcaccctaggttccctaacgtttaaggagaacctctccttctaatgattctctcacacagcttattggaacaggagattgtatttactaactagatcaggaaatctcaaaccatacagaggaaatcagaaaccggtcactcacggctaccacagtgactgcttctgagtgtggttcaagctcagtccaggacaggcagatgaaaggacaatcttaaaggtgactctggagagcaagtgagactgtaaccccaaaactttctaggataattcattttcacttctacccagtcaaaacaactattgacatcatcactgaagtgcttaagtctacctggaggtggcgtggagcagagtgagcattccagagtcccagacaagaggagatgtgcacgaaacactatcttcctgtcagacacctgtgcccactgccccaagcactgcccctctggtccttcatcagcctttgcgctgtgtccctcctgctcctgcaatgggccacagcacagaaggaaagagtcctccggaatgggtgactgtatagaaagcaatcgaatctttaatcacttttcctactttacacttcacgcagttcttattcctatccctgcttcatgcctttccaagagaatgttagaggcctctttcaattttcatttctcagtcttttccccatcccgttcagtaccctaaacttcgtcagttatttaaaataaccttttaccccctcctccccttcccaggatgtttcaacttctctggctctcttccccatccttacctcctccaattctttcatcctggtcctggcctcttaaacccgccaggggctgccctttgcctgtcttttctcctcccatccctctctgaaccctttcacctcatccattcccttgtcaggctctccagattcccgggctgtttgctggtgagaaatctttgctgcagcgaggaccggagtcccccgcgcgcagcccagtggcagaagagggctaggctgagagggaagccaggactgtaggagagggaggcagcccgtcctcctcacgaacctgcaaggatgcggcaggggcctgggggcatggggaggtactaaccccccggagcccccgattggggcttgcagacctggcccgtgggcggattttctgcctagcgcagccgagaagcagaggtgccagga

SEQ ID NO: 8207 - DNA, 2300 bp, Homo sapien
actctattatcctttttcaagagaaaacagaatgctattattcacagccttgttttttaacacagaaaaataaaaaaaggaaaaatgcttcaaatttcacttgacttgcaagactaaaacttcacaaactaaaatgacaaatgtatgatttgtaaaatacagttacaattaggttttttttttcataacaatctgtggtgaaatgtaacgggaaagcagacacttattttaaagatgcaattttaaaaataaaattcaaaacttaggaaatagaaaagcactcaagttttagcagggattttaaaatgtcatctacaaactacaaatacaggtaatcagtgacaccaaataaagtattttgaaagagttaaggtaatgtatatttcaaaaagccgttaccaggctttctgtaagtcccttgcaagaattccactttaagcattgtagtctcaaatattatatcaggcaaacctaggcatttgctatattctttttaaaaatttaatggcagacatcaccctaggttccctaacgtttaaggagaacctctccttctaatgattctctcacacagcttattggaacaggagattgtatttactaactagatcaggaaatctcaaaccatacagaggaaatcagaaaccggtcactcacggctaccacagtgactgcttctgagtgtggttcaagctcagtccaggacaggcagatgaaaggacaatcttaaaggtgactctggagagcaagtgagactgtaaccccaaaactttctaggataattcattttcacttctacccagtcaaaacaactattgacatcatcactgaagtgcttaagtctacctggaggtggcgtggagcagagtgagcattccagagtcccagacaagaggagatgtgcacgaaacactatcttcctgtcagacacctgtgcccactgccccaagcactgcccctctggtccttcatcagcctttgcgctgtgtccctcctgctcctgcaatgggccacagcacagaaggaaagagtcctccggaatgggtgactgtatagaaagcaatcgaatctttaatcacttttcctactttacacttcacgcagttcttattcctatccctgcttcatgcctttccaagagaatgttagaggcctctttcaattttcatttctcagtcttttccccatcccgttcagtaccctaaacttcgtcagttatttaaaataaccttttaccccctcctccccttcccaggatgtttcaacttctctggctctcttccccatccttacctcctccaattctttcatcctggtcctggcctcttaaacccgccaggggctgccctttgcctgtcttttctcctcccatccctctctgaaccctttcacctcatccattcccttgtcaggctctccagattcccgggctgtttgctggtgagaaatctttgctgcagcgaggaccggagtcccccgcgcgcagcccagtggcagaagagggctaggctgagagggaagccaggactgtaggagagggaggcagcccgtcctcctcacgaacctgcaaggatgcggcaggggcctgggggcatggggaggtactaaccccccggagcccccgattggggcttgcagacctggcccgtgggcggattttctgcctagcgcagccgagaagcagaggtgccaggaaaaccaagagaggggcgctgggggtgcccatccccagagtcggtccctctgcgaaccgaggaagaaaagaggagggagtcagcgagtggtcagaagggaaaacctgacaccagactggctccggagcgtccgggagactggggcgctccggtgagcacccagggggtgaagccagccgagcggtgggcgaggggcgtgcggagggagtgcgcgctcgaggaggggacgccaggagggcagcgatgctccgggctggtgcaggcttgctgggggatgtcggctgatgcgagctggagagcgcgtgtggcggccgcggcgccagtgtttgtgtgtatgtgagaaagcaaggggcgagcgcgagtgcgagtgaggcaaagatagagcgcatgtctcatccctgcgagcagccactagacgctccaccaccatcttttgcatgtgcaacatttgcagccggacagaaaacctctcccagggctatggagactgcgggaaaaatctggcggctcgcgatggattgctaaggagaactagtcataatcttaaaccaccgaaacctctttccttttttttctttcttttctttcttttcttttttttttttt

SEQ ID NO: 8208 - DNA, 2300 bp, Homo sapien
gtggtaagtggtggagctaagctctccctatggtgtttgatcctatagccatggtagcttgggcttgttctaatggaggtggcaagagtaaaggagagaaagcagaggtgttcaagctgtcaaggccaagtctcagaactagcacttcattatgcttctgccacaccagattggccagaactaatcacagagccagaccagagtcaaggggtggggaatagagtccacctactgataagaggagctgtgaagttgggtaaaaatgggatacaggggctgggtgcggtggctcacgcctgtaatcccagcactttgggaggccgaggcgggcggatcacaaggtcaggagatcgagaccatcctggctaacatggtgaaaccccgtctctactaaaaatacaaaaaaaaaattagccgggcatagtggcgggtgcctgtagtcccagctactcgggaggctgaggcaggagaatggtgtgaacctgggaggcagagcttgcagtgagccgagattgcgccactgcactccagcctgggcaacagagtgagactccatctcaaaaaaaaaaaaatggggtacagggagggctgaggaattctggccatttttgcaatcagtctaccacatcttcactctggtttgcctgggatactttgattataccagtggttgtgatatcctatctcatttagcattagttctagacaaaagtgccctgataaggactttgaatgatatgggcatccttattgtaaggagcaccttcccatctgttttgtagaaatggctggtttaggagaaggaagggaccataaatttgcagaaaagaaatatacagtgttctctcaggctttttcttctaaattaaacactttagtctttgtaattgaagggaatttctgcttcacttctttcattttctgcctaatttgtccattttatattactttgctgcttctctgctcatttttctacttcttcatgctttgtcacctctatcctgtatataaaagcagatcataatgcttccagaatattttattttgaatagataccttttcctacctctctgtccttaacattttcgttttgaatccaaaatgatttttactgtgctctacatttgtgttaacattacactttcccaaaagtaaatttaatttataaaatatttaatttttaatttatcagggctttctagtcactatcatcagaactgaagttataatttctaaagctctcagagaactaccagcctgtttcctgtttccacctgtaacttctttttgacatgtgtagatcctttttatacatgcccggcagcattttgcatggggccttaattaaaatccagatgaggattgtctgccaaatgtatcattttgaaaatttctcccaatgcatattgaaagggatctagcttatgtatgactgggacacagctggagaagaacatatctctttttaaaaaggaaagttggatgctgaaatcacagattaatttaccactgtagatagaggcattcagactgtgctgtttgaattaagactaaaaagaaacaagaaatggcaattattataacatttgaatttttgtacattcatataactttatcaataccctttattatttaccatttgtttctttgatgtgacccattcatctttagaaaaataaactgaaatatagtcagtcaactcttaatgtcattttctttctcatttaaaatctccagttccaacatttgagctgaaatataaatttacaagcatttataatcttgtaaatttgtaagttataagcatctcaccctgtatattttcgtttccccaaatacacaatgcatgccagaatcaaattcattagctgtcttctctcatacctgtaaatcatcttctctctgcagggacaccatttgtatcaggttgcttggaaattttagatgtatctttgagtcttttgccttcattctatacaagttgttgaccaagtcatgtattttctcctgctgatgcctcagaacagcctccttcaatctcacatgtagtccttagcatggaggcatgtgtagcctgtattccagcaacctctcaagtttcttcctgtccagtcctccctctgttatacttccagaatagctttcccaaagtatcgggggaaccagcccccaatatttcaatgtaggttcttttctattttccctaagtgtcgactggtctgagaaataaagggaaagagtacaaaagtgagaaattttaaagctgggtgtctgggggagacatcacatgttggcaggtt

SEQ ID NO: 8209 - DNA, 2300 bp, Homo sapien
atttctgacaagtttcaggtacaccctctttgacagtctgacaacctgagattctggaaattggagaaacattgtctcgtatctaaaagaaatgcttacaagagaggatcttttccactcaaaatctgtatacaaatattgccacatggatattttaaaatttatttaatggagactccaagtatacgtactttcctattgtgctcttcaactctacaattaaagtggcccagaaaaatacaaagtactgctgagaaattctccaaagaaaggcacataattaagagccttaattagaaacaaaaatatagtccagcctggttttgtttgatgttaggggcttttgtttggtggtttaagggaggggaggatggggtgagctttgaggaacagaattacaagggcaaaccatgcaatgtgcactagtctttgaaaggtttaggaatctaaaaaatttttttggtgatattttcctttttctttttgagtgatcatttttttttttttttggttatctttttttgttgatcttttttgttgatctttttacttacatgattaattaggtgggatggctgggtaaaatccttgccatttttttgttacccctttaattttgtcatattcctacaatactttcattgtttcaggaaattatattcgaaatttaggatttctgtgttggtttattaaccttaaaatgagtttgaatttgtgaagtagtaaaatgtaggtagttggcatttatttgatcagattacattgtctcaaattggtttctgagttttattgattttgcagctcagcctttcagtttttctctaaaattattctgcaaagtgtactttttcttttagatatctcaaactaatgattattttggcaaatcgactctttcattcattcaaaacatatttatggtatgcatgccatgtgccagaatctctgctaggctctggggaggtgatggccagtggaaacatccctgcccttgtgaaactttgcagtgaactggggaaaggacagactctgagctgtatgttagcacaagtataaaatccagtctaggaagagtcctgcaaattttatgctggagtaatttgatttgtcaggaaaggcttccctgagaaacggatgcttaatctgcaagctaaaggatgaggaggaataaagtagaccgaggaggaataaaatagaccgagaagggagcaatccattttccaggcagaaggaacagtgtggacaaaggccctgaactaagaaagagtttgacaggaataggtggctgaaagatggccagtgcaattggaggagagagggagaatttgtgggagaaggagctgaagtagtaggaagggagtcaggaatgaatagtggcaactggttaggaacctttgcagcacaccagtggggagaaaacggcaatttggactatgttagtactggcaaagataaagaagtacacaattttaagctatatttagagggttgttttttgtttctcttaaaaattatatagttcattaggttgaagtatgttgtagaagttgcagattgattgattgcttgtacttttttccttttaggaattatccagactgccttgccactagatgaatggaagacaatgatttgaactaagggccagcaaagaattatccctggtttttgtgctttgcagcattcctcaaattgttttcacatctcttaccataaaaactgcattgaaattgaaaatgaagcagttgaaaagaaaaaggaaaagcaattttagtgttcaagaaactcagacccttttgaaagaaattacgaaaaggaaagaagtcattttttccaagcagctcaatacaacaattaatgtgatgaagcgaatggcttgggaagagattgcacagtgtgtgaatgctgtaggagaaggagaacagaggacagggacagaggtgaaaagaaggtaccttgactggcgagcacttatgaagagaaagaggatgaaggccaacattaagctggttggttcaggatttccccttccctcctctgatttggatgactctctcactgaagagatagatgaaaagattggattccgaaatgatgcaaattttgactggcaaaatgtggcagatttcagggatgcaggtggatccttaactgaggtcaaggtggaagaggaagaaagggatccgcagagtcctgaagtaagtattagcctctgtaccctcttttaatcttttcaattctgatgtgggagattattgttcaggaactgttaacacattccaagattttcaagcttattt

SEQ ID NO: 8210 - DNA, 2300 bp, Homo sapien
acacattatggattaccttcaaattcttcattgttggtccatatccactcagacaagatgtagctgagaggaaatagtgagggtatttggaaaagatacttcaattagcaaagagactgaggttaattggggaaagcttagagttcatgatacgaaagcaaaagtttgttaatactgattcaccattcttgtccccattactgaggtaaataaacagagtcaagtggtggacaggttctgaacagaactgatagtgtctggttatgatggggatagctagttatcttactttctcactgcactcatcaaaaaaacaccacccaccatgaacaaaatccaaaattataaaatacaacttgtatttttccaaaaattacaagtttcttttgatctactttggcaaaagtatagacatgcttctttgacaaacatgtctatacttactgacaaagtcataagtaacaatctgtaagatcaatctgatcattacattttaaagagcatatttcataattacttcctattttatgggagagttcctccaagaatatccagcaaggatgcaccattcctccagaatattccaccatttatttaccaaatcttttttgtctgttacattctaggcactgtgttattcacaacagtaaacaagaaaagccccacccacataaaatatgtgggaagtgctgtcagaggaaaggccgtgatgagagctcgctgaagtaggcttgcagatttagtaaacaaaaatttttatttttttaaatttagcaaataaacatatggataccaaatattccattggacagattaaaaattatttgctttttatctgaacttcaaatttaactgagcgtcctgtttttatctggcaaacctacagggaagggaatacttggaagtggagggagggtgaatggagataattttggaagccttcctttagaaaggaatttctaaaaatgaatgctaggcatagcggagaagcagggaggaaacacagcaatgcaaactgacttcccagtagccactgtagagttcaggaactgaaagaagcaaagggaatggggtaaggaagaagaaatgtgggtataatgtcgagagatgaaggttgagggaaaagtaggtgccttatttttcaggttcgataaggagtttgtactgtatcaccagtggtgagattccactaaaaaactttaagcagctcattttggctacaacgtgaagaatgaactacagtccggcagacaggatgttgggagaccagctaggaggctactgatggaattcaggtgagtccacagaggcctggacagaggcagcgggaagaaaggtgcactaatcacaaacacctgaacgtgagacggcagaaaataagcaactgcaaacttgaatatagaggaggactgggagagaagaaagcagaagcacatatttggggaaacagtgaagaatggtaaaaaaaaaaaaaaaaaaaaaaaaaaattcaaatgtcttctgggaagtatatagtatgataaggactaagaagtgactcctagatttagccataaggaagtcaccagcgacctttggcacgggcagccttagaggaatggctgaggccaattaggtcgcagctggtcgaggagaaggtgatgctggcctaagaacccgactggagcagcacaagtttcctacttcttctttgcccttttaacaggtgagggtcaaggacaagagacgagtttggagatgcagcggccagtgccccaatcagttggaacagcgcagcaagcggatctctaggggccaatcccttcctagagtccacttgactgacagagctgcgcgccacagacggggcacagacagggaggtgaatcacgagggggcggaattccagggcactaacccggaaccggtttgggacttgattcccattgtgaggccaggcctagggcgggctctcagccagaatggctacaccattctaaccaatggatgagactcatcaaatgagcggcagccatatgagccattggggtggcgggagatgggcgggcccagttagtgggcgggggatcaatgaagcatcttttttcctaccccccttggggcgaccgtggggaggtgccgccggggtcgcaggtgagcggttctatgctggaggaggcggccagggaagcggcggctccgtgaccagtgggtgccctcgcagtgggtagggtcccggaggggtcagcggcaattggcgcaacgcttgctgccgggtttggtccaagggctgcgacgtagcgggactgcacgctcgggag

SEQ ID NO: 8211 - DNA, 2300 bp, Homo sapien
ttttgcaagataacacacatgaaaataattcaggacaataggagagacgtcataaggcaatactagaataactgccaaatgaattacataaacaatactgttttggaaaaaggtactctgaagtaggccctaagagaaggtttaagctaagctctggagaatttgtaaaaccacacagggaaggggattaaacaaacctataaaatatgttcacagggtgataggtttggggctgaggtttggaagtggagagagtaagctattttagactaggtgaacagagacattctgtttggtatgagatttgggcctgaatgatacagaggaaacaaggaatgtgataatgggagaaggggagaatattctagattctagaccaagtacaaataatccctacgttactgtctgtgtattaggctccatagatctaatacacagagatcttgctcgatggtaaaataatgggatatgaattcctgaatttaaacaaattctctttctgagctcattgtctccatcagtaataactagtgcacagaacatgtgcaataacgtacacagaagtgttttggaaacagaaacgtaatgtatcaaagttataaaaatcagtttaaaacgacaagaaggaaaggttatatgattcttagttaaaaatggagaagtgagttatgatcattgctgatatgggtattagtatcacttacgtatctttacactgtctcttattgtactttttatgcgtatgatttatttgccttaccagattgtaagctccctgcagctggtaagcagattttcaacatggcagctgacacaggcttttggttagctaagatgatatattaagccaataattcgttttactgtcctttggggatctgaatttgtgtgtgtgtgtgctcagaatcccatctactttcgagggattcggggggcttatgatatcacgaaaagttaatgaagacaagtatagataaaaacataatagaacccatcttaaataggacagaaatcataggcaggtaattgtgttaattactaccgctggcctttggctgatatttccgggcagtcagaggaagaaggaaatcggctgaatcccgcagtaccgcactttaatcgacctccaggtagtcatttacagtcatctgcagagaccaacttttccctggaccaaaacctgcagggcacttggatcgcgtgggctttcatacgagagtcaacaacagcctacacggaacaactaaggaaacagacatacatcaatatgacccttcgcaaagtctgagaaaataactgagcaaagttatttacttgtttctgttgctgttagagcaaggacctctgtcatgatggaaacactgatacctcaacaatggaatcctgttttctcgctagtgctctagcccaggcttggcaatagcaaaacagcacctgggtcgcttcatcgccccaaataaacagccagcattagctcagctgctcgctggcagcctcggatccaggcggggtcagtgttgcgcactggggatagtgcctctgctcggccttcggagggagggtttcaggtaggctgctgctaagggtcgggagcgtactgtgtgagggtgggtcttaggctgatgcggatgggggcagggaaagaaggaactcagggctgatgcgttgcacaactgcagggggcaccactgcagaccccctcctagagatggaaacctctcgtgccccgtacacgaagcagctgaagccaaggacattctcttctctgtgggtcacaggggccaactcagaccctgagaataagggctaccatcccactcctccctcagaccccggagctcacccacctgcaactgcagtctccgaagtctccaccccagtctccctgcctccagaggactggttgcgattggcctgcaccgctgtcccgttaactcttccgcaagtgtgagtggcgtaactgtcgggctcttggccttggtcccgcccttcgctcgcctccgaagcctcgcctacttgacgtcatacaatgccgcaaagcgcagggctgatctccgtctccgcccccagctgctttctccgagaggaggtggctgagtcgggggcgggctgggagggctgtcggtgggccagtctgcgtagcgacggcccgtcccctgcgcacggacgccgggaagaagggggtggggccacgtttgcgtccgcgccatcaggcccgagatagcggcgaggtccgctttcagtgtatggttttccctgccaaacggttctgcttggtgccatccatggagggcgtgcgc

SEQ ID NO: 8212 - DNA, 2300 bp, Homo sapien
aaaaacaagaatataagatgacaaagtatatatttttaaaaatatctttcaggtttttttcttcttcaattctaacactgacttttaaaaactgcaggcttttaaatgtagcttattttacaattccttacaaatgagtaaaaaattttcaccaatgtgccttaaaaattatcaactagtctacatttcaaacagaaagtgtttcaatatgggacatttttaagaaaggactgtcttttaaatgatggtaattcacggttgtttcaaattgcaccatattgtacagattacttgttttgaaatccagttttccatttgttgcttcaaaatacatagctaaaataaataaatctacgtaaaatactgtttcccatggcatctagtgaggaaggtatcctctctggcttcaatttcattggcttcaatcccggggagcgcagggctacaaactaaatcatactgtcaataatttctagggcctaccacgtgcagggagtccttggagaatgatgggatatttaacaggcagaataagcataggctatgaacgcacacaaacaaaaaaaaataacatttaaagataaagacataaaaacattcattacagaaaaacccaattttgtcggccttccctacacttatttcatggtttaggagggtctccatttgaaataacaaggggaaagagataatgtttacagccatcgcggcctccaaggcggttacaaaggccgtggaaaccaggccgtgcgtcgcccacaactccgcagcgccggctgctgtcgcccgggccggccacaggctccacagcgagagggtcgcggccagcgcgggagtgtcgggtctccacagcccggcccgcctcccccaagatctgcttcctaggctctaaataccaaaaaagacctgtagtaccatggctgccttagcgtcccgggcaaagacgaactggccaatgcgctccttctcctcgggctgaatcgatcgcactgccagcagccattcggctcggctcggcagccaagtgccgcaggaaaaggcccagcgcacgccctccatggatggcaccaagcagaaccgtttggcagggaaaaccatacactgaaagcggacctcgccgctatctcgggcctgatggcgcggacgcaaacgtggccccacccccttcttcccggcgtccgtgcgcaggggacgggccgtcgctacgcagactggcccaccgacagccctcccagcccgcccccgactcagccacctcctctcggagaaagcagctgggggcggagacggagatcagccctgcgctttgcggcattgtatgacgtcaagtaggcgaggcttcggaggcgagcgaagggcgggaccaaggccaagagcccgacagttacgccactcacacttgcggaagagttaacgggacagcggtgcaggccaatcgcaaccagtcctctggaggcagggagactggggtggagacttcggagactgcagttgcaggtgggtgagctccggggtctgagggaggagtgggatggtagcccttattctcagggtctgagttggcccctgtgacccacagagaagagaatgtccttggcttcagctgcttcgtgtacggggcacgagaggtttccatctctaggagggggtctgcagtggtgccccctgcagttgtgcaacgcatcagccctgagttccttctttccctgcccccatccgcatcagcctaagacccaccctcacacagtacgctcccgacccttagcagcagcctacctgaaaccctccctccgaaggccgagcagaggcactatccccagtgcgcaacactgaccccgcctggatccgaggctgccagcgagcagctgagctaatgctggctgtttatttggggcgatgaagcgacccaggtgctgttttgctattgccaagcctgggctagagcactagcgagaaaacaggattccattgttgaggtatcagtgtttccatcatgacagaggtccttgctctaacagcaacagaaacaagtaaataactttgctcagttattttctcagactttgcgaagggtcatattgatgtatgtctgtttccttagttgttccgtgtaggctgttgttgactctcgtatgaaagcccacgcgatccaagtgccctgcaggttttggtccagggaaaagttggtctctgcagatgactgtaaatgactacctggaggtcgattaaagtgcggtactgcgggattcagccgatttccttcttcctctgactgcccggaaatatcagccaaaggccag

SEQ ID NO: 8213 - DNA, 2300 bp, Homo sapien
tggttttccttttgcagttctttgcaaacgaatatgattccaagggatattcaatttctctgcaactaatttccttatcatcagacgaccagcctgttaagtacataaaacatttggtatgtactgatgtctactaaagatacaagcacactgtatgcaatagtacttttttttggtttctaaaattttcatttttaaaacttttcaaaatacttaagtattaaacacacgttaattaagacttaagcaatgcttaagtagataaaaagttaaagcccgccttagcaattccctctcctttgctagtgaccaaagttaacagctggcatcctgtcagtcttttctgtatttaaatatatgtgcatttacatgtttttgctaactctacatataaacacaaacatgagattatacttatgcagtattctaccacatataagctttaaatttataagtattgggaagtattttatgtctgtacacacacgtctggtccatgcagttttaactgtagcatatttcataatattatttcccctttattggacattttaggctggctctagacttgctgtcaaaaacaactctgcagtgagcaaccctactgtacctacatctgtgcatatgtatttctagatcccatatattgatcacccagcttcaacaattagcaaggcatgacctatcttgttctgctctctcccacctccaattattattttttaaataattactaaaaacacacacacaaaaaaacaagaatataagatgacaaagtatatatttttaaaaatatctttcaggtttttttcttcttcaattctaacactgacttttaaaaactgcaggcttttaaatgtagcttattttacaattccttacaaatgagtaaaaaattttcaccaatgtgccttaaaaattatcaactagtctacatttcaaacagaaagtgtttcaatatgggacatttttaagaaaggactgtcttttaaatgatggtaattcacggttgtttcaaattgcaccatattgtacagattacttgttttgaaatccagttttccatttgttgcttcaaaatacatagctaaaataaataaatctacgtaaaatactgtttcccatggcatctagtgaggaaggtatcctctctggcttcaatttcattggcttcaatcccggggagcgcagggctacaaactaaatcatactgtcaataatttctagggcctaccacgtgcagggagtccttggagaatgatgggatatttaacaggcagaataagcataggctatgaacgcacacaaacaaaaaaaaataacatttaaagataaagacataaaaacattcattacagaaaaacccaattttgtcggccttccctacacttatttcatggtttaggagggtctccatttgaaataacaaggggaaagagataatgtttacagccatcgcggcctccaaggcggttacaaaggccgtggaaaccaggccgtgcgtcgcccacaactccgcagcgccggctgctgtcgcccgggccggccacaggctccacagcgagagggtcgcggccagcgcgggagtgtcgggtctccacagcccggcccgcctcccccaagatctgcttcctaggctctaaataccaaaaaagacctgtagtaccatggctgccttagcgtcccgggcaaagacgaactggccaatgcgctccttctcctcgggctgaatcgatcgcactgccagcagccattcggctcggctcggcagccaagtgccgcaggaaaaggcccagcgcacgccctccatggatggcaccaagcagaaccgtttggcagggaaaaccatacactgaaagcggacctcgccgctatctcgggcctgatggcgcggacgcaaacgtggccccacccccttcttcccggcgtccgtgcgcaggggacgggccgtcgctacgcagactggcccaccgacagccctcccagcccgcccccgactcagccacctcctctcggagaaagcagctgggggcggagacggagatcagccctgcgctttgcggcattgtatgacgtcaagtaggcgaggcttcggaggcgagcgaagggcgggaccaaggccaagagcccgacagttacgccactcacacttgcggaagagttaacgggacagcggtgcaggccaatcgcaaccagtcctctggaggcagggagactggggtggagacttcggagactgcagttgcaggtgggtgagctccggggtctgagggaggagtgggatggtagcccttattctc

SEQ ID NO: 8214 - DNA, 2300 bp, Homo sapien
tcatgcttgtagaggctgcaattaaatctcttttctttataaattactcagtctcaggtattcctttatagtactccaagaatggcctaatatagtaagtttcaagatttaagactgtgagggtcaatttctgtgtttattcaaaaaaacacgtaactgtcagttttatggagaagttgggctggttttaatttcacagtaccacactgacttagcattatggttcctttctaacactggattttacaagtaagtacacagatgggcctagaaaaaggttcagaagtttgcctgaattttggttaaggaaaatatctttttcagtaaaatttcaacaattgtgaattcaactttaggcatgctgaatttgatttgtagagggaacagctaagtgaaaggtctatgaggctgttagataaagggcatgtaataaaccactagctgctgtaacaatcctccaatatctcaacattttaattcagtaaaagttaatttcttgctcatgcaaagaacaatgcagttgttcttggttggcaagaggccttccccagggtcatttagggacactgctctacaatcttaatgacctcaccattctcaagggtccatctcctcccctagatcttctgtacaaactggtagatggggagaaagtatgaatgatcacatggaaggtgttttatgtgctaatcctagggatggcttgttttatcaccaccgtattccattgacagaagctactcacatggccatacaaaactctaaggaaggttgggaaacatgtagtctagcagtgtactcaaaaggtagaaaaaagtgaatttgggtgaattcatagtaatatctgtcacataggagtttatgttcagaaatgagagttaagtgttaaagggcatgtcattaaaatataatgtgtaactgaggctatagactggatgagaattcaaagggagtagtggtagatagagttaaaaacaaaagaagcaaagagaatgaaaacttgaagaatattcagttttttcatctgtaaagatttaagtgacaggtgaatgagcatgagaaatagcaaccaaagggttttaacttattaaaatgatagctaatatttatgattgctgactatgtatatggcactatgtaatgttaacagggattcttttacataatccttattgcaacctgattgtgcaaaaacttgtcagattcccttatttttcatgaagtaacaaaattggacaattaagtacctgcctgggtcacgcaagtagtaagtagaagatctcggatttaaaccttgtctgtcttactccagagttcaatctcctcatcagtgtgccaccatcatctcttcactttcacccaatgaaggtggggaaacatgaacaccaagggaggggttccaggaatgaggaaatggtaaacaaatgctccagagagtttccataagaagtgaatagtgcccacgggaaggtcattcttccacattttttttttttttttttagtaaatgctcattgagcatgggttttgtggcagtcccagttgggacaaagcatgggtggaattccttcccttatggagcttacagatcagtgaacacactcagagggtggcagtgggagccagattgcagaggatctagtgaaacaaaaaaaaactatggagagagtgtgaatcaggcatttgatacttctctcctctgagttgggttctagagagacagacgcaatactccatggtccttctgtgctttaaatacagccttatgatctgaggcttccctttctgtccctattaaaaatgtcctgtaggtagaagacttgataaactcagactcagtaggatgctaatgactgatgaagcttaatatactagtttcctagaggtatatgaattgtgggaaacacaggcagtcacagcttaaatgaataaatctctttcgatttttagataccattgaacagatggagatggaaatttatgagggtcagagttgcctttttgttgaccgtgaaattacatcacaaaagcagctgctaagattccctgctgtccacagagcctgtatttaagaaagaccattcaagataagactgagctgtggaattataaaacctttggaaaatctttcatgtgagaacaacatgggggcaagcctctgaccaaaatagctcaaaaatttgtgttacgcagttacagtaaatacccaagagcttgacgcataaaacacaacagcctcctggagacagagggaggagaaagaaagataaagtctgtggctttagaagaaaaggaataac

SEQ ID NO: 8215 - DNA, 2300 bp, Homo sapien
agggaggggttccaggaatgaggaaatggtaaacaaatgctccagagagtttccataagaagtgaatagtgcccacgggaaggtcattcttccacattttttttttttttttttagtaaatgctcattgagcatgggttttgtggcagtcccagttgggacaaagcatgggtggaattccttcccttatggagcttacagatcagtgaacacactcagagggtggcagtgggagccagattgcagaggatctagtgaaacaaaaaaaaactatggagagagtgtgaatcaggcatttgatacttctctcctctgagttgggttctagagagacagacgcaatactccatggtccttctgtgctttaaatacagccttatgatctgaggcttccctttctgtccctattaaaaatgtcctgtaggtagaagacttgataaactcagactcagtaggatgctaatgactgatgaagcttaatatactagtttcctagaggtatatgaattgtgggaaacacaggcagtcacagcttaaatgaataaatctctttcgatttttagataccattgaacagatggagatggaaatttatgagggtcagagttgcctttttgttgaccgtgaaattacatcacaaaagcagctgctaagattccctgctgtccacagagcctgtatttaagaaagaccattcaagataagactgagctgtggaattataaaacctttggaaaatctttcatgtgagaacaacatgggggcaagcctctgaccaaaatagctcaaaaatttgtgttacgcagttacagtaaatacccaagagcttgacgcataaaacacaacagcctcctggagacagagggaggagaaagaaagataaagtctgtggctttagaagaaaaggaataacttaagaggcttgtttgctgttcaggctggccaccaaggatgacattttggtaggtttggcatgttcctgagactgttcttaactttgttggtcccctaaaatgtacgtaattgatgcaacatgtctgaggaagtggatgaggtgtgagaaatcatggtattcctattcacaagggactactttacaaccagacacaattattttacagagaactctggtttgcaagaggacctgaatattaatattagttggtcaatgcattctctccctggatgagaattttttgtgggaagcagcataatataaaatgccattcaagattctgcatgtagcatcaaagagtcagcgaattctggctctgccaactacttggctgtgggacctgggatatattacttactttccataagcctcagccttttcatatatacaatggatttagaaagactagggtgaaagaagaaagtgaatttaggtatgtaaaatatttaccatgtgatgggcagctagctagatattttacaaatctgtaatctggaaacatgaaagacagactagctggatttcctaggccaagaaagatttcctaagcctagctgggaaggtgaccgcatccacctttaaacatggggcttgcaacttagctcaaacctgaccagtcagatagtaaagagagctcactaaaatgctaattaggctaaaacaggaggtaaagaaatagccaatcatcaatcacctgagagcacagggggagggacaatgatcacgatataaacccaggcatccgagccagcaatggctaccctctttgggtcccctccctttgtaggggagctctgttttcactctattaaatcttgcaactgcattctcttctggtccgtgtttgttatggctcgaacagagcttttgctcgctgcccaccactgctgtttgctactgtcgcagacccaccactgacgtctatccctctggatctggcagggtatccactgtcctaatccagtgaggggcccattgctgctcccgatcaggctaaaggcttgccattgttcctgcacggctaagtgcctgggttcgtcctaatggaactgaacactagtcaccaggttccatggttctcttctgtgacccatggcttctaatagaactataacactcactgcatggcccaagattccattccttggaatctgtgaggccaagaaccccaggtcagagaacatgagacttgccaccatcttggaagcagcccaccaccatcttgggagctctgggagcaaggaccccccggtaacaaacagacacaagagaattaggtggagaatcttccaaccaagtgctcttaaccaacagaatcataccttccaagggaggctgattgtctt

SEQ ID NO: 8216 - DNA, 2300 bp, Homo sapien
caaaacttaattttagcattctcctgcccacagtttggaaaatttccctatcaaaatcaaaccggattgttgatttactgaggctttgacaattatcctcttgtatatcactggatccttaaatccttagtaagaatggttttgggttaaataaataatggaaaatatttaatttgaatctattaaattacactgaagttatccttccagttaattcagctagttgctgatcagatcattctttatattagacttaagtattgttgcttattatttaaaagcagaaaagaaaaaccaaatggcaggtctgagtaatagttactttttgattcttttgatacatatttttaaactgaagaaatcactttatattcagtcttcttctgtggactttttgctatttgcagataaagaaggaattctacttaatatatttttactgtggtctattaaatgtcattaaacctatatctaagaggaaagtaataactgaaataaaatcaggaatgtgcaaaattgtttcttcatacctcactttctgaagacacttctttgcattctgctgcctggcatttacacagcagactcaggacaaagggacaaatggagtgagtgaggtgggcaggagctttagaagagatgaagcaaagagagttagttttttattcaggaagatgtagagactcttaaaggagaggcaatttccgtaacaaacacctctggtttaatggaagccacatgatttatttgactactggtcactcatttttaaaaagaaaagagaaagacaaaaaaagagaaacccttcacaagccatttttagttttcctaggaggtagtgccaacctctcggcagctgcacatctcagtgaagctgggatagaagcttacagagctacaaatagatgctttctgaaggtggcagatagaactagtcttggttacaatgattaaggtaaatgaaagtgtcagaacatctgggttgaaggaacaaagaaggcccaataccagctctgccatatgccacagaaaaccctgctaaaattagcatagaaaaacagactaacactatgcaagtgatattaaaacaaactatattttttccttttataacatgcctggctgagctagcattcagtgagaagaatatacttttgtcttatgaatcatttaaaaacatttgttgttgttctgacattaaataaattacatattcccttagttgaaaaatttaatcacaaataataggaaatatttattttgtgtcctgaaatttttaaacttttggcggctgtactctacgccatattcttcttcacattcttctcaaattgggtttggctgctagcaaaacaagtgtggaactttagagcagaaaaatgtccatctgtctcttacagaatgtgccagagtatttgagctggagagagaatcaccccatagcatttaatggtattctgtgagacacgaagactctagtcttctaaacttaaaagtggttaggtagtaccttaatcatcaaagatttttcacttacatgtaactggttaattcatatagagtttgtttagaacagaaactttaaaaggagggaacaaacctgagcaatttttaatcaaaattatcagttagaaaaagaatttaagacaaagatttattgtcctgaaagagtcaactcactcatatccaaaacttagaatgtcagagacttttgaaagttttctgaatgtgtcaacttcttcagcaatgagagattcaattaatgttgtttctaggttccttagagttttatcctctgatgataacacttaattgtgaattacatttaagtgatttttactttatattttccatttgttacagaaaaaaagtcataaatatgacagacttaaaaattgtggcattgagccagggtttgcaaatttggcaatattattttacttaaaatattacactttttaaaataacataaacattaaggataatagtcaaataatactgtattttcagcttgttcacattagaatatagaacaacgcattgtaaacttctcggaataaaatctaagtcaaaaccaatttatgttcaaatcatttgaacaacaaatatgaatattgttacatcacctctgactctctgactagtaagaaactatgcatttccatacccaatgaaacctcaattcctacagcaattctacttttattgcctcccaagaactatttcttcatggtcaatatcactctttaaaagctagcaaaatatgactttcttctgaggtttgggcaatctggatcaat

SEQ ID NO: 8217 - DNA, 2300 bp, Homo sapien
catgctatttagtatatttaatactaactaaaatcctataattcgaaagaacttgactattatataatcagtaccaaagaagagaactaggaactccaatcctttatgctgattgatactgtgtagcagaaatattaaacaattaccccaaagttagaataatgtaattttcattataatttagaaaaaggggctagtgaaacttttttagcaaaactgatgattttttatgattaaaagtgtaatttgagtctaattttcaatggacacaaatgcacatagaattaattgaagtaatggggaaatcaatagtagatgcacaacagtttaaataataattgtaacaattattattttaaaagaaacttcctcaggatgagaaagaatacatatatataagaatatatattatatatattctttctcatatgtatatgtatatacatatacatatatatacacacacatatatatatatatatatatatatatataatttgaagggggagtgtctgagtgatagtacacacttttctatctttaaagcccatttaagatctggggaaaaaggtatgtctctgaaccagtttgagtggatttttccaaatgaaacctcaaatagcatttatatttaagccctaacaaacacttgggaagatttgaagttaaaagcaaattgtggtgggggtacagcacaggttttgtggtttggttttgttttgctttttaaataaacacagtccacaaaaacccatctgccttcacctggaaggaccagttctttaattaaaaaaacgctttggcttcggtttcactgggaaactaaagccagagcccctaaacttttctctccgcagatcgggtgagctggggagggtgctcatccacttcattgcagggggaagtacagcctggaacccctttcgggatactgtcatttgccccttcttcccatctcttactctatcctcagaaccagtatgagagttttctggggctaaggcaaggggcagtggggtcaggcgctggaaggactggtttgcaaagagataagctttggaatgaagccgcacagctgaaaactcgcggcaagacatgctcgcgctgtggcgagtcagttcgagaagcatttatccctactccccttagctttctgagcagcatttgcagtcaggtgcaaacagatcgcatatttggcgcaaagagccctgaggatgagggacgtgggatcattccccggtttcccccgggccaggtgctaggtcgtttgaggaggaactgttctccagttctcaacgcctgcaaaggcggctataggtggcaagcggagctgtccagcactagtgaggagccagcggagccgggagccccgcgcaccccgcccggctgaggctcagcaacagtgctgtcttgtcagagcagacgctgtcctcactgccgcccctttctgggctcgctccgcgcccacacggcctcgcacgaggcggggaacacaagtccccaggagctgctccagcaggatgggcgccaaaatgttgcccctgtccttcccttcccctgaaagcgtctcctctggagtgggctggctggacgcttggcctttcccttttgcctcggaacttcctaaataaactcggagaaaggacaacatggaccctaacccccacttcacactgtcaggtttccccaaggtggctccagggggaggcctctcgccccccagccccgagcccttctccccaccagcgccgccgggacccatctgctcccgagggccgaggataaggcgtttggggttggggccctcagtccgacccgagctcctgtgcgcacctcctcggagcagggagggcgcgcagaggacagcaacgaagtgtcctcgttgctcctgaaacgtggcgacaggcgaggcagagactcccaatgagtatgatggcgacacgtgattcccgcggagggagagcatgggggggggcggggggataaagggagaaggagggaggcagggcagcaagtggagagaggcgggagcagagagggaaagggggcgagataggcgcgcaggcggcagaagcctctgcctctgcctccccttctgcttgggccgcagccctccccgccccgccgaccgcggtcacacactctcggagcctccccgtgagcgggagcgcggcgcacggcgatgcgccgaggcgggcgctgaggcggcgccgcgcgagcagcagcagaggcggcggcggcccccagcccagcccggcgccgccgccgagcccgggccccaaggtgcggcggcgccccaa

SEQ ID NO: 8218 - DNA, 2300 bp, Homo sapien
acagatcatgcagacagaaaatcaatatggaaatgttggaattgagccacagtttagacaaatggatctaacatatatacagaacatttcatccaatagcaacagaatacacattattttcaagctcacacagagctttctgcagaatagatcatacattaagctacaaaagaaaacttaacaaatttaagcaggttaaagtcatatccagtatctttcaaccacagtggtatgaaattaggaattaataataggaaaaatgtcagaaaattcacaatatgtagaattaaaccaaattctcctgtacaaccagtgggtcaaagacaaaagtaaaagggacattaaaaattgtcttgagacaaatgaaaatggaaacaccacatgccaaaacttgcgggtagcagccaaagcagtcccaagaggaagataatagcaataaacacctatatcgaaaaagaagaaagactgtgaaccatctaactttatatcttagggaactagaaagagaagaataaattaaggccaaagttagtaggaggaaggaaataataaagatcagagcagaaataaacacaaactagaaaaacaacagaaaagaacaaaactaacagttggtttttaagataaaatcaacaaaccttgatctaaactaagaaatgagagaaggctaaaataaaattagaaaataaagcagagacattatacatgatactacagatataccaaggatcttacgagattgccatgaacttgctaacaaattggataacctagaagaaatggatgaattcctaaaaccatagaatctatatgagccgtatactttcttaacatttctgccatcctccctatcctctttggtatagcctctcttcagactgcctccttagctctcttctggatcactataacagcctaacaattgtatcaccttcagttttgctcttccttccatatgactaaataaatgaaaaatttgatcagacattaacgagtagggagagtgaattggtaataaaaggtccacttattttgtcttacagtgagagtggcttgctattatctcccattattgatgcatttctatctttgtcttcctgcatcccctgcagtttttgcttcataagaatgtttgcagtgttatttggtaccatacatattcatgttaggtctttattgtgaattacagattttagaattaaaaaggagatttgggccgggcacagtggctcacgcctgtaatcccaacactttgggaggccgaggtgggcagatcacctgaagtcaggagtttgagaccagcctgcccagcatggtgaaaccccgtctctactaaaaaaaaataccaaaaattagccaagtgtggtgtcaggcgccataatcccagctactcaggaggttaaggcaggagaatcacttgaacctgagagacggaggttgtggtaagccaagatcgccccattgtactttagcctggacaacaagaacgactctgtcccaaaaaaaaaaaaaaaaaagagatttgagggtcatatttatatttttttggcttggattctacgttgcctagtatcaggatcacctcccctattttcttattgttctcatttcccctatatttcattgtccatcccattatttttagtcttcttacatcactttgtttcttgtatacagtatactgttggttctagctttgtaagacaaattgaaataagctgaataggtgagtcaagcccactcatcattcatatgactgagtgtttggtttgaagcctgtcataaaattgtattgttatatttgctatatttattttctgtgcaatgtgtactatttgtcattttatgaaaatgttttactgatagttaagaatttttattctagtggttatctttgtatttatactttattctccattttcttatttaagatttactatctagtttgtcaggttttaatgcctgtaattcacacttattgcctatacagcgatcaatgattttaatctcacgtctttttgctcccattttttagttgttttatttctacctgattgcaacatataatgtttgtgtattggttttgcactcgaattcctactgttggtttagtctgaaagctactattaaatatagtaaatattgtaattttattttgctgaagtttttcagtcatctcttgttgaatgaagctcattcattagtagatcttcatgagtggctcaggggtacataattgtctaagttatgtgtttgaagctgtttttctattatagtgttttatactgaaggacagcttg

SEQ ID NO: 8219 - DNA, 2300 bp, Homo sapien
tttgcagggacatggatggagttggaagccattatccttagcaagctaatgccagaacagaaaaccacacaccacatggtctttcttataaatgggagctaaatgatgagaacacctggacacatggtggtggggaacaacacacactggagcctgtcggtgggtgggaggtgggaggagggagagcatcaggaagaataactgatggttgctaggtttaatacctaggtaacgggatgatctgtgcagcaaaccaccatggcacacgtttacctatgtaacaaacatgcacatcctgcacatgtatcctagaacttaaagtaacagttgaagaaaaaaaaagaaaaaagcctacctcaaaagattacatggttctattcatgtaacattcttgaaatgtcagaattaaagaaatcaggaacacattaaggggaaggtagaagaagggaatgaggactggatagggtgtggaatgactgtgactgtaaaagggtaacaggagctggccatggtggtgcacctttagtccctgagtagctactcaggtggctaatgggggaggactgcttgagcctgagtacgacgaggttgtagtgtgctatgatcacacctgtgaatagccactggtacttcagcctgggcaacatagcataaccacatctctaaaaataaaaggagaagagaaagtaaaagggtaacagaagatctttatggacagtgttggaattgctctcagtgttgactatatcaatgtcaatatcctggttgtgatattatagtatagttttataagatgttaccttggggaaactgagtaaagcatacatgggatctctctgtattatttcttataactacatgtgatctgtaattacctcaaaacaaaatgtttaaataaaatattaaaaagttataaatcaagctgacaaatctaaataaaatacattttatcttcctacttaaatatactttcataaactcttacaaggccaactttagtttaaaattcttagacaacttgatcttgaactcctgatctcaggtgacctacccacctcggcctcccaaagtgctgggattacaggcatgagccaccgcgctcatccagaattcttagacagcttgaggggttcacagtaagacatggtgatgtggacggagctgggctctggcatccagccttcagcctgttcccctttctttcgatccctagctccatcctgtactacagggggtgtcatgtgaatgcatgcagacatcctggaccactcagctctattcagtcaccctctacaaacagctgccctttaggcctaggagtgtgaaatacacacacacacacacacacacacacacacacacacacacacaaaacacacacctccacaactgattatatttgtgtgtatagttgtataataatacttagttccttgggaagagaaaaccctattacttttcaactttagtgtatttggctttcatatgctttataggactgcattatatgtgaaaatagaggactacctgaatatacaaggttattagtgatgggtcagcagacatagggaaccaacaaatgcagatgctatgagcataggaaaacaattggaagtgaattctcatgtatttctgagtttaaggatgcccatctgctcagagtatctcttttggcttatggatattttcctatgattgttctgtcagttctgcatattttaccacctaaatttgatttttatcacttctttctctcattttactgaaactatttctaatatatacatagtgggtttcagtttttttaaaagtcttgcttaaatatatgaaattatatagtagatttagaaagtaaagtaactataacattgcagagttcagatattactgtttattttatttatttttcattttaaagggatttgtacttttttattaaagttttcatatttcaaatatcttgaatatgcttgattttgaatctcctttaagtgttttctttacctagttcttttttttttttagatgttcagaaaatcattggtaaagatgtttgaagataaaggattagactgcatttttttggaaactaatatgagcatgaagaaacagtatcacatggtttatgaatgtattcctcttcccaaggaagtgggtgacatggctcccatctattttaaggtgtttataagtagtctttgcatatacacttattttttgctatagtgctattttacaaatattgttgtctttattaacatatttttctcctatatacttacatcaaaatttatataaag

SEQ ID NO: 8220 - DNA, 2300 bp, Homo sapien
ggaaaagccaaattgttttatgcaaataatggtgttgtagctccttttgtgtgagaaaggaaaataattgttagaagttatcaattattgtaggctagtgaactaatgaaatatttgaatcctagcttgatgaggtacagtttgctgttgctgttgttgttgttgttattttactttcaaatatgtacaactcaaattaattctaccctagtgagtatctttgattattcacctcttttattggatatattaaaaaaagatttgacttagcacaaaatgttgttgccaaatgttgcaatgcaggagccacttctttcaagtggttttaaaaatcaccagtatctagtaatatttaaatgtaattttagacttcctatttaatagaaaatgcgaagatgttttagcatagcatacttgagtaatcacagatttcaaataagatccaaattgctggttttgtttaatatgtaatgaaacttggttccctctaaatttattgttatcatttttacaaattttcttgaacatatgctgtaggcaaacactgtaagcccatttaaaaaatatcccaagttggtaggtggggaaaaaggagggtcactgatgcttacatacagtgaacttcaatgtggagtgatatgtggggccatttcattaggaaatagccaatgttagtacctttaggtctttttcttggggctagccagaccttcaaaaagactctttcaacctcctgtcatctaagcccacttgccagtgttctgggagctgaatgggggaagaaggctggaggtggcagtgttgaacatgtacggacattaagtaacctttctgataacacccctgttttcagactgtaaactctcacctgtgtctggttttctagcccagctaccttgttttaccttttccagaggagaatcctgtagtgttctgatcatgaggaggggatctgtcatgttgattgcttttttaataggctttcctctaagtcatctgtttttagccacaccttcacctccacgtccataagtacttggtgctgccaactcctgagccttttgaaggttctgcagtgtagcatgggtttcctctttgctatccctgctaaccttctttctcctccccaaggtatgaaccaactttctagcatttaagtcagatcttatggagtgatctgatttgtcattgtgttttctctcatttcctttgttcaagtagcttctgccttttaaacaattgtttaaattcatttttgaggtgttactctgtggagagagtagagataaatgtgttctgttctgttgcataacatttaccttgggataacttgataactttatatttaaacatgttatattttaaaaacgactacatcatagcgttaatattccaaaatcagtcctatatagcgttaatagttttaagtactttaatttgaatgtcaaaattatgtattcatatgtacttgattttttcatactgtggtgatacaaaaggacctgcaacattgtgcagtatagtttccttaaactgattataagaaattgtagtctggatgcattgactaaatgaggaatgggcaattagatgaataatgataggttagaaatgtggaaagtagtggttacccaaagaatgaagtgtttttttactaggaatatgggaatttcatgtcatctccataacatgggaactctgcatctctcttaaatataaaacagttttgatttatcttatgatatggaactacaaaaactttccccattatttagttgttacataactttttaaaaaatgaatatttttgtatagcgtatttgttattgagtatggagaacatcatgcttgatgttgatcaaacgcaaattattccattaaactcatatttgtaaattaaaatattctatatatgtgtgtgtatagagagagggaaagagagaggagaagtacttaaatgtgtgtgtatcctccttggagctattagtatgaggtttatatattttataatacagaaccattcttgcaacactattttagtattttttcagtttttgtttataattcatgacattttgagtctgccttcttcactattctccagataaaatctagaacagtcatccaataattaagccagaaagggagtatgaacaaacatgaagtaaagatgtttgtgaggtaattttcggattatttaaacttttattattgttattgctgttgctttttatgtacatcttttcttctttgaaaaagtttgggttacaaatacatagttccactctgttaacgatttt

SEQ ID NO: 8221 - DNA, 2300 bp, Homo sapien
gtttgtgctaccaattatagagagtgaggtatttaaaatctgtgattacagttgggatttgtctgtttctttggcagttctatcaagttttttgttatgcattttgaaattctgttattaggtatataaactttaggattgttatgtcctcttaaaatttttcttttcaacttacataatctacagaatgttgtgtcctcttgatgttatgattcctttatcaggtgaccttttatcattcataatactatatgctatgaaatctgctttgtctgacatgaatagaactgctccatcttcaaatcatttaaaatgctaacatccaagcatctttttattgctttgtgtttgatgataacatgtagttttgttttttgttgttgttgttgttgcttttgtttgttttttttttttttgagacggagtttcgctcttgtcgcccagtctagagtgcagtggcgctatcttggctcactgcaacctccatctccctggttcaagcgattctcctgtctcagcctcctgagtagctgggattataggcatggaccaccacgcccggctacttttgtatttttagtaaagacggggtttcaccatgttggtcaggctggtctcaaactcctggacctcgtgatccgcctgccttggctgcccaaagtgcagggattacaggtgtgagccaccgcgcctggcctgttttgtttttaatacttagtactttaatacttccattacactaagtaatttacattacacttagtactttagtacttatattacacttagtagaatgcagtgtaatggaaaaaaaagacaagttaatgagtgtgatacagtgtagtcatcctgagactgacagcagtacaagtacacattggaggggcttgcaagatggaggaagtttctttgatggaaatgacagctaattcttaccatagtattgaaaaatgagtagaattaaacctcatgggttgacccaggaagacacttactacaactgatgagacagcctgtcaggaaataaggatgccaaggacagaataactgcagtcatgtgccaatgcagcaggtataaataagtgtaaatgtgctgtaattctttatgggtggctgagataatgacatctttgccttctgatagttcaatatacataaactttgtttcatgcacaaaattattaaaaatattatatacagttaccttagggctatgcatttaaggtacataggaaacataaatgaacttcattttagacttgcatcccatccccatgatactatatatatgcaaatattccaaaattggaaaaaattggaaatctaaaactcttctggtcccaagcatttggataagggatacgcaggcagtattgttacaaccattgtaaaatgaggaaataaggcatagagagagcacagagaaattaaataatatgttcaaggttatacacacaggagatagaactttaccatggtcattttgactgtggaatctaagctttaaaccattatgactttatgtatgtatgatttagttggctttcaagttcaagagtttgaacttcattctgtacacagtatagaactctcataactacctaaggaggtacataaaataagaaaataaaatttgtgtttttgtattttgaaagcatcaatctgtccatagttcatgttgggagagatatggagaaggtacctggagatgtggttaaaaaaaaaaaaaaagttccacattctatatagtgtatatgtgaatttttaaagttacaatttaaacctctctgtgattcagtttcctcatctattagttgaaaatgaaaatgctaatggtccccaccacataggagtataaaacatgaacaagtcatatagaattgtatatagtaaatattcagtaaactttagctgtggtgatgatgatgatagattgactctagaagatcaaacaaatattaatcatgttttttcttttcttttaaatgtattagttttatcatagaacttacagatacagatttaggataccacagtgcagtaaaatcttaatcactaccttctactctctattactgttattttggtttttcagtttatgggaaaaacagatggagactattacaccctggatgacatgtttgtctccaaagcagctgagagagaacgtcttggtgaagaggaagagaaccaaaggaaaaaagctattgctgagcatcggagtcttgctgcacaaatggaaaaatgtctgtattgttttgacagctctcaatttcccaagcatcttattgttgcaatag

SEQ ID NO: 8222 - DNA, 2300 bp, Homo sapien
gaaaatgactacagccaggttttaaaggggaagagtgggcgattagtcttgggtaggtgaaatgttggtattgtttcgtaatttcaacatatgtaatgtgtgtgtgtgggtatatatatattattcattcttttctctttggtatttccagcagtttttggagggagtaagtttcgtaagttgagataaatcttatagtagagatatgcatagaatttgaaaaggaccaaactgagctttggagttacagggaaagaaagagggcaggaacgatttcctaggaaaaacttgctttgtttgactatcattgaagaatggataaaaattaccaatatgatcctttctttatacagagatgattcttcctgaggcatttttggggctgggtattggggctacaggcattgcatattgaaggcgtggaggtctaactgttgcaaaagtcttaaggcagtagccatgggaatggtgaagggaaaagggattccaagtcatattgagctagggagcttagagagatgggagggcctggactcagtccctggattctctctgattggtaactcaaatcactggagattggaaatgcagaaggagagatttttgctttgttttgtttatttatttatttttttatttttttacactggagaagcaaatccctggcaaggaatagacattcattcatgagtggatatttttgtataaaaatgacagaggtttttgttttcctttttttgtgaaacccagttgggtcaattgccagtttgtcttttttttttctttggttgtaggctaaagccaattttgaaaaagaagaaaggcgtaaagaacttaagcgacttcggggtgaggatacatggatgctacctgatgtgaatgagagaattgaacagttctcacaggtgaatactaacaggtttacgtgatgtaaggatatctgtccttttttgcacgtattcaagttaatattggatgaataattttatagaatgttttcataagttacaaaatgaatatcacatagttggcattgctgaatagtttcatctctttggcagaggtaagatattgtaatattttggacattatgactcaagttttgttatttgagtttggctagtagaagacagcttcaaatttctggcccactatagcaagcttataggcctaaaaatttatgcattttaagctttatgtatttattttattttatttttttaggtctcaagcctgttttcctataatttttttaaaaattatttttaattgacaaataataattgtgtaaatttatgggttagagtgtgatggtttgatctatgtatacattatagaaagattcagtcaagctaatgaacatatccatcacctcatcaacttatttttttgtggtgagaacgttaaaagtctgttcttcaatggctttgaaatagataataccttattattaaatgtggtcatcagtaatagatcactaaaacttatttctagtgtcatgaaaactttgtaccctttgatcaacatcttccctttccctatccttgctccttcccctagcctcttcctataattttaatttgtgctatcttgttatattttttatggcctaatagtcttgtataaatttttggggagaccatagagggatattatatgtatgtgtgtttgtgtgtgtatagatgcatgtatacatgtttgtgtatatatgtgtttatttgattatatttgtcacattaatctacaaataaagccaaaattttcccagtatttttctggtaagaagtctcagttatatgatttattgatagtgcatatattatagaaggtgtgttaagatttcctgaaagattttatttatttagacatattcttggtcttatttcatcagagattgaaagttttttagaatgtggtttattttttttctctcagaatacatccttttaaattaagatgaaattaaattattttcttgcctgttcaaaatgattgtaggaacactctgtgaagaaaaagaagaaaaaagacaagcattcaaaaaaagcaaagaaagaaaagaaaaaaaagagcaagaaacagaaatatgaaaaaaacaatgagtcatctgatagctcatcagtaagtatgtactaaaattaatcaaagcagctatttgagaacattttatttgaatgtgtaacttatgggaagttaaaatacaagaaaacgtaaaaaatatattactagttatgatatgaaaatatctgggatacatctacttagagatgtccagaaaatattggaaatgttgatcttga

SEQ ID NO: 8223 - DNA, 2300 bp, Homo sapien
aaactgaactaggctttaggaaaagccatcatttttctaataaaaaatgaggccagcttagctaacaacgtttaccctttgtcctttctctttattcttgtttatcagatgccgtgaacagatgtgaaagaatatgataccctgcttgtgactacaaatactaaagtcacagactgcaacaaagcgaaaaaggataaactatttggctccttcagcaattgcaccaagcctggaccagttacttttaggctccttgttacgttatcctttatttgattaagccatgtgactggattcgcattaggtgtggccaaatgcaaacctagccaaaataacctgctttttctttcttttcttttcttttcttttttctattttaacatatctagttcccctctctaaccccaacttttttttgggcagttttatttgtattgcatggtatttacaaattaattgagaaatgattttttatgatgttttcttctttaagcacatagtatacctctccattcgttctagtctttttggggagcttatgcaagattttaaagttttcttcatataactttgcacattgctctagaccgaatgtttgtttccccaaaattcttatgttgaaatctaatccccaatgtgctggtatatggaggtagggactctgggaggtgattaggtcatgagagcagcaccctcatgaattcctataaaagaagttctagagagatccctctccctttccgccatatgagacacagcaaaaatactgccctctaggaaccaggacacaccttcactagacagcaaatagcccaacaccttgattttatccagcctccagaactgtaagacatacttgtttgttatttataagccatccattctataatattttgttatagcagcctgaactgattaaaacacacacgtttctaatataatcacagtttatttttattgaattgatgcaaaacagtgaaatggatgtttttctgaattccaagagaatctgaaaagacgttgatgctagttatgacaaatatcagtcaatgtagtcagttgattaaatattacaaggtcgattagtaaattacattttaaaataaaatgaatactttctattgcatatcaaacaagtaggcattgtgtgttcaagattcagactcatagaatggtagtgaatgtaaaaactcttggaaagcttcttgcaaacacacattaaattttatgaaacctgaagagaaagagtatttacctcaacctggcttatgttacttatttttagcgtctttaaggtatcgtttataattaattccccagccttcttcttcttgtaaatgtaagcttagtgtcttatgttctcaaagcacttcatcaccttagaatgtcttattcttctgaacttaaaagttttatgtttgggcgatacatgcgtaaaacaaaacaaagaaatctccgcagaaataaataagtaactgtccattgtaatgaaaaatgcttggatggataagtatgagtaaataatatggggtcagaggaaaaaatataatgtaaacttctaacaagttaagcacgggtaaattgtgaagtgcaatgcaaaattcacatgagtgtttcatatattaagtaaaatccaccaaaacaaaacactgaatcttcaaggcaattctgtccttcctgccagctgccactacctttctggcagcctccctttatcccattcctccagcacagggaaatgatgctctggcgacaaagggtacttccgcagaaaacttttgagaggtaccaacttaacttccaagagcttgtaacttactccggtgattttaagacgaaattggtgagaaagctgttaatatagtaaaaagtgcataataaatatatacgggtattaatcctgctcacaatcgcacccaacacctgaaagaattaaaccctccaacacccttcgggtctttaaaatctgggctgcggtaatccgagccctaagcgacctcagatgtgcgcatgccctgttggtggagccgtgctcctccttcctcgggtccggaagtcccggtttgtttgttaaattacgaccgtcgtaaactagaattttcttgcggcttcttagctttacgatggcaacaagtatggcggctgctagtggtagatttgaaagtgcgaagagtatcgaagagcggaaagaacagacccggaatgccagggccgaggtgttgcgccaggtacctctgttttggggcttttgtagttatttattgttgtgggagttgagggttcccgtaagctagcccact

SEQ ID NO: 8224 - DNA, 2300 bp, Homo sapien
ctctttataactctggggagggcagacaggaagagactagaataacagaaaagagtcaaactcaaaatctgagggattgcctatatttaattacggacagagtgagagaaactagtggaaaattctgaaagtaagtgatcagatcgtataaagagaattaaaagagaggtgcagaaaaaaagttttaaaagcttcagcaccttaaagcaggacaaatactgagatgaagtaattgaatttgatcagtaagagataagaggatattttacactgttatccagtttggtagacaccggccacttgtggctacttaagtttaattgaaactaaaatttaaacattcaaaattcatttccttagtcatactagccacatttgaaatgctcataagccacacgttaactagtgtctattatgttggacagctcaaactataaaatatttccatcattgcagaaagctctatggggatgtgtttttgaaagcatccagtagtgcagaagcagaattgcaatggggagatttcctgtgtgtcctcttatactcatgtagcttgcaatgtctggtggatttgacctctccagcttgcacttgcctcctcatttttactattaagttttggtctcaccctttctttcctagactattgcaatgcttgcctatctgcctcttctgttctttcatgtttgtaacctattctccacacaaatcattccgccactcaacagcactcttttttcactgccacttttcctggtcagccagctattttattgttagtccactgtggtgcactgcagataggggccattgtatcaacaacatgggaaggtgattcctcttcccctacacctttccctccctgcactcacatagctcataaaccaatgcaggtagaaggattatggtacatttatataacaaataacagagcaggaacaactgctaatcatcaccctctcctttgtcttttacttatgatctgttaccagctcttttttctttccctctgccactactgggcttgttaatatttcgttacttttcacttcatcagtcatcttctagtctctcctcccacttgccacaagaagctctggtcatatcatttcatttctctaaccttcctccctgcaactcccactctgcaggcctacagaattctgtcttgcttccttcaccattcttccacacatctttctattactctgtggtactcaccattcccctggcacattcatgcatattcacttccttccctcccgcccatgcaatgccatctttcagaccccaggatcctctcccatatctctgtgaaccctgaatatctgagacaggtctcagacaatttaggaaatttattttgccaaagttaaggacgcccgcccgtgacacagcctcaggaggtcctgatgatatgtgtccagggtggtcggggcacagcttggttttatacattttagggagacatgaggcatcaatcaatatatgtaagatgaacattggttccgtccagaaaggagggacaaattgaagcagaggcgggccaactcaaagtgaggagggggcttccaggtcgcacgtattacagctgagagacaaatggttgcattcttttgagtttctgatgagcctttccaaaggaggcaatcagatatgcatttatctcagtgagcagagggatgactcagagggatgactttgaatagaatgggaggcaggtttgcccaagcagttcctagcttgacttttccctttagcttagtgattttgtggcaccaagatttattttcctttctcacctctaataagattcaggaggaaatatgcacgaagaatagaaggtgccaggggacattgctgaaagaccaaagggcccaaacctgtttgaccttgtccatttggagagcaacagataaaaatatagctgcactaccaattattactactccccccaaaaagacaactgaattttcagtgtaacagacagcactttacaaagacacttggtcgaaaaagggtcactcccgggctctgggaggcgaagaggactgtgggagcgctgttcgttgtcccgcgggctcatgggaaatgtagtgcagttttctccaacatggccgcgcccaggggagatggcgtgcaagtatccgctgcggtgttctggtgctagagtggagaggctggcaaagaagaaggcacacgcatggtgagaatccggcctgagccgaagcggaggtgtgtggcacttcttactggcgggcatacgggcagcaaatcaccgcttcctcttttcagcctct

SEQ ID NO: 8225 - DNA, 2300 bp, Homo sapien
gtaagttccatgagggcaggaactttgtcttgtttgttcttattttcctaacatgtagaatggcgcctgcaaataacagttgctcagtaagtagttttacattgcttgaaccacagtgataggctgtgatgagtactgtgatagcagtatgcactggtgctatgagagcacagcattcactctgtcttgaggttcagggtaggcttcagagagaaggtgacatttgagcttgaagagtgagtagcacttcatgaaatagaatgagagagaatggtatttctttttttttttttttttttttgagaatggtatttcagaaagggtggaacaccatgaataaagcaatgtgttattaaaaaaatagtatgtttgggggataataaaaagtttatcttttgaattctgatacttaaatagtcaacagtatgcatgggaagtaaatttccttccatacaggcatacattacttcatgcaatagttgtgaaacaaggaccacagggagatgcaagcaaattacgtttaaaagactatggagtaaaattcttttgtcaggtggattaatctatccctaatgaatctctcccgagaagcttttccctccaaaggtctatctttttccaagacgtttattcagggaggtatccttcatatctccctgaaaagaaagaaaagtaaatagtggctaatgcttttaacaatgattaaaaaaatcagaaaggtcaaggctttaaggtcatttaatgtgaagaggaaataagataaatgttcagcatttaaggattatcactaacccaacttttcataaacacagaatagtggaggtggaacctgcagagacttttattcagggaacatccactgcgggacaggcagatgctttggtatccaggctgctccgcgccgccagctgcccaagtaatcctcacaacagcccgcagaggtaggtattaaccaccctttgttttacaggtgaggaaacagaggcacaagacggtcaggtaaccggcttggagtgatgaatgaaactaaaataagcgccgacctcgaagctcatttggtctttccccaaccccatgcggcctcattaaagagacttttttgattagctatggagaaaacgttcttcatcaaacatgaaatgcaatccggaaggcacaggtttctctctctctctctctctctctctctctctctctctctctctctctctctctctctctctctctctctctctctctctctctctctctctctctctctctctctctgtctgtatgaagtggcttctggggccccacgaagcaatgttcccccaaacagccccggacgagggtgtctataattcatcctgttataattaaccccggggttacggtattgcttctaaagcccttgttgaaatgcagatatggacctcgcaggattgacacgatctctcaattacacctaattaaagagctggctctttgagaatctgacccgactgggccaggagtgggaaaggcgggggctgccggttggggtgagggatagggttctgcagtcccgggaaggcaggtgaagggtggggatcaggattggaagagtcactgggtgctcggtgagacgagggaggttggagctgaactaaaacaaagtttgacttctggacaattatccagggagagggcggggaacacaccttgcccggactgtctgggaatcccattgacaggtcatctcaggttcaccatcttcctgtcgtgggctcctccagggaggccacccgggagcaattaaactgggccacaccagccacctcccacagcagcggggtccgcagatttaaccctttccccccagattccggcactgggtgccgcgctctctcccccagcaccgcgcccgcgcccccggctcccggactgggcatgctcagtagccgcccgcttcgtgctcccagggaagcctctgcacgccctcccccgctgctctcggtcgcctcctcgccgccagccgccccgggtgcatcccggcttgctccgctccacgcgacccagattcctgccccgcccccgccccttccgcgcccgcagccagtgcggcagccgcggccgcccctgtccagcctcggcgcccgggaccgagcgcgtcgctcgccgccgcggagcgcgtagccggagcgcctggggaaggcggagatgaagaccacgccgccgcgcgccgggagctgctgagcctaccgccgccagagtccaggtgattggcgaccccagaggagcctagggagtaggggcgaatgcccttggggaggagagag

SEQ ID NO: 8226 - DNA, 2300 bp, Homo sapien
aatagttgtgaaacaaggaccacagggagatgcaagcaaattacgtttaaaagactatggagtaaaattcttttgtcaggtggattaatctatccctaatgaatctctcccgagaagcttttccctccaaaggtctatctttttccaagacgtttattcagggaggtatccttcatatctccctgaaaagaaagaaaagtaaatagtggctaatgcttttaacaatgattaaaaaaatcagaaaggtcaaggctttaaggtcatttaatgtgaagaggaaataagataaatgttcagcatttaaggattatcactaacccaacttttcataaacacagaatagtggaggtggaacctgcagagacttttattcagggaacatccactgcgggacaggcagatgctttggtatccaggctgctccgcgccgccagctgcccaagtaatcctcacaacagcccgcagaggtaggtattaaccaccctttgttttacaggtgaggaaacagaggcacaagacggtcaggtaaccggcttggagtgatgaatgaaactaaaataagcgccgacctcgaagctcatttggtctttccccaaccccatgcggcctcattaaagagacttttttgattagctatggagaaaacgttcttcatcaaacatgaaatgcaatccggaaggcacaggtttctctctctctctctctctctctctctctctctctctctctctctctctctctctctctctctctctctctctctctctctctctctctctctctctctctctctctgtctgtatgaagtggcttctggggccccacgaagcaatgttcccccaaacagccccggacgagggtgtctataattcatcctgttataattaaccccggggttacggtattgcttctaaagcccttgttgaaatgcagatatggacctcgcaggattgacacgatctctcaattacacctaattaaagagctggctctttgagaatctgacccgactgggccaggagtgggaaaggcgggggctgccggttggggtgagggatagggttctgcagtcccgggaaggcaggtgaagggtggggatcaggattggaagagtcactgggtgctcggtgagacgagggaggttggagctgaactaaaacaaagtttgacttctggacaattatccagggagagggcggggaacacaccttgcccggactgtctgggaatcccattgacaggtcatctcaggttcaccatcttcctgtcgtgggctcctccagggaggccacccgggagcaattaaactgggccacaccagccacctcccacagcagcggggtccgcagatttaaccctttccccccagattccggcactgggtgccgcgctctctcccccagcaccgcgcccgcgcccccggctcccggactgggcatgctcagtagccgcccgcttcgtgctcccagggaagcctctgcacgccctcccccgctgctctcggtcgcctcctcgccgccagccgccccgggtgcatcccggcttgctccgctccacgcgacccagattcctgccccgcccccgccccttccgcgcccgcagccagtgcggcagccgcggccgcccctgtccagcctcggcgcccgggaccgagcgcgtcgctcgccgccgcggagcgcgtagccggagcgcctggggaaggcggagatgaagaccacgccgccgcgcgccgggagctgctgagcctaccgccgccagagtccaggtgattggcgaccccagaggagcctagggagtaggggcgaatgcccttggggaggagagaggtgcggcgaggacgcgaggcatcacgcaagctgcgctgtgcctgggaggcagcagaaatgctaagcatcgggggcagagagggaacgggaatgaaagtgcactctgccttggtgcaggggctccggggtcacccaggacagtgatttccccttctatcctgtcctcccaattaacacccgagaggctgcaggtcggcgcgagaggctgtttgcatctcggcccgggcgtaggtcgcctagcgacctaacgccgagggctcggggaagggatcccagacagagccaaaatggaaggcgggacaagggcggcctggctggggcgaggggctggtctgggtccctgggaaccccttgccttgtgggcttcggtctccagggaggagctaggcagccgggctgcggggccgccggactgtggggtcctccgcgcagcgagctgggaggagcggtcggctgggctgttgagctgcgcct

SEQ ID NO: 8227 - DNA, 2300 bp, Homo sapien
ttggagagctcttttggtgatacgttaacatttcgctattgtatttaacattttaaatattgtagagctaattcataatctgagatgtacaaaataaatgcttatcccataaacctaatatcaacacatgatatactacaaataatttgattccaaatgaattaagaaaaaaggttttcaagtttcagattcttttaccaaaaatatcctgggaatttgagattgtgcctatgcagcctcaaacggatgaataaaaagtaatgtaggccgggcacccggtggctcacacctataatcctagcactttgggaggctgaggcggttggatcacctgaggtcagaagctcaaggccagcctggccaacatggtgaagccccatctctactaaaaatacaaaaattagccaggcatagtggtgcatgcctgtaatcccagctacccaggaggctgaggcaggagaatcgctcgaacccgggaggcggaggttgcagtgagctgagatcacgccactgcactccagcctgggtgacaagagcaaaactccatctcaaaagaaaaaaaaagtaaagtaaagttttgtttttttcccctttgggtggtgagattaaaagtaatttaaaagttttaaatactttaatatattttcacatgtcctacaataaatatataacttttttaatttgacaaaaaataattttgagtggttacaaaaagggacaggtgtggcttggtaactagaaaaacattcccagcctgggaaacaatctagtgagagcttggaggcagaagacagaactctgattacattcaaggagtttgccagatggcaacagataactgccaatgttcggttgcactataattattatacactctctgtcacttcagcaagcgctcttttcacaagacaagtggtgacagaatgttgtattaagattacccgttgctaagcttatgttaaaatgaggaaatgaaatggaaagtcttgttttggtaatgtctctggggtatgaggaatggagggaaaggtttgactatgagcataactgcatagagaattttgtttgtttatgccttttgggaatgcattattttgattgaccctaattgggaattcagagggggagatttcctctattatctataaagaaaggatctgctgagcaaacacaattgctagggtcatgtttaaagtacttaattgatctgctttcaagtctaatttaacacttcaggggctccaaacatgtgatacattggttacaaactcatcttagtctaattttagttagtgttcatattagaaagttatataatacttttctttctttcagatatattctataattcacatttttcactaattttacccagttctccttccactcccaatctatccaaataactgagttgaactgtgtgagtttactgctctattaatttattgccagagatatacaaaccatgacttcctcggctgtttcagatgaaactgtagatccacgtgtaaacttgcaatgcacagcttagctggaaagttacgtggagcaggtgacggaggggatagctttcactgcttggactaaagtcagttttgaaagagctaaagatgcctattgaattctggagtgtgtgtgtgtgtgtatgggtgtgcatatgtgtgggtgtaaggcagcaaactcttcacatttcaaataactaaagatatgggtggtaaaatgaagtcacatttttacacctcacaggctgactagggagagcagtcaaatgcagcatcgattggttaaaattagtctatcattcttggtttatgatgttttaaagacatgttaaagttattcatgaagatgtaaaagacacatttaaaacccacatcaattgcactaaaagtcaactggaaacagaaggtttttaaatcctggtggtggcaaattggcagccaaaggaacaaagtcttagtcaacatatttccatgtcccccgaacacaaatagcctcgaaccttcggagggtgttcctttgagatgtttcatcagtgacatcacagtgattgccagcttccacggactactttaggcgctgcccagagtccaggagtccagacagcctgggaggggagaaggagttggagctcaagttggagacagcgaggagaaacctgccatagccagggtgtgtctttgatcctcttcaggtaactgcaggatttttatgcttagcatacggtgtgtgtgtgtgtacaagctgcaaatgagaaaggcagaggaatgtttgcatttcttaatgaaataggcaatgcc

SEQ ID NO: 8228 - DNA, 2300 bp, Homo sapien
ctctctttctctctttctttcttttttttttgagacagtcttactctgttgcccaggctgaagtgcagtggcacgattttggctcactgcaacctctgcctcccgggttcaagtggttctcctgccttagcctcccaagtagctgggattacaggcacacaccaaaacgccgggctaatttttgtagttttagtagagacgggatttcgccatgttggtcaggctggtctcgaactcctgacctcaggagtaatccgcccgcttcggtctcccaaagcactgggattacaggcgtcagccaccgcgcccggcctaggaaggtttcttaattgtcattactttccaggagcacagggctcaggtagaattcaacgttgtcaatatgcagggttaaatgagttgtttactttacaaaagtgacatcttaaatgtgcttctaatgtcctcttgtttcataatatgcttgtattataatacttaattagtctctacggatgaccacgttcttagtttcaaaggtttttttgaggttcctgcagctgctaaacttggggttcctgaagtaatatttcattttcgaaagctgttttttttcttagactcctcttacagaattgccagctcgtctgcacagcctgtctatttgaacctacgtttattttgacccaccccaacccccaaagcaggtggccaggaaaaaataaaaggtcccaacaccttttcttttgttttctggatctcctcctttccggaagcagggggtcagtgacaggaacttttcgaccccagcttagtgtctcttaatccctctttagcccgtggaagcctcggaaggcgtggccagggcagggcatccaagccgagcgccgggggttggcaccgtctctctccctggcacggcggagacaactgaatactgaaagacaaaaccaacacaccgcgaggaatgagccacgcctccatccacgccacaaaggcacgtttccaagatctttttaggatcttacccatgttttgcagggaaaagcgacacagacctgaagcgccttcaggttttttttttttttttttttttttttaagacgacgtctccctctgttgcccaggctggagtgcaaaggcgcgatcttggctcacaaccgccgcctcctgggttcaagcgattctcctgcctcagcctctcgagtagctgggactacaggcacccgtcaccacgcccggctaatttttgtatttttagtagagacggggtttcaccatatttcccagtctggtctcgaactcctgacctcaggtgatccacccgtctcggcctcccaaagcgttgggattacaggtgtgagccaacgcgccctgccagccttcagttattttaatgaagcgattttgtacaaatcagccagagggagggagagtgggagggaagaggaggggtcagccagtccttccagttaggagagtcccggctcactcactgcttctaactcactgctcactcaccgcttcttagcttaggaatcacctacaataacctcgtgtcactgtatcttgtgatttcaaacaaggaaccctaaaaacctgaaggcacactgggtgccgctcaacaataaggctcggctgccaagacgaaaaaaaaattgccctttctcctcctgccaccctggaggtgccaggttgtaatctgcaaatgtattgtctggcccttagggcttgacagttaatgattggtcgctgaaggagccgagcggaggagcgagagggacgcgagcaagcgagcgagggagggagcgcagggccagagcggagccccagccggccgcacaggcaccgcctcccgtcttccgggacccggcacttcgggggttttgggcgccggagacgcgcaagggcgccgatggaggcagactcgccagcgggccccggcgccccagagcccctcgcggagggagcggcggccgagttctccagcctgctgcgcaggataaaaggcaaactcttcacctggtgagtggaaggggcgtgctgcagctccgctggggcgtgggggcggctgcgggccctgcgcgcacgtggacaaggagcacactctctgaggcccccagcagggaggcagaggtggcggccgcacggacttcggttcggggctcaacacgcacaccaggtatggtgcgcttcacctggcgtcgggaagcacttggtgcgtctccctcggctcccgtttcgaaatcgtggcgatgtattttggaggatttggggggaaacccaccctgtggcactattaggtcggtcctctggggcgt

SEQ ID NO: 8229 - DNA, 2300 bp, Homo sapien
ggaggtgactactgtatatattgcaaataaaaaatcaaatttggttaaggagagactttatttgtagggattattgcaaatggggatgggtggggactgtggggaagggttcctgcagtaggagggggcctattccctactggtgggaagtggaatgaaaaggtggctctccactggataatagattagagaatgtttcaccctgaggccaacttctcaggaggggctattaaggaggggttacctgcggctcagggtcagggtgggtgaaagttcagaggtatgagggaggaagagaaattcaaccaaaatctttgattaaaaaaaaaaaggtgggaggcttcttttcttttctctttctttctttctctctttctctctttctttcttttttttttgagacagtcttactctgttgcccaggctgaagtgcagtggcacgattttggctcactgcaacctctgcctcccgggttcaagtggttctcctgccttagcctcccaagtagctgggattacaggcacacaccaaaacgccgggctaatttttgtagttttagtagagacgggatttcgccatgttggtcaggctggtctcgaactcctgacctcaggagtaatccgcccgcttcggtctcccaaagcactgggattacaggcgtcagccaccgcgcccggcctaggaaggtttcttaattgtcattactttccaggagcacagggctcaggtagaattcaacgttgtcaatatgcagggttaaatgagttgtttactttacaaaagtgacatcttaaatgtgcttctaatgtcctcttgtttcataatatgcttgtattataatacttaattagtctctacggatgaccacgttcttagtttcaaaggtttttttgaggttcctgcagctgctaaacttggggttcctgaagtaatatttcattttcgaaagctgttttttttcttagactcctcttacagaattgccagctcgtctgcacagcctgtctatttgaacctacgtttattttgacccaccccaacccccaaagcaggtggccaggaaaaaataaaaggtcccaacaccttttcttttgttttctggatctcctcctttccggaagcagggggtcagtgacaggaacttttcgaccccagcttagtgtctcttaatccctctttagcccgtggaagcctcggaaggcgtggccagggcagggcatccaagccgagcgccgggggttggcaccgtctctctccctggcacggcggagacaactgaatactgaaagacaaaaccaacacaccgcgaggaatgagccacgcctccatccacgccacaaaggcacgtttccaagatctttttaggatcttacccatgttttgcagggaaaagcgacacagacctgaagcgccttcaggttttttttttttttttttttttttttaagacgacgtctccctctgttgcccaggctggagtgcaaaggcgcgatcttggctcacaaccgccgcctcctgggttcaagcgattctcctgcctcagcctctcgagtagctgggactacaggcacccgtcaccacgcccggctaatttttgtatttttagtagagacggggtttcaccatatttcccagtctggtctcgaactcctgacctcaggtgatccacccgtctcggcctcccaaagcgttgggattacaggtgtgagccaacgcgccctgccagccttcagttattttaatgaagcgattttgtacaaatcagccagagggagggagagtgggagggaagaggaggggtcagccagtccttccagttaggagagtcccggctcactcactgcttctaactcactgctcactcaccgcttcttagcttaggaatcacctacaataacctcgtgtcactgtatcttgtgatttcaaacaaggaaccctaaaaacctgaaggcacactgggtgccgctcaacaataaggctcggctgccaagacgaaaaaaaaattgccctttctcctcctgccaccctggaggtgccaggttgtaatctgcaaatgtattgtctggcccttagggcttgacagttaatgattggtcgctgaaggagccgagcggaggagcgagagggacgcgagcaagcgagcgagggagggagcgcagggccagagcggagccccagccggccgcacaggcaccgcctcccgtcttccgggacccggcacttcgggggttttgggcgccggagacgcgcaagggcgccgatggaggcagactcgccagcgggccccggcgccccagag

SEQ ID NO: 8230 - DNA, 2300 bp, Homo sapien
gctttgtcgtccaggctggagtgcagtggcaccatctcagctcactgcaacttctgccccccaggttcaagcgattctcctgcctcagcctcccgagtagctgggattacaggcgcctgccaccgtgcgtggctaatttttgtatttttagtagagaggaggtttcatcatcttggccaggctggtcttgaactcctgaccttgtgatccacacacctcggcctcccaaagtgctgggattacaggcatgaactactgcacccggccatttttgtagttttaataaagacgaagtttcgccatgttggccaggctggtctcgaactcctgacctcaggcgatctgcccgcctcgtcctcccaaagtgctgggattacaggcgtgagccactgcgaccggcctaaacacacacttttatttatttatttattttctttgagatggagtttcgctcttgttgcccaggctggagtgcaatggcacgatctcagctcatcacaacctctgcctcccgggttcaagcaattctcctgcctcagcctcccgagtggctgagattacaggcatgcaccactacgcccggctaattttgtatttttagtagagacggggtttctccatgttgaggctggtctcgaactcctgactcaggtgatccacccgcctcagcctcccaaagtgctgggattacaggcgtgagccaccgcgcccggcctaacacacacttttaaactgtttcactttttaaagataaaccttgacgtcactattactcaatttgaggaaaggcacaagaaagtagtaagatctcaccagaatttaagttctgctttgtttacttacatcattaatcagacatgagctaagagaccacctgttcgcttttttctgacttaaacaatggagaccaaggagagctgaaaatttcatgagcttctcaacatttccccggcttttttttttttttttttttttgccactgtccccagggttggagggccccagagggtatggggatgatacttggcgtttctcactcttctgtggtactcatagcagtgaagaacagacagtggcagcacgcagcaacagccagagcccttgctagaagcacccagaactggctgtgcaaatttatttcaatcctgcccaaaactccttcaccttaaaatgccttggaggtggctctcatcaagacaagaaagcagggtgtggtggctcacacctgtaatcccagcactgggaggctgagcctggaggatcacttgaggtcaggagttcgagaccagcctgggcaacacagcaagaccccatctctacaaaaagttagaaaattagcgggatgtggtggcccccgcctgtagtcccagctactcaggaggctgaggtggatggatcgcttgaacctaggagtttgagaccagcctaagcaacatagcgagaccacatctctaaaaaaaaaatttttttttaacccagaagaaaattagccaggtgtgatggctcacacccgtggtccccgctgcttgggaggctgaggtgggcagatcgcttgaggctgcaatgagccgagatctcaccacatcaatccagcctgggggacaaaaaaaaaagaggaatcaaagcaatgacccaagttatggcctcagggacttccaaaatcagagccctaatctgaccaacccgccctgacgcctgtaagaaaacgactctcacttttcattggctgaccctcccggagttgagaccttgcttcattttccttggttgttgctgctgtcacgtcttcccgccacgcccactttcctgccggcgcccagtgagcgttgagggagagtgatttgcagccggtcaggggcgggagttcgcggcagcaaacctgcttccccctcccacgcgccaccgcccccgccccgcccccgtccagaggccccgcccctagccgggcctggccccgcctctctctcccgagagggcgggcaccaggcggcggccgcagccgcaggaatatgctggaaggcggcgggcgggcgcccgcgaggtgctgaaaggacagttcccgccgccgaacttagcccgcgggtggggcggcccgggagccagcggggcacgtgagcgatggagaccatctggatctaccagttccgcctcatcgtgatcggggactccaccgtgggcaagtcctgcctcctgcaccgcttcacccagggccgcttccccgggctgcgctcccccgcctgcgaccccaccgtcggcgtggacttcttctcccgcctgctggagatcgagccgggcaagag

SEQ ID NO: 8231 - DNA, 2300 bp, Homo sapien
aagtttacctctgattgagatcacatgtgaaggaattggcaatcaacttagaatggtaaaactggaaggaatgttagagatcacgacgactttcattttacagatgaggaatcaaacatttgaaaaattattttaataaaaggaggcttcttgaaaaggaaaaacatttttcatggaattctacgtgttgtacaaatccaatcaataatcttttaacacctctctgaagcgctggccttaccatctttccacttcacacacacgaaaactaaggtataagcaagctaagcagttcactcattatctctatgaatcagcatcattgctaggaacggaagccaaaactttgaatgttggaccattctcacagatgtaggctgatctcattcgcagtgatgctggctgggggcgaggggaagccatgtttgggaagtcccctcatggaacactgcatttcacaagcagagtacttgctgactaacgcaaaatgcttccttaaatgagttccaatggataatgcagtctttaagaaacagaacagtacaatacatcagtttcaccatcttcctctaaaacgaagtgcctttgaatcctagacatttaaaatttgctttaaacctgcttccatctcaaatattcaggaaatgcatataatttcatttactttttatttacacaagtcgcctttgtgaaacccttcatgtccccagcggatatttaggaggagactattcatttggatccctccttctgtctttagaaatattatcaccctggaacgttaagtactgatcataagcaaaattaaagttcctggcgaatctcaatatatgtctttttcccaccaaacatgacaaacttctaaagacaactcaacccttcacatacacacacacacacacacacaccctcagctgtgccagtgtccctgatgttgcatctagttaacctacaagacccattcccacgggtcatgacccagtatttctgatgaccacattcagtgctgtgaggtgcccaaaccattaccgcatccacctctctgtgaaccatgcccagtgagctcatgcaggaacctgggttggagcgctccttgctgtgaagctaaaggatccatcacgaatctgggaaccctccctcgcggttctccccggccacacagcgtgggagccgctgggttagggtaggaaaaggggcgcctgcttggaggagggtggtcgggtcatgctgtgcgcagccagggaagccgagtttgggaagaaggcagccggggagccggaggggataaaaatacccacaggggctgaaagagttggggaagagggggcggcgaggacgaccccggttcaggcgggaaaggaaagatggaaagggggcgcaggaaatgggcgccaaagaaagaagtgagaaattgcggaggaggaagtcgtccctggaagaggaggggcaaaggggaagcgagaatggagtgtttgcactttcgagagggaagggccagagcctctcccgaccagggccggcggggcggacgcctggggaaggggcgtccgggcgggctgagggggcggcgcggtgcccaaggtccccggggtccctacctgaaccgctcctgtcccgccgtgtcccagagctgtagcttgatcctcttgcccggctcgatctccagcaggcgggagaagaagtccacgccgacggtggggtcgcaggcgggggagcgcagcccggggaagcggccctgggtgaagcggtgcaggaggcaggacttgcccacggtggagtccccgatcacgatgaggcggaactggtagatccagatggtctccatcgctcacgtgccccgctggctcccgggccgccccacccgcgggctaagttcggcggcgggaactgtcctttcagcacctcgcgggcgcccgcccgccgccttccagcatattcctgcggctgcggccgccgcctggtgcccgccctctcgggagagagaggcggggccaggcccggctaggggcggggcctctggacgggggcggggcgggggcggtggcgcgtgggagggggaagcaggtttgctgccgcgaactcccgcccctgaccggctgcaaatcactctccctcaacgctcactgggcgccggcaggaaagtgggcgtggcgggaagacgtgacagcagcaacaaccaaggaaaatgaagcaaggtctcaactccgggagggtcagccaatgaaaagtgagagtcgttttcttacaggcgtcagggcgggttggtcagattagggctctgattttggaagtccctgagg

SEQ ID NO: 8232 - DNA, 2300 bp, Homo sapien
atacttgccatatatatatatatatatatatatatatatacatactttttttttttttttgagacagagtttcactcttgttgtccaggctgaagtgcagtggcgcaatcttggctcactgcaacctctgcctcctgggttcaagctattctcctgcctcagccccctgagtaggtgggattataggtgcccgccaccactcccggctaattttttgtatttttagtagagacaaggtttcaccatgttggccaggctggtcttgaacccttgatctcaggtgatccacctgcctcggcctcccaaagtgcagggattacaggcgtgagccaccacgccaggcccgctttatcagtgtttctacccaaccatcagttcatcttattttttgatacatttccaagtaaattataaatatagattcacttactcctaaattcttcagtatgggtagcattaaacttcaaattttgttaactattttctctttgaattaaatgcacattttttaaaaattttattattttttatagcgatagctactttgcacaggctggtctcgaacccctgggctcaagtgatctgcctgccttcgcctcccaaagtgctgggcttacaggattgcaccactgtgcttggctgaaatgcataaatcttaagggtatactggctgagttttgacaagtgcatacacctgaataactgaagtccctaccacaatatagaacattacatcaccccagaaagtcgaaggaagactacttttgattgtattatttttagcaccttctgaattttgtattatgtgcctgcgctatttttaagaaataaatatttaagcattttaaatatttaaacatttttataacagtgggccgattctaaattggatgagaaagagtgaaaacaggagatggcagataacaggtggggtcaatggaatggagaacttattgaagtcagagttgtagcagtggtgtttccagaacaagtgagttaggaaaattggaatgcttcggttgacagtaggacgctgaaatcaagctctcaaaagttgtcttaaggttcagttaagcataagcaaagggtggcttgggtagatggagattaggatactagtttcctttcccttcctacgctctcaagtgcacactgtatttttttgtttgtagtttttttttgttttttttgttttttttttgagacaagagtctcgctctgtcgtccaggctggagtgcaatagcgcgatctcggctcactgcaatctccaccttcagggttcaagcgattctcctgcttcagcctcccgagtagctgggattacaggtgcccgccaccatgcccggctaatttgtgtatttttagtagagacaggggttcaccatgttggccaggctggtcgcggactcctgaccgcaggtgtctcggcctcccaaagtgccgattataggcgtgagccacggggccctatagggattataggcgtgagccactgcgcccggcctctttgcaatatttatcacaactcccactaagtaatatttgacttgtgtagccatccttaacatttggctaccttattaggccataaactccaaacgagcaggggtcttctcttttatttaatcctgtatttcctgtgcctagtatatacaagtgctcaaacaagtattaactacttgattggattctttaagtaggcccatccctcttctcttagtccagagctcttacttatttctacgcattatggccgtatgaaggctgtttgtaaacctgcaaaatacaataccaggtatcctgcaggttccacatgtaaattatattatctcattggccagtggtgtgtggtctgaaggggtaaaacccggaggcttatggtttaggatcttctaggataatgtgccttcagaaaatcgaagattaatattcattctctaaacaatctttttttttttttttcaaacttttttgtaatgacgagggtgttgaactggcctcaagtgatcctcccccttcggcctcccaaagcactgaacaatattttatctaagtgccaagcattcctgaatagaaatattaagagtcatcacgcttgtgcagtcaacacatatttactgggcgcattctatgcacgagttattgaagacagctgttgtaagcatttcaggacaatgcacctcccttaacaccgagtccgggatttggggcggggtgccggaaaacgccaggtcccgccagcagagggcacggtcccggcctcgctgcagcctcgggacccaccgaggcttccaggctc

SEQ ID NO: 8233 - DNA, 2300 bp, Homo sapien
ttaagggtatactggctgagttttgacaagtgcatacacctgaataactgaagtccctaccacaatatagaacattacatcaccccagaaagtcgaaggaagactacttttgattgtattatttttagcaccttctgaattttgtattatgtgcctgcgctatttttaagaaataaatatttaagcattttaaatatttaaacatttttataacagtgggccgattctaaattggatgagaaagagtgaaaacaggagatggcagataacaggtggggtcaatggaatggagaacttattgaagtcagagttgtagcagtggtgtttccagaacaagtgagttaggaaaattggaatgcttcggttgacagtaggacgctgaaatcaagctctcaaaagttgtcttaaggttcagttaagcataagcaaagggtggcttgggtagatggagattaggatactagtttcctttcccttcctacgctctcaagtgcacactgtatttttttgtttgtagtttttttttgttttttttgttttttttttgagacaagagtctcgctctgtcgtccaggctggagtgcaatagcgcgatctcggctcactgcaatctccaccttcagggttcaagcgattctcctgcttcagcctcccgagtagctgggattacaggtgcccgccaccatgcccggctaatttgtgtatttttagtagagacaggggttcaccatgttggccaggctggtcgcggactcctgaccgcaggtgtctcggcctcccaaagtgccgattataggcgtgagccacggggccctatagggattataggcgtgagccactgcgcccggcctctttgcaatatttatcacaactcccactaagtaatatttgacttgtgtagccatccttaacatttggctaccttattaggccataaactccaaacgagcaggggtcttctcttttatttaatcctgtatttcctgtgcctagtatatacaagtgctcaaacaagtattaactacttgattggattctttaagtaggcccatccctcttctcttagtccagagctcttacttatttctacgcattatggccgtatgaaggctgtttgtaaacctgcaaaatacaataccaggtatcctgcaggttccacatgtaaattatattatctcattggccagtggtgtgtggtctgaaggggtaaaacccggaggcttatggtttaggatcttctaggataatgtgccttcagaaaatcgaagattaatattcattctctaaacaatctttttttttttttttcaaacttttttgtaatgacgagggtgttgaactggcctcaagtgatcctcccccttcggcctcccaaagcactgaacaatattttatctaagtgccaagcattcctgaatagaaatattaagagtcatcacgcttgtgcagtcaacacatatttactgggcgcattctatgcacgagttattgaagacagctgttgtaagcatttcaggacaatgcacctcccttaacaccgagtccgggatttggggcggggtgccggaaaacgccaggtcccgccagcagagggcacggtcccggcctcgctgcagcctcgggacccaccgaggcttccaggctcccacgctcgctcccgagcgcgtccccgccctcgcgtcacgtgacgtggccgcggaacctgagctgcggggcctaagccgagctaaattcgttgcaggtggccgcggcgggtgcaaccacaaaggctaatccgaaggagtcggggaggctcgtggagtcgatgcttcctcttccaagtcaggtcggctcccgttaccttctcagcattcgccgttccggtcttcctgagcgcgtgcatgaggtctttcgcgtggggaagctccggtgaccatgtaggggagaagagtgaggaagctcctggtgcttgggacgaggtcagcgctgtcggcgcgctgctccagcgcccaccacaccctggtgcgggccgacgggccctgggccctggtgggagctccggcctccggtcaaggcctggccgggagcgccacgaattctcgcgtcgtctcgcgagagtccaagttaaagaacatggcgacgtctaatctgttaaaggtaagaccctcactccagcttgggttttactgtgtggccgccgggttcggctctttgggaaaggcacggctcaggttcagctgcgaagtgtgggagtgttcaggggttgtccactggcagggaagccgcggtggcagccggcgagtaccggaacgcgggtctgt

SEQ ID NO: 8234 - DNA, 2300 bp, Homo sapien
gacttcaaatgatccactcacctgggcctcccaaagtgctgtgattacaggcgtgagcgaccacgcccagcctaaccagtcatcttttactgtgtgataccctagtcatcagctttggcctctcacaactggtaatctctatgaggccagacctttagttttctgagtcatttctttaacaattcaactttttcagttagaaatatctgtttctctctctctctctctctctcacacacacacacacacaaagtttaaacactgacatacaatgtaatgacttcctttcaataattctcgaagcagcccagtatgaaaaatatttgtctttggcctctggtagaagggaaaggtgtgagtgtgacattccaaggaaggaggtaggccttggtgagctgttgaatagagaggttcttcggtgcaggaatcacaggggactttaagggacaaacctggagtgatggggaaattaaagacagggtgctatattaaaaaattaccctggccgcgtgcagtggctcacgcctgtaatcccagtactttgggaggcctagtgggggcggattgcgtgagctcaggagtttgagaccagcctctgggcaacatggtgaaaacccgtctctactaaaatacaaaagattagccaggcttggcagcgtgcgcctgtaatcccagctactcgtgaggctgaggcgaactcaggaggcagaggttgcagtgagtcaagatcgcgcctgggtgacaagtgcgagactgtctcaaaaaaaaaaattacccccaaacagacctatttaggtggcttatgcctataatatctgtgctttgggaggccaaggccagaagatctcttaaggccaggagtttgagaccagcctgggcaacatagcaagaccccttctctatataaaataaaaattaaaaaaattagcatggtggagcatgcctgtagtcctagctacgtagctacttgggaagcagagacaggaggatcccctagctacttgggaggcagagacaggaggatcccctgagaccaggagtttgaggctgcagtgagatatgattgcaccactgtactccagactgggtgacaagagcgagaccctatcttaaaaaaaaaaaatactccaaaacataatggcctaaaataacaaccatttgttttctctcgtttctgtggaccatgaattcagacagcatggtgggtatggcttgtctctgctccatgatgtctggggtctcagctggagtggttgaaggttggggactggaatcacctgaggcctttttacccatatttgtatctggactgagcctggaatttgattgcttcaaaatattttcacggctgggtgtgatggctcacgcctgtaatcccagcactttgagaggctgagtctggccgtctgcttgagcccaggagtcagcaaccagcctaggcaacatagggagacctagtctctacaaaaaaaaaaaaatacaacaatttgctgggcgtggtcgcctgcgcctgtaatcccagcactttgggaggccgaggagggaggctcacttgagtccaggagttcaagaccagtctggccaacatggtgaaaccccgtctccacaaaaaatacaaaaattatctggttgtggaggctttcgcctgtagtctcagctactgggatggctggggagggaggatcgcttgagccctgatggtcgagattacagtgagctgtggtcacgtcactgcactccagcttgggtgacagagtgagaccttgtctcaaaaaaaaaaaaaaaaatcctaaaatattttcatgagtttgtgctgggtaggcctaagggaaacatgctcagtaaatcgaaaaatctcggattacacataaaccaccggccccggcaggttagacttggtggacacgggagccagcagcgtgtcaggtgctcgttgaccccagcgccagtgtctccatccacgtccttcactcgtcaacctttcctggcccaggctgcggtgtcccagcgccaggctccgccccgcccttggctgccggccaatcgccgccgactgagaggcgactattggaggaagcgggatgggcggtgcccgcgccgggccgctaggggtgcggggttggggaggaggccgctagtctacgcctgtggagccgatactcagccctctgcgaccatggctgtgctggcggcacttctgcgcagcggcgcccgcagccgcagccccctgctccggaggctggtgcaggtgagcggggttcgtccccacagcactcagacccgggatgcgaggagtcccc

SEQ ID NO: 8235 - DNA, 2300 bp, Homo sapien
gagcccagatcgcgccactgcacgccagcttgggggacagagtgagactccgtctcaaaaaaaaaaaaaaaaaaaaaaaagtataaaatggcaaaatgaaggttatttaagcttaaatgaaatattaaatgcatgatataatttgtagttatattggcagaagaaatgttgtagtttatagtaacatgctctattaagttctgcagttgtgtttgagtatcggtttttcaaaagtgacttatattggttttaggcttacctatttctactccatgtaccaccataaacaaagtttgtgcttcaggaatgaaagccatcatgatggcctctcaaagtcttatgtgtggacatcaggtaagaaacaccgtccttcccatttattaatcagagtaatacctagggctaaaagacacaaaaatctaggcatattcatattttagaaatgagattctttctcataagttagtatgttttctcacatgctcaagagtgtctggatttgctaagtccatttgaagtatggtcaaaatgatagcgtaggctgggtatcatgtctgtaagcactttggaaggtcgaggcaggaggatcccaggagtttgagaccagcgtaggcaacatagcaagcgagactctgctctttgaaaaaaaaaaaagcctaagtgtcttgtgttacaaagttgtttttaggcccaggcacagtggctcactcctataatcccagcactttgggaggctgaggctgggggcagatcacatggtgaaaccccgtctctactaaaaatacaaaaattagctgggcgtggtggcaggtgcctgtaattccagctactcgggaagctgaggcacaagagtcacttgcatctgggaggcagagattgcagtgagctgagattgtaccactgcactccaacctgggagatagagcaagactctcaaaaaaaaaaaattgtttttagtcaaggcatttgggtctttctctgaggctgggtgactaaaaattcataaatactgtatttgccagaataagacaggttttcattataaaggagaacacggtgcttaaccctgggaatcaaatcattgcttgagcccaggcttgatgactaatttgtagtcattaagttaagttctacaggctttctaattagccttgctgatctatatcttgtctttacttgagatcaagcaagagacaggctccttagcaaaaatatgctgtcatgtcaggaggtgagacctggacacacagaagaatcaagattctctcagatctgagcccttcatttttcagatgaagatttttttcagtgtgtctgagacagccacagagttacagggctgagcatctgccatgtgacagtcattggaaatagagtggtgaacaaaacatttaaaaaaatctgtacatgtgcaggtctctgttggaaaaatgcctaaaagaaatgctgagtcaggatttgaacattttggtatttgcaaatgctttccataaaagttgtaccagttagactttccaaaaattgtgtgacttgtctggatctgcaccaccactgggtggtaccaaacccttgtcaaactggtaggtgaaaaacggtcaccagatttagtttcagaactgtttgtcatggaaagttttgtcttaattgaagtattgtggttctctagcaaatgccatttgtactatattgaaatactttcatttaatattattttattcatttgtggatatatacagtgacttataggcattcttggaagtgctttgttttgaatatttatgaccttagaaaacagtcagttttactttataatgaagaattgataccttattttctgtcacttattattgccatcacccccagtaaaaagtacaagtgaataaaacttagatgagaactgattaagaatttctctatttcggaataggcaaaatatttatgtttctttggtatagagcttgcttgtctgtatgcctgattaaagactgtaagaagatattattggctttatgtttacattaatgttttatattaaactgtttttaactagcccttataatgcaagtgatttttttttgttgacttgtaaagtagtaacaagttgattaatatttattaaacttatatatgccagttgccaaggatgtaaaaatatgacagggtgtctggcctcaaaggagcatagtctagtgggaagacttgacatgtaaacatataataatattaaaagcattgcatagtaattggggaacacaaaggaggagaaactgtttcaagaaaggatagaaataaatggtcaa

SEQ ID NO: 8236 - DNA, 2300 bp, Homo sapien
tgtctaatgtctagtggggtccagaaaagtgtttttttgtgtgtatgtttaagaatttaaaaaaaacctaattatctgaacactaaggggagaaaacttaacttctctatgttcagcaattggcacagtgtttggaacatactaggcacccaaagatttgctagaaaaaaaacattatgaagggaccaataacaagaggagctgaagatggcgagggggtactgataggaaaagaatcatgagtaaataataaacctcatatgagaaagatatacacgatatgtatctatttaagatgtaaaatgataaacgacaaaagtaagagcattaggcatggggaggcttttttgtattgtatactcctgcccatctgaaatttttagtaagaatagaattatctcaactttcagactaaaaggtatagtgtgaaagcttcagggagatttgtaacaacagtaaataaaatgaattgcgaggacaactgtctgggaagccatgacagaagtccaaaagagaagtaatggcaggcacattgcgggattggtggcagtgaaaatggaatgtgaatgacaaagatttttaagataagaaaaccatggctggcgttttttgtccattaaatgaaaagcaggaagtcagcagagtagctggtttgtggagaaagaatactcacacatcgatgtgaattatttcaattagaaaatgatactgctttcttagggctttcttaactaggggtgattctgccctccaggggacatactagcaatatctagagacattttcactgatcacaactgggtaagggtagggtggggaacgggtgtcctactgtaatctagtgaatagaagccaggaatgctgctaaacatcctacaatgtttgagcacaggatagctccccacaataaagaattatgaggcccaaaatgttaacagtactgaggctgagaaaccatgtttaagactatagttaccgaaactcaactagattaccaaactgccaaaactcagaattcttaagcaaaagattaatcagacattaacaaaacattaaacttgtcattaagtttcttcaaaaatggatggtggaaccatttccgtttaacgtttcctgcaaaatgtgcttatcaagagccctgcgcaaataacatttttgtggacagcgctgggcatttaaaagaggcacaagacaaatgggttttccgaacaataaaataatagtagtaatggctgtgaatactatgggaggtttcatcacagatgcttgccatttacttttagggacgtcgcatacgacgtccgtaaattactggctcgggttttgagctttacctggctctcgtcccctgtagtacaatcctctttattctttcaggggacaaacaacaacaaaacccgtctctcacacagacaatacaccctgacagacaagtgacccacaaacaatccctcctcaaatgaaggtaaaactagggctagaaaacgttcaactaatttaaggcaattaaccctctgaaatttttcgctgatcaaaggaacaggaattgctgttttaaaatatgcaactggcatttcacacctctacactggacgacgtattgcgtggaggatggagaaggaagatcacccctactcccaaattcgtagttataagggcgggttattagaagggcgccaggaaggtctctctacaaagatggggggccggggaactccctatttgccctattttggtcccaacactgaaccaaggaaattgcgcccaaggttgaagcacacgcaatccgtccgtcatgcagacaaatgctctttcaggggtcctaattaagtgtggaggcctgactttccttccgaatccgccccaggtgttccaccccgagcttcccctcgggcttcccctcgccacgcagcctctgaagagaggagcatctacatacaaagaggcttaaactgcccagaacctccgaatgacgaagaatcaccgccagtctcaactcgtaagctgggaggcaaaaccccaaagcttccctaccaagggaaaacctttggcctcaaaggtccttctgtccagcatagccgggtccaataaccctccatcccgcgtccgcgcttacccaatacaagccgggctacgtccgagggtaacaacatgatcaaaaccacagcaggaaccacaataaggaacaagactcaggttaaagcaaacacagcgacagctcctgcgccgcatctcctggttccagtggcggcactgaactcgcggcaatttgtcccgcctctttcgcttcacggcagcca

SEQ ID NO: 8237 - DNA, 2300 bp, Homo sapien
aagtcagcagagtagctggtttgtggagaaagaatactcacacatcgatgtgaattatttcaattagaaaatgatactgctttcttagggctttcttaactaggggtgattctgccctccaggggacatactagcaatatctagagacattttcactgatcacaactgggtaagggtagggtggggaacgggtgtcctactgtaatctagtgaatagaagccaggaatgctgctaaacatcctacaatgtttgagcacaggatagctccccacaataaagaattatgaggcccaaaatgttaacagtactgaggctgagaaaccatgtttaagactatagttaccgaaactcaactagattaccaaactgccaaaactcagaattcttaagcaaaagattaatcagacattaacaaaacattaaacttgtcattaagtttcttcaaaaatggatggtggaaccatttccgtttaacgtttcctgcaaaatgtgcttatcaagagccctgcgcaaataacatttttgtggacagcgctgggcatttaaaagaggcacaagacaaatgggttttccgaacaataaaataatagtagtaatggctgtgaatactatgggaggtttcatcacagatgcttgccatttacttttagggacgtcgcatacgacgtccgtaaattactggctcgggttttgagctttacctggctctcgtcccctgtagtacaatcctctttattctttcaggggacaaacaacaacaaaacccgtctctcacacagacaatacaccctgacagacaagtgacccacaaacaatccctcctcaaatgaaggtaaaactagggctagaaaacgttcaactaatttaaggcaattaaccctctgaaatttttcgctgatcaaaggaacaggaattgctgttttaaaatatgcaactggcatttcacacctctacactggacgacgtattgcgtggaggatggagaaggaagatcacccctactcccaaattcgtagttataagggcgggttattagaagggcgccaggaaggtctctctacaaagatggggggccggggaactccctatttgccctattttggtcccaacactgaaccaaggaaattgcgcccaaggttgaagcacacgcaatccgtccgtcatgcagacaaatgctctttcaggggtcctaattaagtgtggaggcctgactttccttccgaatccgccccaggtgttccaccccgagcttcccctcgggcttcccctcgccacgcagcctctgaagagaggagcatctacatacaaagaggcttaaactgcccagaacctccgaatgacgaagaatcaccgccagtctcaactcgtaagctgggaggcaaaaccccaaagcttccctaccaagggaaaacctttggcctcaaaggtccttctgtccagcatagccgggtccaataaccctccatcccgcgtccgcgcttacccaatacaagccgggctacgtccgagggtaacaacatgatcaaaaccacagcaggaaccacaataaggaacaagactcaggttaaagcaaacacagcgacagctcctgcgccgcatctcctggttccagtggcggcactgaactcgcggcaatttgtcccgcctctttcgcttcacggcagccaatcgcttccgccagagaaagaaaggcgccgaaatgaaacccgcctccgttcgccttcggaactgtcgtcacttccgtcctcagacttggaggggcggggatgaggagggcggggaggacgacgagggcgaagagggtgggtgagagccccggagcccgagccgaagggcgagccgcaaacgctaagtcgctggccattggtggacatggcgcaggcgcgtttgctccgacgggccgaatgttttggggcagtgttttgagcgcggagaccgcgtgatactggatgcgcatgggcataccgtgctctgcggctgcttggcgttgcttcttcctccagaagtgggcgctgggcagtcacgcagggtttgaaccggaagcgggagtaggtagctgcgtggctaacggagaaaagaagccgtggccgcgggaggaggcgagaggagtcgggatctgcgctgcagccaccgccgcggttgatactactttgaccttccgagtgcagtggtaggggcgcggaggcaacgcagcggcttctgcgctgggaaattcagtcgtgtgcgacccagtctgtcctctccccagaccgccaatctcatgcacccctccagagtggcccttgactcctccctctcc

SEQ ID NO: 8238 - DNA, 2300 bp, Homo sapien
attttagataaactgtcagggaacatatatctcagaggagtttataataaagccaagatctgaactaactggtgccaatcaaaaaaagggctagaggaccaacacttcagggaaggagactagcatagccaaagggttctacaatgttaaagaacacagtatgttggcggaactgaaagaaggcagaggaactattaggtagtcaactagagtatgagtgtcaccatataaagatgaacttcatttatacattaatccagaatatctaggttccactcaaggttcaaacgaaaagataaggatttcctacttcctacgagcctctgaattgacgaattcagtgttcctttttagatctcaaccaagttgacccctttgcacaacttgacaatgacgcttatatcccatcttcctagaaataactctgcccttggcatgccattcttttctagtgctaaggagtgtggcctctgtagtcagattgtattagttcaaatcctggttcagccacttacaaactgtataatctagagcaagttcactaatctcttcaaacctcagtttctcaatgataaaaggaaaaacaatactagtacctacctctatgagtccctttaaggacccatatacatgcttacagtgcctgaaacacagcaaatgttagcaatgatcatattaacttccgttatgactgtttcgaaagtctcctgatatctcttcttccgctcatacctcaaaaacagctttgttttcttggtctcatccattcctatgacttcagcagctgaaaacccacaaaatatatttcattcaatgccaggcctcacgctggagcttcagggtccttctacactttgtgcctttacacgcatttttccttccatctggaaggcttctaccatctgccaaggtaacactgcgaggtctcaccacaaactgaattgatagtctcaggctgagtttgcagagaaccaaagtcactcctctaccatcagagtactcccctatcaccacatacattatcatccactgtagttgtcttatctgtacctggtaaatacagcagctaacgctcacgagtgctcaccacaggtcaagattatctcacttatcttcacaagacagtagagagcggccacacgactgacagaattccaattccagccgtatgattccagagcccaagctcttaaccgcgaggctgaagttgaaatatcaataaatgctcgctgactaaaagtactaaatacgagagagagatcaaaagatgactagtcaagtcgcgtagttaaatctgaaccctaaggtgacacaaaaagaggatgcgcaggaggcagggttcaattcagggcgtttaaaaggaggaggttattggccaagtccgctaagcacccggagagaggccaggaaagatggagtgaggagagggaggagtcaagggccactctggaggggtgcatgagattggcggtctggggagaggacagactgggtcgcacacgactgaatttcccagcgcagaagccgctgcgttgcctccgcgcccctaccactgcactcggaaggtcaaagtagtatcaaccgcggcggtggctgcagcgcagatcccgactcctctcgcctcctcccgcggccacggcttcttttctccgttagccacgcagctacctactcccgcttccggttcaaaccctgcgtgactgcccagcgcccacttctggaggaagaagcaacgccaagcagccgcagagcacggtatgcccatgcgcatccagtatcacgcggtctccgcgctcaaaacactgccccaaaacattcggcccgtcggagcaaacgcgcctgcgccatgtccaccaatggccagcgacttagcgtttgcggctcgcccttcggctcgggctccggggctctcacccaccctcttcgccctcgtcgtcctccccgccctcctcatccccgcccctccaagtctgaggacggaagtgacgacagttccgaaggcgaacggaggcgggtttcatttcggcgcctttctttctctggcggaagcgattggctgccgtgaagcgaaagaggcgggacaaattgccgcgagttcagtgccgccactggaaccaggagatgcggcgcaggagctgtcgctgtgtttgctttaacctgagtcttgttccttattgtggttcctgctgtggttttgatcatgttgttaccctcggacgtagcccggcttgtattgggtaagcgcggacgcgggatggagggttattggacccggctatgctggacagaaggacctttga

SEQ ID NO: 8239 - DNA, 2300 bp, Homo sapien
gccacccaagtagctgggactacagctgcgcaccaccacacccagctaattttcatatttttagtagagacggggtttcaccatgttggccaggctggtctttaactcttgacctcaggtgatcttcccacctcagcctcccaaagtgctgggattacagatgtaagccaccttgccagaccataatttacttttgaattatgtttattatttaccagtcttctccagtatacatttttctctctttttttttttttggctgatgtatctctaatatattttgagtattcattaaatgtttgtcaaaagaaggagtcaagtaaggaaggatttaaaaagcttcgtttgttttataatcatttatatacatttccaaaattttttgaagcaacttatattaaaacatacatacaaattttttaagataaaaaagctgtggtcaccccacatttatgtatgtatttatttattttggatataagtaagggataagtaaccaaacttggtcaatattagataaacttcaagggaccttttttttttttagtttcctagttatctatattgaaccaagaaatggaacagcaagttccttagttgcttaggtggacctattcagaactggttgtaagtctgcagtctgaagggaaatggtgagcagaggactcctttcccaaagacagctggaacagaaataggcactccagaggttatggaatttgagagagatactcagcctctagccactcccattcaatctcccagcttagtcttctgagcattcttaatcttactattcttttcttaatgtattcaaaccaaaagacagcaatttttagagcctgaataggttttggagggaaaagtaattacgttcaacttcgattgaaactcttgcctcaagaatgaagaacagcaaaaattaaatcacagtttcttagctttttggttaaagatgtaagttaaattcttggccgggtgcggtggctaacgcctgtaatcccagcactttgggaggccaaggcgggtggatcacctgagatcaggagttcaagaccaacctggccaacatggtgaaaccccatctctactgggtgtggtggtgtgtgcctgtaatcccagctgtttgggaagctgagtcaggagaatcacttgaacccgggaggtggaggttgcagtgagccaagattgtaccactgcattccagcctgggcaacagagcaagatttcgtctcaaaaaaaaaaaaaaaaaaaaaaaaaagaattgtataaaacacacaaacaaagcaaggaaagaatgaagcaacaaagccagagatttactgaaaatgaaattatactccacagagtgggagtgggccctgagcaagtggctcaagggcctggttacagaattttctggggtttaaatacccttcagaggttttccattggttacttggtatacaccctatgtaaatgaagtagtggtctgtaatcagtctgattggttataggaggggaccaatcagaggtactttcaatttcttatctgccacagtaaaagggagggggttgcaaagggagtagcctcttgtccttttgttacttgagcatggaaagttggggttttccttttgatttcgttctaggaggtcagcatggattgaccttaggttccctgcctccagaccttattgccctgcctcatttacgttaggtttctttcttgtcaccttctaaaatattttttgttattaggaagtatgtttttgaacttccttatgcattaagtaaattagccatttatcactgtaattccttatttggaaagttgttatattcacccttaagacttcacaattctcattcatttaactaaagtgcaacatagcagacttattctttatatttagagaatttgtgtcttttgtgaagctacctgtctatagtgggaagtagattaatgaaaagtccaaatctgttggggagggttttattctactattgatgaaaggggatgtggatcgcagctagccttagaatttgggatggcactcaagtagaagtctgggaagaagttacgcagggaacaaagatgacattgttcgcagtccctgggaattcttaacagtaaagttctgtaattgagacagaattcccaaataaagtcaagagtaaaattcagatagaggagcagttatacatcagtgggaaatttggttggcagaaaaattaccaggtcatacaacttaatgatagacctgaagtcttatttaaaatgattctctaaaattgaagaattggattaagggggcctt

SEQ ID NO: 8240 - DNA, 2300 bp, Homo sapien
taaatactttttaaaataattcagataagcactacattaaaaatatgcagtttattaggttgatgcaaaagtaatcgcggtttttgccattatgtttaattatgtatgtttaatgacaaaaaccgcaattacttttgcaccaacctaataaaaataatatctaaacagcagtataccttaaatttatttttatatttcatccagtacatttaggaatttttgttctaaattatttactggcttagttttgcagttttttaatttaaaatttttaaattgtggtaaaatatacataaatttatccttctaactagtttcaattgtacaattcagtggacttaagtacattcacattgttgtgtaattttgaatttaatttttttttttttttagagggaatcttgctgtgttgccaggctgaagtgcaatggcgctatctcggctcactgcaaccaacctctgcctcccgggttctatcaattctcctgcctcagcttcctgagtagctgggactacaggcagcgcgccaccaggagattgagaccatcctggctaacacagtaaaaccccgtctctactaaacatacaaaaaattagccgggtatcatggagggcgcctgtagtcccagctacttgggaggctgggctaatttttgtatttttagtagagagggggtttcaccatgttgtccaggctggtcttgaactcctgacctcaagtgatccgcccacctcagcctcccaaagtgctgggattacaggtgtgagccaccacacctggcctgaatttaaattttttaacccagtttctattagattgaaaattaagatatacataatgtttccatgactatatttttacagtttattgttcataactactgtgtattaatgcatcaaggcaactacataaagaggaactgaagctcaccccttgcttatgattgtgatgattttaaagaactctggaagttcagtgagtcactgaattaacctaccaagaattttttctgtacaaatgttttcattatacagggaaatttctcttcaggtgtttcttttccctccttaaaagtttatcttccttacaaacaaattatattccatgcatgaacataggacgaacatagcaaaactgggcagttctgaacaagattttttcacattgcaataatctgtgaccaactaaagcactgccaaagtgtcagactcagaattcaagcaagtcagacttgctttagataagcagtgcttgcattatttaaggtcatttgaaaactcattcaagaggtcgtctgttttcacttaaagcagtttagcttaaccagctgaagagcttacatttagaaataacattggactgcaagtcacgtattctttgaccttgagcaagacctgtcaaatagctagaaggatcagttgtctcattttcaaatgaataaattaaactaattaaataggccgggcgcggtggttcacgcctgtaatcctagcactttgggaggccaaggcgggagatggggtagggggggatcgctggagcccaggagttcaagaccagcctggacaacatggagaaaccctgtcgccactattaataaaaatagaaaaatgagcctggcgtggtggtgcactcctacggtcccagctactcgggaggctgacgtgggagaatcacctgagccaggggagttccaggctgcagtgagccgagatcgcgccactgcactccagcctcggccacagattgagaccctatctcaagaaaaattttacaaaaattaatagaaaatatttcattatatttctcaacatctttaaggttcttggttgaaatgactgggctttattatatactaagcccaacttcgtagacaatcactttgctttcccttccaaaatcctttgcctcaaagccactgacaatcgaaagcgggcttctaacagaaccagcagccttcacaagcggttggtctatatcccctgcactttgtcagagcgcgaatagaggaaaggcggggcctagaaggcggggctaggagggcaatggggcgggacagaacggattgagttacgtcatttccgcctgcgacgttacctaggagtccagcggcgcccgggccagcagcgattggtaggtgaagggaatagtgtcccttctctcagcgcgtactactgttccggtagcctttgtgcccactggtttgagccttcgttgtttcaaggccctaaagaacccatacccttgataccattccccatccgcccctcttaaggacgtttcattcctctaaagccct

SEQ ID NO: 8241 - DNA, 2300 bp, Homo sapien
gtcatagaagaggtggtgttagatctgggcttggaggatgagaaaggagactgccaagttaaataagtaaaacattccaagtgaatggaattacatgttgaggtggatggcattttcagagagtagcctaaggtttcctggtaggtgggcagatgaaagatgaggcttatagccaagctgggacaagattgtgaggccttgaatgccagccagagagttgagatcttgtgccataggcttaaggttctgttaagcttggtagtgacattaacaaagttattttagaaattttagttttagaattaattttagttttggaaatctgagcagccttgtggagagcagattacagtatggagagcccagaatcagaacacctagtaaggaagttattgcagcaatctaggcaagaaatgatgagagtctaaactgagacattgaccgtggagatggaaatggactggcaggttccagaggcaagggcacatgaggcaaagatggggacagtgaaggaaaacaagggtttggttctaactttgtagattctcttgcttaggcagctggcagagggttatcgaagctattcattcttacctctctacacaattttcacttctctaacactacattttattttattttatttctttttctatttttttggagacagagtcttgctctgtcgcccaggctggagtgcagtggcgcgatcttggctcactgcaacctctgcctcccaggttcaagcgattctcctgcctcagcctcctgagtagctgggattacaagtgcctgccaccagcccagctaatttttgtaagtttagtagagacagggtttcaccatgttggccagactggtcttgaactcctgacgatccactcgcctcaacctcccaaagtgctgggattacaggtgtgagccaccacgcccagcctcaaacactgaattttacatgcatctctggacagaggtagctgactcctggttaagtgaatttgtcatgcaggatcctcacaggtgacaaattcacagccatcctgtcaatgacaggcattcttctctcttctctgtttttgaatggttagccctgtcaaaaatatgtaagaaaaccaaagaactgttgtacttagtaccaaagactgagatcttcccagcactgatgtttgtttatatgtttatttaggtccttctcccagatttagaattttatgttaatcttggagattggcccttggagcatcgaaaagtcaatggaacccctagccccatacctatcatttcatggtgtggctctctggattcaagagatgttgtccttccaacgtatgacatcacccactccatgcttgaagccatgcggggtgttacaaatgatctcctctctattcagggaaatacaggtattcagggaaatgcaaggctaattaatgaagaaaaagcttagagacagagtgggttatacatatatgtttgcattcagtagcatattagaaaaagtcttgtactgaaaattctgaccaacctagggattaaagatttgtggatgttcctcagttatatagttttttctggtcaccctttgtaagaacaaagggctagctcacgttttattgtgaaacacagaaaatggaagaagctaatgccttggtgagtggacccagtcactgaatctcttttttgctttgaacacggtccgacattatttcaggtatttcctagtattatacaacagaatacacgaatacttgcgtgagctttcactagcagacaaatggatgaaattagagcattcttttacataatacagcaaataaaaagactgttttttttaaactctaaacttgaaagtgcttctggcaaattgagactcaatcccatattttcgttgaaataacatctactttagaagatgagttgataaaagagctttagcatcttaaatgacaatggtagattaaagaggattatgcttgccatattaaaatgtcaaattcataatcctaatttttttatggcttcaaacttgtagggccttcctggatcaataaaacagagagagctttcttcagaggtagagacagccgagaggagaggctccagttggtacagctgtccaaagaaaatcctcagctactagatgcaggaattacaggatatttctttttccaagagaaagaaaaggagcttggaaaagccaagttgatgggtttctttgatttctttaaggtatgcatttgagtcttcttctatggatatgaagcgataaaattgtattaaaagtctaccaaaataggtgg

SEQ ID NO: 8242 - DNA, 2300 bp, Homo sapien
ttactgtaaaaaataactgaacatttaaaatatatatttccaatggctatattatagttgtatacatacattttgaaatgtaacttttaaatgatatttcagcgacaaaaaatattacaactggaagcgaccataattctttagtctgatactttcaatttacaaataattgacgcattttgaagctagttgtttttttctgtctttcccaaaagtcacatagtcaataatattcttgtcttataactgttttgtttatttaaaataataatatatggagaataagactgtttgatcaggaaataagaaaacctttttgtacatttccagtttggggagggagcaatgaaaatggctttccaattcccagactttcctcttcagatttcgatctgctgtgccatgttgcctttctgaaaccatgtgggaaataatgcaaagcaataatttatgtgtttcatttgtgcagttcaggtaactggccaacatttctaataatttcctattaaattattaccactttatagcatcttccatgtttattatacttcatttaggttagcagatttatttcgtaattttatcatacttgtttcaaggatcctaaaatgtatatgtttggtactcgattattaatatttaatagcaagatgtcagataccacattgttattactaaattgaagagactgagaaacatttctgcagactcacaagaaaaaaaacccttaaagatcaaaagaaagtagatattacactcactcgatttagaaactaagaatttcacaaacgtgtttagtaatttcaaaagatatattttaaatattctaaattttataatatgcgaagtgaaaaacaactttggtcacaattttccttttgctaggactgtggatttccaaggattcattacttttttagcattttcctttgatatggtgatctaaatggtatatcctctgcactctctgaaggaagaagtttcaaagtttattcctggccacagtaacactaatcacaacagtatcatttcaaagcctaaatgtcagctaataggaaagggaaagtttgttgaatagttattatttacgtagaacagaaaccccacaaaactttgaaggtggaatggattattacagtgtaactgtttcatttcaagctgaggaaacagactcagaagtaatctctagtatttacaaagatgtgtatgtgtgtgtttgtgtgtgtgtgtgtgtgtgtgagcttgtacaagagtctggtaactagctgtaatctctctctacgtaaggaaatggccttagaagtaccacttgaaatttgggcttaataaacggggaaattttcacagaaatgaaggttattagatactgaaatggtatacaaagaaagcttgtgtgtgttttataaggaggaagttcgattactagagagatctgtcatgcttagagtccatggatttttaactatttgggctttaatcctacccaaaggaggaaagaccaaataagcaaaaagtttattttttatttgcttttaaaaaatgatttgcttttgttcatgcagtaaatctttattgaatgactaatgattcaaatgttgagtctgatccgtggtttgaatacatgaaccagaccaagctctgtggctcaagcctgtaatcccaacactttgggaggctgaggcagtggggatcgcttgaagtcaggagtttgagatcagcctgggcaacacagcaagaccccctccaacccatcccgccccccaccatctctacaaaaaatttcaaaaattagctgggcatggtggcacactcctatagtcccagctactcatggggctgatgcaggttgaggcaggaggttcatgagcccaggaggttggagctgtaatgagctaggattctgcctctgcactcctagctggatgacagagcaagaccctgtctcaaaaaagaaaaaaaaaaaaaaaagaatgcatgaaccagacatgacagttcctggcctcaaagatcttccaaaggaaatgatttttttttaaccaccaatgctgcaggaaaaagcaacatatttaagttatccaataacacctatccaataattgtaaatcattatcatgacatggtagagttgtttatatttcttttccttttaggtgaaacaccattcaaagtcgtagtcaaatctctttcacctaaagagttggtccggatacatgtccctaaacctttggacaggaatgatggaacatttttgatgagatataggatgtatgaaactgtcgatgaaggcctgaagatagagg

SEQ ID NO: 8243 - DNA, 2300 bp, Homo sapien
aagagtctggtcaaagcactggttgctctgaagagatatactctttggagacaggttaagatgagaaagaaaacaggttggtgcaggcttagtattgctaaacgctagtgtgttcaggtacaattatatggcttccctgacgtgttctcaaaaaaaaaaaaatactgggtgttaacccaaatgttatgtaatttattaggccatgttttactataatccagtaccggctaaacctcagattatttctctggaaattgttttaagtcagattttgaaagagtgtgagcaaaatgtgttccatacaatttttttaagcgatagttggaacagagcaaagctttctatttaaagcaaggagacatccccacaaaataaaatttatcagtgaaagtaataccaagtaatgttacactttagccctaaaatttaccggcaactgactaccagttcctgaaacctttccaaagtacaaagaatactgtccataaccactgcttagcattactaaaataggtcaagagaagtgtgaaaatgtgggaaagattttgccctggtaaaacttggtcacagcaagaatgctgagtagcacggttaaagccgtgaggcggacaaaggcttgtccagtgcctggctctgatgttttgggcattaagttcccccaagagggtgcagaaatcctgtgtccattctggggtgtgagttccttctggatcattcagccagaggagaatctttattggctttaaataaattcagatctattaacaatccattaacaaatttgtatccattaacaaattggataaaatgatcaaaaaagagaggcagatagtaaccttgacaatctcttcctggatccagcgttcatcttctgaggagtggtggaggtggctgagaccaaccacgcaccaccaccccttctcccacttcgattacagaggctttgaggtaaagctcgcacaagggctcaaggcaaggcctggtcttctgccaccccagtgcccagctcctcactctgggcttggcccaaactccgtggatgttctgtaaacacctgctggaagaagaggagtgcgggaggaagcggggaaagggatgtgtggggtggggggatcacggttctgtgagggaggctgctaagcagaaaagcaacaaaaccggccacaagagaacggtgctgctgtgaacagagggctgtgagggagggcggggggcgtgaccttggcgctcatcttgtaaactcggagacattccttgggaaaagatatttccctaaactacatcgatcttggggccggaccctttcatcgtcccacaacaatcaccaccgggtctacgtcctttaaaaacacctgagcggcggacccggtggctcatgcctgtaatcccggcactttgggaagccgaggcgggcggattgcttgaaaccaggagttcaagaccaccttgggcaacatagggagaccccgtctctacaaatagtaatagtaataataataataataataataataataataataataataaattaaattagccagcgtggtgtcgtgtgcctacagtcagtcccagctactcgggaggctgaggcgggaggatctcctgagcccacgagttccaggctgcagtgagctgtggtcgcgccattgcactccagcctaggcgacagagccagcccccttgtctgtataaaaacagagaaagaaaagagaagaaagaaggaaaggaaggaagaaaaagaaagggaaagaccactggaagtggaggccaggcgtgcctgaagccttggcaatcaacagccagcgcacactcgcagcctcggtctctgggcgggcctctccacccctttcctccacggggcctatggggctgcggggaggaaggggcgcacccatcgtcgacccctacagggcgcgcagtgggtgattgcggcactggctcgcgttcccgcccgagggagacgaggcgggacagcgggcgggaaagggagcctgcgccgcaatctttcccgcccgaaagacccgccccgcggtgggccccagtccccgcccggtccgcggcgctgccggcccctcctcgccgccgcggagctggaccgcagttgtgccccgccgaccatgcgccgcctcccgcgggccctgctgctgcagctgcgcctcgccctgctggtggccgcgggggccccggaggtgctggtcagcgcgccgcggagcctggtgtgggggcccgggctgcaggcggccgtcgtcctgccggtccgctatttctacctgcaggcggtcaactcggagggccag

SEQ ID NO: 8244 - DNA, 2300 bp, Homo sapien
cacaactgtgaaactctgtattgcttcttccggtccacaccctatactcatgacattaaataaaaggtagggatgataacagtggggtaaatattatcatcctgtttgactcatgaacatttaggaagtttaaggtggtgatcttctctttcaaacaaagataaaggaatttattttttaacctgagaaactgattgcaaaaaggaaaaaaaaaagataaaggaattttgtaagtacttcctgttatatccgtagtggagcctgggaggcacatggtcaaagcacatgttgaggttatagattaggacctgaatccctagtaagccaatagaaggttagcagtcctagaaattcctctgaaaccgtgggggactggctggattattaagggcttttagtcaagccaaggacttaggccaggcaacctgaccatacagaaagttgcctggtcacagaatttctgcttatgaagagaacatagctgaggagcagaggtaggaagtaggtatcccttcatgggaccgacttacctttactgcagttctctcagcaactggcttttcccatttcctcagaactatccattttcacattttcttttttttgtttttgttttttgtttggttttgttttgtttttgttttttggagacggagttttgctctgtcacccaggctggagtgcagtggcatgatctgggctcactgcaacctccgcctcccgggttcaagcgattctcctgcctcagcctccagagtagctgggatcacaggcgcacccaggcgcacgctgccacgcccagctaatatttttgtattttagtagagacggggtttcaccgtgttgcccaggctggtctcgaactcctgagctcaggcaatccgcccacttcagcctcccagagtgctaggattacaggcatgagctaccatgcccagtctttttttgttttgttttgtttttgtttttgttttgaggtggagtcttgttcttgttgctcaggctagagtgcaatggcatgatctcagcttactgcaacctcctcctcccaagttcaggcaattctcctgcctcagcctcccaagtagctgggactacaggcacccaccaccacacctggctaatttttttttttttttttttttttttggtatttttagtagagttggagtttcaccaggttggccaggctggtctcaaacttctgacctcaggtgatctgcccacctcggcctcccaaactgctgggattacaggcatgagccaccgtgcctggcccacattttctttaattgcaaggtagaacgcttcttttcaggtggggcattttagtcccaaatatcaagtgggaaccttggccaagtccctaaaatgccatcaagtcagatctgacaccctggaattcattctttgctgcaggatcatctacgaaacccttgggaaattctaaggcagagctcctaagggcttgtcactatgattcagtgatttatctagagtaaatcacttatgatacccactgatattttggctttcctaactctttatttgccatgcagaacctcgggggatttctctcctaattcaggataaagaccaatagatggcagtgaagataatctgctttaactacagacagcatggattcctggatctcaatactatgatagtcaacatgagtggattttatcttgcttggtttatatttgcttcgcgacctaatctaattttccattttttatacctagtctgtttcatcattataaactaagaataatgatagatgttggtgaagtgtatagagatctggaactgatagagagttaagaaagaactatgttgttgttatccttctaatcattcccttacatagacgcaaaatgcgtgggttactttacatggttcccatgcaactcaaagctaatgaacatgcggtaactaacatgaaagctattccctaaatctgtcaactattttaaacttcaagctctgaccaatcctgagctcagaaagctcaaaaatcaaatattgtgaacttttcaatgcaaatttgtatggtaaagaataaataacactatttcttggttaatatatgtttgtaaattctgcctttcctctttttctatttatctgattattattattattattattattttctttgagacagagtctcactctgttgcccaggctggagtgcaatggcgcaatctcggctcactgcaacctccgcctcccaggttcaagcgattctcctgcctcagcttcccgagtagctgggattacaggtgcccaccacc

SEQ ID NO: 8245 - DNA, 2300 bp, Homo sapien
aggcgggaggatcacttgaggccaggagttcaagaccagcctggccaacatggcgaaacaccatctctacaaaaattagctgggcgtggtggcacatgcctgtaatcccagctactcaggaggctgaggcaggagaatcacttgaacccaggaggcagaggttgcagtgagctgagatcacaccactgcactccagcctgtgcaacagagcaagaccctgtcaccaaaaaaaaaaaaaaaaaggtcaggggccacattcatcccaggaagtctgatttcaatttagcctctcagtattttaatttcttcattggtaaaatagggataatattatctaccttcataagggttcttgtgaagattaaattagttaatacgtgtaacgtgcctggcccagggcaagcactctgtaactgttagctatgattagctttccagtattattcctatggaaaaattactttttacacacatgattttaatttgtgtacaggatcacatcttgcacttatgtcaaatagcaactgaactgcttcgcaatgatggcagaataagttggtagaactcatttattatcccctagattgagcaaatatatgttgatcgaccatgagtctgggactatgctaggccctggggataccaaaacaaatgagacacagcacctgtcctcaaggagctgacagcctggtgacacaaccaaataggcacatgacaagttattcagtgtaatttggtaaatacagaagttacagtgggtgatttccaagctggctcaggtaaaaggtatacattcaaaaagggatcatgtaaacctaggaaaacagaagagctctgatgagctacaagagggactgacacttaaaccctaagtctgacctcagggtggacagcaagtcttttctacagcaccttcttgagggtgactattggtaaagggtgactattggtgagagaccaagggcactgtgatctgaaccagatggtaattacacatccttattgttacttagataacttaccttttccttctgttgtgagtttgtgttttgtaaaagaaacatccagaagggttacaatggtcaatttattttattttattttttttagatagagtctcactctgtcgcccaagctggagtgcagtggcatgatctcggctcactgcaacctctgcctccccagttcaagcgattctcctgcctcagcctccccaggtagctgggattacaggcacctgccattacacatggctaatttttttgtattttttgtagagacaggctttcaccatgttggccaggctggtttcaaactcctgtcctcaagtaatccacccacctcggtctcccaaagtgctaggattacaggcatgagccaccgcacccggccttttttcttcttttctttcacccaggctggattgcagtggcaggatctcagctcactgcagccttgacctcctgagctcagattctcccacctcagtctcttgaatagttgggattacaggcacacactagcaagcccagctagttttgtttgtttggggttttttgtagagacggagtctcagtacgttgctggtctcaaactcctgggctcaagtaatccttccaccttggcctcccaaaggctctgggattacagacatgagctaccatacaatggtcaattttttaaatacagaaaatattgctttttatcgtagagtaggcagtctctatcacagccattcacggagttgaagtgggctttattatccagcttggcttaaaagctggtgccattattttgttgcctctctttgagtcctaaagggctgttgctgttactgttgttgttgcttgcttactttataaagtttaccacttttccttatctgagcttcccttccttcagacttccgtgtatgatttaactttacccttatgaaaagaacacatttttcaatatacttgcttgctttttctaatccttgcccctccctgagtcttggccgtgggctgaaccaaagagcaggctctgatgtcagcgacaaaggctctcaaataacaatcttttcagaagatcaacagggagagagaccaggccccggatgataaagctactggtgcagccactgaaccacagggctttctcttccttcactctgcctctttctgattgggaacacacaacagttgttttaaagctttccctggagggtgagtgataagaaacctattacctggaagtatcgcctttctaaagtaggagaacaaaaggccacactttccccagatggtgagtctcttggg

SEQ ID NO: 8246 - DNA, 2300 bp, Homo sapien
tcatcacatggcattcatagtcagagctcagcctacctttcagctcactgtgctctgagcactagcccagtgtttctaaacctctttctcactactgtccccacaatgcacctttttagaacttttttcacaatcacctcccttgtgcaatgttaatacttcagatatactgtgtatctgtgtatcatgtgtagatttgtgctttctacataaaaagaggaagattttacccctgtggagactacatgctctgccaaaacagatcacttaacaatccatgaacatgctccagtgttttctagcttccaagcttttgttcagtctggccattaaagaggttgagggaatatgagaagattcctagactgtacttctgctattcagcacgctgatccccttgcctagaatagactcacacatctcctcccaccaccccctatttcttcctcttgaaatctgactcttcatgcagcaacctaaataccgtatcctctctccatccactcagttggcactaacttttctgtgtgctcatggaattttctttattcctctattatgttcttttttacatagtcatctttctatttgtgtatctctcccactggattacaaactttctaaagacaaggactgtgttgttcacagtgtgtgatgccttcatgtaataggcaccaggatacgttggttgaaatcagttcactgatatactggaaacagtgtaaaatcccaccagtgaccatattgaaaagtcccatgtgtatgctgaataaatgaacacactagaaaaactggacaccatatacaagacatactcccaaaacaggatcattaatacagacactatttataaaggagttctgtattgtgtacaccatgggtgaacaaaattggttcctggttcacacaaataacagacacccacagaaagttatctgaatggctagctgcctaggcatgttttaaataatgatgatcaaatggggtagcccagagaacaaaacacaagtggcaatttttgatatcatgttcttgtacagatacaaaattttaattgggtttatgtgccatgaaaagaaatgatatatgtagaagtacattttatatgttagtaatcatcaccaccatcttcaaaatgaccaaattaaggctatggggcaggaaagtcaatctgacagagttatttttgggtaggaagtgaagccaagataaaaacatgttttctgtaaaagccttgataattaaaaaaaaagtatatatgtgaatatctttataagtttctattattcttcattgcattgtggaacaattgactttctaggaaagctatttctgtggcttcataggattaccatttgctttcaccagaggattaggtatttttaaatggcatgtgtattacttctctgagtttattaagatgataataaaatcttacagaaaacttctaacaggtgttttctacagtcctttgcttctgggctgtcttctcctaaaataccataaacggttttgtttgtttgtttgtttgtttctaaagtctaagaatgacttttgtgggacagtggaggtgggggtgtctgtgggatgagaggcttggcaaataattcgtttccaaggatacactaatttccgcccttcagccaggttcatccacagtcagtagtgtaattgagtttagttcttcctggtctttcagataagtaacccttttgccagttacaaaccctacttgcaattctattttctatgggctcttaattattgaaagggaggattagtcatgaatctcctttttcactcctttactaatcaagctcaagttctgcgagcaaacagcaacagcaaaagcaaatactttggcgccaacacttagccttgcctcacttaagaggcagaattatgtaggcttgtttgcttaacaactcagatagggggcggggagggtgaccggaggggacgagggaggggacgagggacgggacgagacgagggaggggacgagggaggggacaagggagggcccgcccccttggaacgggattggttccctctctccctttagccgttcactttgcatctcggttggacaggttgagagaaacatgtcattaaggtattgtcaatatgagcccttcaggtgtgggcgttccctaggtttgtggttttagactttcaaaggggcggacttattattggctgtgggatcaagttcgtgaaactggtcttgtacaggttgaaaaatgccttcctaacaggaggcgccaaggagcttaagtgtaactcacacacagtaaaga

SEQ ID NO: 8247 - DNA, 2300 bp, Homo sapien
gggttcaagcaatcctcccaccttggcctcagaaagtgctgggattatagctatgagccaccgtgcctggcccctagatgttattgaggtctttctcttggacattcagttttcctagagttgaaccttccagtttcttgcctggggcgcatatatgcctgactcctacagttttaggaaaaaagtgagttatagctgagggccttatcgttctgtaggtatgcatatgtggtatacatatgtagtaaaatacacatcacataaaatttaccattttagccatttgtaagtatacaattcagttgcattaattacattctcattgttgtgcaaccaatctgcagaactcttttcatcttaccaaactggaactctgcactgattaaacagtaaccccctggttgcctgagtccctggcaaccacaagtctactttctctattattttgacaactctaagtttctcatataaatagaaccatatatagtatttgtccttttgtgactggcttatttcacttagcttaatattcttaaagtttatccacgttgtggcatgtgtcagaaattccttctttatgaaggctgaataatattccattttaggtacatattatgttttgtttactcattcatcagttgatagacacctgggttgcttccacattttagctatagtgctgtggtgaacacggtatgcaaatatctgagaccctgctttcgattattttggctatgcatacccagaagtgaaattgctggctcacgtggagttctatttttaattttttgaggatgtatatacactttcatgtaatcactccttattgagctttactgtctaccacatctagtgttcctgagtgtggaaattctcttgttcacctcctgtcctcactcccttccaataagccatgtcttgtttggaggatgggcatagagttgagagtagtgatctggatatgtggggttggaaaggaaatttgagagcccaaaattctgcctgtgaactttgaactcaattttccaatctcctttgctacagctaagctctcccacccacatccggtgttttcctggaggctgtaggtaaatgtgtcaaaaaattcaattcattgaaagccagttcacttaaatgtccaacttgcaataacttttctattacctccttttttttttttttttgacggagtttcactctttcacccaggctgtggtgaagtggggcgatcttggctcactataacctccgcccccggggttcaagcgattctcctgcctcagcctcccaagtagctaggattataggtgtgcaccaccacgcctggctaatttttgtatttttagcagagacagggcatcaccatattggccaggctggtctcgacctcctgacctcaggtgatccacccacctcgacctcccaaattgctggaattacaggcgtgagccaccgtgcccggcctctattacctacctccttacgtttagttatcattttgtctccataaaagcattttaaggcaaattcaatttgattccgttccagtttccttgctgttgcagctagagtctgaggggcccagaggaaaaggaaaacccagaggggcataagaagaatatagaatattcatttttattcctgaggaagtacaaccaccatggatggaaatcagaagtcactaactagctgtttacttctgggcaaatcttttggctcgttggcccgaaaagtgcaaaacgagggtcacaattttcattcacagattgtatgtgtttacacacatactcacgaacgcttagcaaagttgaacctggagcaaatgtgttaatagcccttaaagggtcagtgtatgacgtcaccatagtaacaacaacagtgcgcatgcgtttttttttaaagagccggcgtgctcccggctcggctcagctcgcccccttccgtggagtgctgcgcccccgtttccccaggctgcccctcccagcaggagccaattcgccaatcacagccctccttttcctgacgtcattggcgcgtgccccggtttcaaaagctcgggggcgggcttctgagttcgcgcatgcgcctctgtgcgtttgtcccatgctggttccgtgagtctggccttaggtgtctcgtgtctggggttgatccgagctgtcgccgccgccgccgcaatgggcaaaacggccaactctccgggttcgggagcccgacccgacccggtgcggagcttcaatcgctggaagaaaaaacacagccataggcagaacaaaaagaagcagttgaggaagcaactg

SEQ ID NO: 8248 - DNA, 2300 bp, Homo sapien
aatctagaaaacagacgactgagagttaatttttttttttttttgagatggagcttcactcttgttgcccaggctggagtgcaatggcacaatcttggcacactgcaacctctgtcccccagattcaagccattctcctgtctcagcctcccgagtagctggaattacaggtgcctgtcaccatgcccggcttttatttatttatttatttatttatttatttatttatttatttattttgttatttttagtagagacagggtttcaccatgttggccaggctgacctctaactcctgacctcaggtgatccacctgcctcagcctcccaaagtgctgacattacaggcatgagccaccgtgcctggccaagagttaattctaattgcataaaaattctttgctttacaaaataacattttttaaaaaattttttattttttgctaaagagtctcttgaaatagccagatctctttttggagaatccaaaattggatttgctttacaaaatgtttattagactcaacttttcaggagcaaagcgagtgtgaaaaaatgggacattgcctgtcaggcatcaatggtaaagtgtcacttagtcacagcgtaaaaaataaataaataaataaaaaggctcaccattccatcccctaagcccaccaaagtcaaattgtccaaatgtggcaggtggctattgcaggcatctggtgctctcattccagtcaggaaggtgaggctagcattggggtgggggcggggggcagacatcagtaactgtatgaccctaaacacagagtccgaagaagggacccccagattacagacagcctttcctccacatatcagaccctctttctttacaaatacagcaaatacaagcagataactgggcatcagtcatttctgatgcattgcaggaaagagcaacaacatacactgtatcattcaatttatcaagtaaactacaggcactgtgctagactcaaagatagaaaagaagacagggagcaaagaagaaaacgcacgtttagtaagacacctgagtgccttcaaagaccatgcaatgtctttaggtactgttcccagctagcttctccaacagaaaaatgagcatactccatttcaaagctggattctgtaaccaaatgcactattcatatttttccaaggctcctaaaccaatagttaactagtctcttccaagatttagggaggctgttgaattcttttctggaagttctatgtattttgctaaaagttgtgctccaaacactttaccaagaattagggtcaatgaaggggtactttgtgcaagctacaaatacttggaattttcataaggcagttcatttctgccttcctgtgaataatttcatatttcttccttgtaagactagggtttgtgtgctcatgagtgtctagattgtcagaatagaaggagtgtttaatacattgagtgggtctggggcctggagatgaagatgtgagggatgcaagaaggaggatcttgaatcagatggagcgaaagataacttggaaactccagtggagaaaaatggctaatttggattgtttaatttgttcaggtttgtgttttgggttctgtcacacttatgttgagaaacgtccctgccatctctctaatgcacgcagtttatgttcagaaacgggcagcacagagaggaattagcggtgggggaaattttcatcaccaccggtgatgtgtgcaccgatggtagatggctatccagagtgtaaaaatgtgattctgggaccaaagggtcagctctagaacgaaatcagacagctggagaactgaagattcaactcttcctaggcaagagagtgagaaaggtgggttgcttgcagggtggaggtaggggttgctcctcctagttcctgggctggagaagggcagggaactgggaagtgtgtgtcagaggctcgctatgctaggacaaggtgttggggtactagggtgggtgggggcctgaggggtggcttggagccctggcggtggctgcctgacgtcaccggcctctctggcaataggctgcgagctcagctccctgaagcggcggcgaaggcggcggcggcggcggcggcggcggcagcagcgcggctcggtctctggtccattcactccacgctttctgcagccgccactgcagccgcgcggcgggggctccctccttgcagccagccggcggtccaggtaagagacaaggtgtgagtaaaggcttctgatggccgggtggcctgacggccaggtgcgagtggggaggacagctcacgcggcc

SEQ ID NO: 8249 - DNA, 2300 bp, Homo sapien
aaatgttagttattataactattactcatctcttttaccttgatttttaaccaagcttaatcaatggagttcagctgagtcaactgtgggatacaaggtaagaggtagactgtgtgggcagtatactgcggagtggaggaacttcctggcatcactaaagccgtgccatagatgctgtcacttatcgtcaaacagccagtctcgttctaagtccctgctaagtcccttagagatcctaagattgagggcctctaactctgctccagagacctccaaggttttggcacagtgtaaaggggctgctttcccagcccctactttcctgccaataaaaatctgacccggctgcagacagcaggctaccaatcttcctaagggtcttcagggtggtatgaaaaaatgtggacctggccgggcacagtggctcacgcctgtaatcccagcactttgagaggccaaggaagatggatcacttgaggccaggagtttgagaccagcctgggcacatggggaaaacttgtctctactaaaaatacaaaaactagccagatgtggtgacacacacctgtaatcccagctactggggaggctgaggcaggagaatcgcttgaacccaggaggcggaggttgcagtgagctgaggtcgcaccactgcactccagcctgggcgacagggtcagactctatataaaaaaaaagtgtgcaccacagaaccagagaaggcagcctacctgcctacctgcaattttatttaatcggcttcatgactggcctactgacgtggaaaacaggctcagtaagacactctcctttcatctcacaggcagagtcaggatgctcatgtgcaccagccagtaggatactctcagctgggaccccaacatcaacagctaaagagcaactgatgctggccaaaaagatggggacatctgtgctgctcaactgagccataaaggcctacatttggtagagaatattaaactgaaaattatcaagtttgaaccccaataagcatcatgaatatcactaccattaggcagtccaagcaaattcaacagatccaggcttaaaccatatatatgccctactgaaaacaactcagaggcaaaactaattttatgaaaggtaaaaagttgatcaaaggcatgaatcgtggtccagtgaaacaaatgcgtcctttagatgtaacagacctgaatacctcacattcaagctgtgtaactgcaggtaaattttctaacctcgattttctgatggataaaggggtttctaatacccagctcacatggctgtggtgacaaacgggacagtggatttaaagcaggctatttggcccgtggcatatggtaggggcacaacccattcagtgtccctccctctcactccagaagcagactcatcctgccctaggctgctcgtaatgattccaaggacaggcgaataaggttatttgaacatttctgaaacattgacttagtttgtgctgggtgttgtacgattcacagaagtagaaaggctctctgctcccggtgcttttcagcctgcgattcaggcgcccacctctgtgcaaagggctgtttccttccgatctcctgaaagagatctggatgtatcttgggttcaacctcgattttgacacgattgccatttccatcaaagccaatttccttgctgaaagaagtcctatccctgggtgaaatcccaacagcttcatttgtttaaattcttttattggccttgctaatgcagggtgtggtttttcctcatcacggaatattgataagtaaacaactacggggaacctgccctaagaaggcggcccgtcgatctccttgactgcccgggacatgatcagtgttactgctgggtggagaaggtgtcgccgagcggaaaggcgccgtcctgcaccaggtcgggggagaggcgcggggaggtcgggaccgctgggttgggccggggcagggaataggcgcgaggggaggcggcgcgggaacctcgggcagccccagcggctgggtcgagcccgacaggttccagcagctcccctcacccctctccacgcctctcgggttttccccttggctcagggtttcctgtttcagttctcggcgttctccagcagcaggtgctggtttgccaacctcggctccagaggcggcgacggaggagaaggaaaagagggaaggggaggaggaagcggcgcggctgcggtggctgcgggcgggcgggcgggcgaggagcgcggagcgaggtggcggagccgggttcgctctcgcccgcggagcagcggcacggacgaa

SEQ ID NO: 8250 - DNA, 2300 bp, Homo sapien
ctgatttagtaagtaaaaaactaaaaccagtatcactatttttaggagcaaactaaatggcatgcataaatataaaaatgaatccaaatatttaaaataatgattaaataaaagtgaagaacaattagaatagggtggtaaaaataagttgcactgatagaagcaactagctagctacaaacatggaggaatctgggcatacaaataacaggaatcaacaatatggcattgccattttaaaagaaatgatattgtaatagataaatgcaaatgatctaaggctaagataagttaatatttgaagtcccctatataggccaaaacaaagggtcacaatcatcctaatcttgcttctaagtccttgaatatagccagctcttaataaaaatgtattggctaaatgacgaccattaaataagaacccggagccatcaagtagttagggatctccacagccaaaacataaacctgaatgcaaaggatgtgtcatggggtatcaccttagtcaagatctttcatgtaaaaattgtgtaggaaatacttcaactcctaaagtagtccatataaccccaaatcagaaaactcttgtatcacagaggttaagggaaatcaaagtattgatgaaataaatggcaattttaacagataaatgtaaatctgagtgtctactacccaaatggaaagtagctgaaccatacagccatgatctttccacagagaaaatggtagttcttatatcttgatacatggacatagtaagaagtaggtctactaaggaaaaattgggagttaaaattatttaactggaaaagctaaggataagaatgtgttaatctttaacatatggaacatgattgtgagccagcttttcctagttactaccgtagactgtggggggtcaggctgcctgaatatttcataaagttatcaaacacatttgcagaatccaaagagcttttgtatgagctagaatactgtcattccatctgacagaccacattagaatatttgataggttaaaaaaatggaagtggtacaaactaagaaaatgctaaagttctgttcatttagaacagacttaagagaggaacctaacagtacagctccacactgaactgttttctcttattcttactaatggtatctaagctttggtttactcattagttcagtatgttaatgctaaagttagtaatcccttagactttagtttccagctttaacttttaagactaattgtttttattgtgcatatgtaaaatgggatgcctgtgaatttaaaaaattattttcatttctaaaaacattaataatcaacacggtgatcaatactgggacagaatacagtgggattttaaaaaaaaacacaataatattgaaacacttctaatgataagagtgacttccaataaaatctaacataactttataaggggccattccagttcttaaaactctaattagacataaagcaaaatattatttaaaattccattttctgacaggatcagagtaaaaaaatcactatgtgtccttgagaacagaaataataaagtgacagttaaatattactatcaacaaaaaaatctagcttttactatttttatagatttatcacttatttaagttaaaaattagtaagaagacttgaaaaaggcaatttctagatttatagtaactgttctataatacagcttcaaaataagaacatgtacttacataaatatacttagcatacagttctttaaagaatgttgaaatgttaatagtgagatcaatcaatgacaagaaactgtatcttcctcaggaaaaagaaactaaccactatacaataaaggcaatgactggaaaccctaaattacgttttgttgtcaacaaagtcaatttaatttaataatttaacttttccacagaattaatcactattacttccataccaaagaggtatcggggaaagagtagatctatgaggatttaaaattatttcctatctacttcttacttttaagttgtggtgattcatggctgtgataaagattgtaattttcaagaaacatacaaaaaatccatgttaaataacaacagtggaccttgaaggcatgagcttttgtcactttattgttaaccaatgaatattatccaaaattagagatgtaattgtaacttaattgtacaacacaaaattatgctaatggtaaaagcctactgggatttaccaaatactcattagtgtatttttacattgactatatgaacatgtgctcgcgactgctaataagttataattggtttaatctcta

SEQ ID NO: 8251 - DNA, 2300 bp, Homo sapien
cctcccaagtagctgggattacaggcgtgtgccaccacacccagctgaggtttgtattttcagtagagacggggtttcaccatgttggccaggatagtctcggtctcctgacctcatgctctgcccgcctcagcctcccaggaagtgcggggattacaggcatgagccaccatgccctgccatgaaagttcttaggggttgaatcacagtgccaaatagctttataaagagattatttcagtttacactcccactcaccatgtctgagagtaccctttttatctcaccagccttgactgttatctttcacttaaatatttactaataggatacccaactaaaatgttgcaatttttggtctgtttgctgttgcagaagataggataaaatcaaggcttttggagtcaaacatatatttgggtttggtcactgctctgccacttcctagttttgttacattggggaaattacttacctctttttaagctgtcttattcatcgattttttttaaagggtcaataatagtatttatcccagagggtttttgtaaccattaaaagagacagtcatgtaaaagaatttcacaccagtgtctggcacctgaccaacaacagtgaatccttcactttcagttgcaaaagtgtgttatataatttcatttgattagtgtactatgtaggaatttacataatacttttttttcttacctacttcatgggaagtattacgtaatactttgactatgcctgcaacctgatgtggtaggctgaacaataaccaggataattcttgcaccctagggagaggtaaggagtgatcttttggtggtccctaagaaccacaagaacctatttggtcgcaagtcacacacctggttcccatccttgaggaatttgctatctaaaggcccttgagtttaacccttgagtctcttgggggcttttaattgttcggagaggtctcaaagggcaatagtggaaactcactgaagaggcaggctagtgaaagtgatttgcagatatttcctggaaaagctactgtctcacctaaggtaaatgctaaggcaggaagtataggagttatttgtcctataaaagtaagtatactcaggcgttttgttatttgaatctaaagtttgttcacaaaagataagctaaaaaaagtattgcaaacagggcaagccaggcgaatctgattttgtgcgcttgctgtttgtatactcatagcaagttttgctccctgaatcatcccagcagacaatactgaggggactcagcatggattagatgacagaagactgatccagaagtcaggagcttcctgtctcatcccagccactaactaaagtgagtgggctagacttagtcttaagatcgaatgcctaactttctctaaatctagaattatgtaggtttggcggctctttggggccctacttccaactttttcttgctaaccaactccttccaactgccaaagcatgtcgttggtaataaaaaattatcacacatccttgcttggattaaaatttgcactcctgatttggggtcttatccattgaggttttggtgaagtttgaaaattgtcgctgaaaaattaagtttttctagttggctaaaacctgccaaaataatgtaaacgttctttgttgcaaatctaaattccgctcaggtaggcccttttctccttcccagtccaggatcttcaaacctaacagccaagtctcacgcttcatttggtccccggctccctctgggaagaattcctcctctgggggcgacggcaacgccctcagtgagtttgctggcaccagcgggagtttcaagtttccactcgttggggaggcggcgggcacactccgagctttgggctgggcggctccgcttccctcgaccgcaggtttagctggagcccagcgctctctggaagggctcgaccctccggcgcattcgccctatttccctgggcgctcccgagcccgcagccacccacctcgcgttggccggccccagaccgcgacccccggccacgcccggagccaggcctgcggctgcgagcctgcgggaggggcggggcgggggcggcccccagcggcggcgttggcgctcagtccgcggcgcgaggacggccggccggcagggggaggcgggggggcgccgggcagccccgccttttcccgcggaggcgccgagcggccatattgcggagctgtctgcggtggcggcggcgcctctcgtctcccgcgggccagcgctcgcaccaccgcttctccctccctgtcgcagccgcgccgccgcgc

SEQ ID NO: 8252 - DNA, 2300 bp, Homo sapien
aaatctcgtatttgagaacaatcacacataataaatgaagatagatacgaaataaaagtgtctattcaatcacacacaaacaaaggtattttgcctggatattcatgaaactgaaaagtaggttcttttatttagaatttagaacagaatgactttgctcttactacataaataaatgtttaaactacacctaactggccgggtgcagtggctcacgcctgtaatcccagcactttgggaggtcaaggcaggtgaatcacttgaggtcaggagttcgagaccagcctggccaacatggtgaaaacgcatctctactaaaaatacatataaaaattagctgggcttggtggcgggtgcctgtaatcccagttacttgtgaggctgaggcaggagaatcgcttgaacccaggaggcagatgttgcagtgagctgagatcatgccactgcactccagcctgagtgacagagtgagactttgtctcaaaaaagtactaataataaaagaaaataaaaataataaaataaagtacacgttaacagaatccaaaaaaatgatactttaccacacacccaataggatgactactataaaaaaaaaagtgttgacaaagatgtggaggaattggaactctttttttttgttttttttttccgagacggagtctcacactgtcacccaggttagagtgcaatggcgcgatctcagctcactgcaacctccacctcctgggttcaagagattctcctgcctcagcctcccaagtagctgaaattacaggcacacaacatccagctaattttttgtattttcagtagagacgaggtttcattatgtttgccaggctggtctcaaactcctgaccttgtgatccgctcgcctcggcctcccaaagtgagccaccacacccagcccacgaattagaactcttgtgcactgttggtgggaatgtaaagtaacagctggtatgagaaatagtatggtgatttttcaaaattaaaagtagaattactacataatccagcaatttcattcctagataaatactcaaaagaattgaaaacagagttttgaagaggtatttgtacaccaaaattcatagcagcattattcatactagcccaaaagtggaagaaacccatgtccaccagtgaatgaatggataaacgaaatgtgatatatacatacaatggaatattattcacctttagaaaagaaaatcccattatatgctacaatatagatgaaacttgagggcattatgataagtgaaataagccagaaacaaaatgaccaatattgtatgattccacttatatgagatattcagagtagtcaaattcatggagacagaaaggagagtgctggttgccaggggctggggagaggggaaatgagaagttatcgtttaataggcatacagtttcagtttggcaagatgaaaaagttctgcaaattggtttcacagcaatgcgaatatacttaacactacgggatggtacacttaaaatggttaagatgaaaatatttgtattttaaatatctatatatatttaccatgattaaaaataaaaataaaaataaaaataaatgactctggcagggcgcggtggctcgcgcctgtaatcccagcacttcgggaggcaaaggcgggcggatcgcgaggtcaggagatagagaccatcctggctaacagggtgaaaccccgtctctactaaaaatacaaaaaattagccaggcgtggtggcaggcgcctgtactcccagctactcaggaggctgaggcaggagaatggtgtgaacctgggaggcggagcttgcagtgagctgagattgcaccactgcactccagcctgggcgacagagcgagactccgcctcaaaaaaaaaaaaaaaaaaaaaaaagacccgcatgaacaatttatcaaacatgagatagcgtgtgtgtttatgagtgtatttgtggtcacactgatgtttcatactgtggctatcaagttgattatgtgagtaatttctcacacctgcacaggaagttgacccctctcctcacttcccctcccctccccttcccttcccttccttgtgttacagtcgggtctttgttcttagagctcccgagatggtggcggccggctcccaaggtggcagcaagacttttgttctctgacctggggttcttggcctcctggattccaaagaatggaaccttggggccatgcggtgagtgttgtggttctattggaaaccgtgggtcacggaagagaactgtggaacccagtgactagtgttcagctggattag

SEQ ID NO: 8253 - DNA, 2300 bp, Homo sapien
aataaataaataaagagtaaaaagcgtagcagttgccgtgggaccagagagaccagaaacattccaaagcaatttcagaaatataattaataggaatgatgcctgcatagccaaaagtcatgaattctagttagttgaggcaaagaaggtacagataaaaaaattcaaatgttaagatccagtctttaaatattgtgaaaatttgggatagtacaataattactttcatggattattttaaacattgtttaaaatgcattgtagttattgtccatgacaactttgtaagatatcctttagaattacctccattttaaccaggtgcggtggctcacacctgtaatcccagcactttgggaggccgaggcatgaagattgcttgagctcaggagttcgagattggcctgggaaactttgcaagacctgtctctactgaaaacgaaaaaacaaaaaaaacagccaggcatgctagcacatgcctgtagtcccagctacttgggaggctgaggtgggaggatcgcttgagcctgggagattgaggccacattgaactgtcatcaccaccactgcactccaacctgggtgacagagtgggatcctgtctcaaacaagcaaacaaaaaataagaattacctccattttaacaaccctgagagtgatttacccagggtcacatagcagcttggaggcatggctgtgtaaaagaagttggggcttttaatctctgtattagttaggattctcgagaggaacaaaactaataagatagatagataaacagatgatagatgattgattgatagatagatagatagatagatagatagatagatagatagatgataggagatgtattatgggaataggcttacagaattatggaggctgagaagcctcacaatatgtcatctgcaagctggagaaccagggaagctagtgatttaattcagtgagtctgaaggcctgagaaccaggagctcctatgtcttacagcatcaggagatggttggctcaactcaagcagacagtgaattcacctttcctctgcctttttgttctatctgtgccctcaacagactggatgaaaatagatcttctttactcagtctactaattcaaatgctgatttcctccagaaatgccctcacagacacacccagaaataatgttttaccagctatctgggcatcctttagctcagtcaagttgacacataaaattaatcattacgggctgggcacagtggctcacccctgtaatcctagcactttgggaggctgaggtgggggaattgcttgggcccaggagtttgagaccagcctgggcaacatggcaaaaccccatctctgcaaaaaatacaaaaattagccaggtgcagtggctcatgcctgtagtcccagctactctggaggctgaagtgataggatccattgagccagggacatcgaggctgcagtgagccgtgattacaccactgcactccaaattgggtgacagaatcagactgggtgaccgaatcagtctttcatggtccaaacccaactcattctctctctctctttctctgttgctctctctttccctgacacagatattcacttagcatttaaacgtgacttctgagactaaagtgaaagagatttgtcagttatcaatatgttctgatatttttctgatatagatagtttgataaatagataaatgtataaatattgttcaagtgcttttggagctagtgagttggctgcattgttatgtctgtttcgggaactctagaatgatatgtaaaaccctcttccctcccttctttactttcttccttccttccttccttccttccttccttccttccttccttccttccttccttttatccacatttttttcagcaaacatttaagagtgctaacgatgtgtcagcttatgcttggctccaagagattcaaaaataaaaatgtcaaggtctcctaatctctaggatagggagagtcaaatttgcatgaggacttttgagaaaaatcaaggatgcctgaggggatttgagtcctacaggctcagcacttatgaaaaaggataaagtccttcccagcctggcaggagaaggaaaagcctgtggtgggggaagggagtgaaggcgtgtgcctcctcatggaacacagggtcggagtcggctaggagggataagagtacaatagagggttgtgtgacacagacaggctgccagccctcagcatggacccggcacatggaatctgtgatcttaaaagagtcaagtgactacctttggcaaccaaaagaga

SEQ ID NO: 8254 - DNA, 2300 bp, Homo sapien
ggaagcagagactgggcctctctatcagacattaaaccagttggcacctgggcgacccagtatccagaactgtgagaaaataaattcctgttctttacacattacccagtctgtgtgttattctgttatagcatcataaacagaataagacaaaagtcttcaaacaatgaatggattttgaaaggagtaaaagatgggctgggcatggtggctcatgcctgtagtcccggcactttggaaggctgaggtgggcagattgcttgagctcaggagttccagactagcctgggcaacatggcaaaaccccatctctaaggaaaaaaagaaaaaaaaagggatggaggggtgggagttttatagacaaagaaatacataagcaaacagataagcaaaagcacgtcctcagtaattccatgttgctttatctgtattcatgatcatgtttacaaatccattctggaattctgctgactactgatatttgcaatttttggcattacttctcatccaccttagaaaacctggagaacattttttctatctttaatcttcatatacatgcttaatgaattctgatgattattaatggaaatttcataacatcaatttattcaccaatatttattagacccttgatatgttcaagaccctgtagctggtgctgtcggagtcactaagatgaactatataaataactactctatgtgtacgaataactaccctacaaagcagaaagctatcaagtgccttaagggagttgaaactgtatttgctacaggagggctgagagaagacagaacatctacgattttttttcttttcaattctcttcctacaactaattcatccgaccttggaagtttggtcttactaaaaacaaaagttagctgttcttttacaacctcctcttcaagattacttgtcagggtttgctgtgcccttcgcagcttgaaagactttctcttcatccaacgatttgaggcaattaggagccactgccttctctctgccattgggttccagaaagcaccatacattgtccgcagatactttactcatgcttacactttcttgttctgaatcttcaaaaattagtggcgtgtggtggcacacgcctgtagtcctagctactcgggaggctgaggcaggagaatcacttgaacctgggaggcggaggttgcagtgagccgagatttcgccactgcactacagcctgggcagaatagagagaccccatgtcaaaaaaagaaaaaaaaagtatctgattgtgtttagcatatctgcaatatccccttgactttggcctttagcctctttatgagtaccctgatggaggaaggcccaggaagcggtagccttcctggtttgtgacgcacggtgtgcattgcgtattagattaacatcagaatggccctgaaggctggaacatcttatctgtgtttgagagttatggaaactctgatcctccatgagaataatttttccaaggtctcagatctctaaagcagtagatcttggatctgaacattgctatttctgaccttaaagcccatgcatttcccacaacatatgaaccatgataaggtgtattttaaagttcatcttttctgttttttgtgaaagtcttttagagatctcagctcatcacaaagtttccggttcagtctcgtgggtttcatgtactcagccagcatttacttgccagtcaaggtctaggatggctacctgtcctctgcaggagccccaagcctattcattaatttcatttacaattttatagtcataattatttctttgtataatagcattctgagattttccaaaatttcccactgtttttgttttacagtgggcagaattcactttgctctaacttgactccaagatgacacaatttcccagttttttttttaacggctaggggatgggggtatgcggaacagaacacagtggtctagctaaccgatttccgctagacgtccagctatctttcaaaatattttgtttctgcacggcaacttcagccgctaaaaaagcatccagcttacaacggaacctggagggttggtaaaggccccctgcgctggccccgccccatgggaccgggcggcgtgggcgtgagaggcggggcggggccgcgctctgcttgccaatgtctttataggtcacccggaaggcacgcggaacctcggcgcggtgcttccagcagggtctctccgccactccagccccgcgcccctcgccgcggccctcgggcgtctgcgccgcagctgccgcccccgcctctttggagtctctcg

SEQ ID NO: 8255 - DNA, 2300 bp, Homo sapien
aagagccacgtaagctttctcagataaagcagaatttgccctgcagacagaattcacattattcctcacaaatcctttcttgaacgtcacattgttctcaaagtcttctttgatcattgtagcaacagaaactactcgatcctacacttaggtttttaaatccgttttatttatatttcaagtgctcacgcataaagatacattccctggcatttatttatcttttgtatatagagtgggtcagatgaaagccactgggtttatattatctccagttgatattttaaataatcactgctaagcagtattgagtctctagtatccttcaagcactatactacatatatggcattttatactatattatgcatctataaatgcaagacacttgtctagccactttatttattcttcacaacaaatttaggggatagttgttatcatgtcatcatctcatccgtttacaaattgttttaaagcctcagtactgcactcaatgttacacagtaaccaagtggcataactaggttttggatcccatggattgcttgtcttcaaaacccattctcttcttacactgtaagcaggacgtagtgatagaaaggaaaattagagaacacttaaaattcactctctgagcaatttttaggaatataatgcattattaactataatcataatgttatataatagatcatgtgaccttattcctcctaactgaaattttgtatcctttgaccaacatctccccaacctgctcaccaccacccccagcccctggtaaccacccttccactctccaaaaaggtgactttaatttttccggccatttatttagctccaatccttcagtgcttttaccctagcgcaccctagcctctggcatccaaagagggcaagtgtacattcccttgtgtgtgtggaagtgtcattttgtttattttcctttgcttccccataggatatgcttttctttcttaatcaaaaaggacctctcaccaaaggtatcttcaggcaatcagccaatgtgaaatcctgcagagaactaaaagagaaattgaattctggagtcgaagtacacctagactgtgaatctatttttgtgatagcatctgtcttaaaggtaagaagagtcatccctttatccaccccatggtgtagctctagagaaagagggtgttttactttttcattatgaacattatttctatttgcaaagacccataatagatttattaacataatttttaacactaaaaagtgttataaaaacatttcacaaagtcaacattggactttaaaagctaccactgatgatatgacatatcagatatgctttttaaatttttatcctacactaatctcatctttacttctgccactccatgtaaaaaataaaaattgtaagtttaaaaaatcaaaaaacacacgtataccaaaacagacatcctgcttatgatttcctcactctcttactaccttcttaatgaaggcagttttcaaatataaacattagacatttgaaaacagttaaagaagtttgccataataaacatttggctcacaattgaaataaaaaattgctgagatcactgaaaattccatttattttcataatcatcatgccttcccttttttttttttttttttgaggcggggtctcactctgtcggccaggctggagtgcaatggcatgattgcggctcactgcaacctccacctcctgggttcaagtgattctcctgcctcagcctcctgagtagctgggattacaagcctgcactaccaggtccagctaatttttgtatttttagtagagatggggtttcaccatgttggcccagctggtctctaattcctgacctcaggtgatccacctgcgtcagcctcccagagagctgggataataggcgtgagccaccgcacccagcctaatgccttttactttaaaagtggagtaagaatgacttcagcatctaagttttcctttacttttaccacacttggcattctttgtggttcttacactttacccattgttacttaagtcacatccatggttacagagatagagagttctaaaatgttttctgcccccacattcttggaaatgctctacatttttggaaacacctacagtcaaaatgagctttaagcagagcttttgaccttagcagtatcttctgcagacctgtgtcaggctctcacctcccaaaggattggaatgcaccagagctaggggtcgagacaaggccccagcctgtatctcaggctgaaacgtgaaaaccaagttaaggaaa

SEQ ID NO: 8256 - DNA, 2300 bp, Homo sapien
aagcccacaaaagattcctgccctctggaagcttgcatttctctgagatatagataataaacactaaacatactaagtaaattacatgatatattagaaggagataagtgttatcgaaataaaacagagtaaggaaaattgggagcgtgcatttatgataggaaccaaaagaggctaacgagttgtaagtggatgatttcagcaaggaatgaaaggaactgcaaagccctctgcgtgtagaattcatgacaaactctatggtgggggcaaagtcctgtcgctgcacatgggtctcagctgcaaaaagagagtagccatgaaaaactgtgtgtgtatatgcacacatacataaacacaataatagatgatttacaaatcatacatgtgatttatacgtgtgtgtgatttatacgtgtgtgtgatttataaagcctatgtaagcctactttaaacagtgtgaggtggacaaggcttaaaacgggctggaacattttccccctattatttccacaataaaccattcctgggcatggtggtgatgtgtgcgcgcgcgagtgtgtgttggacagcatcccttccttggaacagagccggccagagccctattcttctacaacctgtcctaataacagcctaacctggcaggaacctcgatttttttcttcttaccacaaaagcaaaccaaaccccttccacaacctaatatcatagcgtggtgtccttcctcactaatccgccactgcttctctagtcctgactccaagggaagaatgccatctaccgaatcatccgtaccagtcaaccagccccgcaaagtgcagcaacactcagctcaacgcgggtcagctccaaatcctctccctctgattattctttggcctttaaaatatttttgcctctatttgggctgacaggaagttatgctctcggcgcagatatctgataaacacttccacatattgtagccttctcaatagcttagccaaatttcggcgtcctcgctctgtctgcattttccttcattgctctttcacgtttggaatgcccccgtctctgcagcctgcagacagcggaaaccgcgggtgcaaatgtgcaggggccgctgacatgaccggctgcagaagcccactcagggttacccgaacaggctagcgttcgggattgcacaagaggtcaggcgatgctgtgggcttccaaatttgtacagctgcgacactctgcgacgtgccaccctatccccagtggggtggggtgggggattccctccgcagtccgctgaaagcgaggcaggaatcactgcaactcctctgctcaggctgaggtcgccaccgctccgcggatgcacgcgctgcaggggcgccttccgccgcgggcacggcgcgggaagggatggggtctggtgggagtgggcaggtggcgggagaggcgcgtgtccgtgcactagaggcccccgtgcgtgacacaggccgatgagctcctgcgggctgcacccacgcggagtcacagaccgaaaaggtcagccggtggccggtgtgctaacatatatagagagacgcccgccaggcgcgccgcaggctgggacgaggctaggagggcccaggctggaggagggctgaggagggctgcgggggcgggccccggcgcagggcgcccggagcggagggggcgggcccgaggcggggcgggccgcggcgctgacgggctgtcgccgctgcactcgcctccagcccgcggtgtcgagcgcaggcggaggtacatggccccgacgggaggcgcgcggcgagcacccggagctcggctccctgcctgagcacggcagccgcgcctccgcccgcgcgtcctcgcccctccggccggcagcccgcggacatgatcgtgtagcctcctcctgggctgggatttgtttgaagattttcttcatggaagcgatgtccccccagcaggagactctagggggacagccggggcgctcctcttccctgacaggagtgtctcggctcgcgggaggcagctgcaccaagaaggtgaggacgctgagcgggggcccgtgccctccgccgccgcagcccccactgccggcgcgcgccctccgcgcccgccacagcagcgcgctaggcggacgccgcgggaatttgacgctcgaggctcgcggcccctaatgagagtcccagaacacttcccgcccttgacggccagcggcagcgccgccgcctcccgcagagcgcccgcttctccgtttctagagccttagtctctcctcgagcgacctcgcagcctccctcccgtctccatccgccgcc

SEQ ID NO: 8257 - DNA, 2300 bp, Homo sapien
cttcccacgcaatgcaaacagcaggttcaaagtcacaaagatgtgagaaggcaaggcgagttcttggaaggtgacttcttggcgaattcaatgtgacagggaatagggtgagagttgaagaggagcaataaatgacaagagaaataagtggaggcaaggatgtctgtttataggcagtcttgcatatcatactatggcatttgaaatttattctgtaaacacaaggagccaaagaagggtttaatcaggggagtgatgtgatcaaatttgtgttcttaaaacacgattctggtgatagcattaatctgagcaaagtcagttttctttaggtatgggacagttttctatgcaaaccaaaactaatgggttttgaagtaaaagcacttaaaaattaagaagtaagagtgagttttccaaatctgcagtaaaatactactttgatttggaacatgtagtattgatcacagatcaaacctgtgcaaaaaagaagatcacaaacagaaacatgggacactctgagtgaaacaaccaactctaccagtctggcccttctaagatctatctcataacccttgtatgcctcattaattcccttagcaaacgaacatttattgcaccagacactgcttcaagcacttggtatacgacaaagaacaacaataacaacaacaacaacaaaagcccacaaaagattcctgccctctggaagcttgcatttctctgagatatagataataaacactaaacatactaagtaaattacatgatatattagaaggagataagtgttatcgaaataaaacagagtaaggaaaattgggagcgtgcatttatgataggaaccaaaagaggctaacgagttgtaagtggatgatttcagcaaggaatgaaaggaactgcaaagccctctgcgtgtagaattcatgacaaactctatggtgggggcaaagtcctgtcgctgcacatgggtctcagctgcaaaaagagagtagccatgaaaaactgtgtgtgtatatgcacacatacataaacacaataatagatgatttacaaatcatacatgtgatttatacgtgtgtgtgatttatacgtgtgtgtgatttataaagcctatgtaagcctactttaaacagtgtgaggtggacaaggcttaaaacgggctggaacattttccccctattatttccacaataaaccattcctgggcatggtggtgatgtgtgcgcgcgcgagtgtgtgttggacagcatcccttccttggaacagagccggccagagccctattcttctacaacctgtcctaataacagcctaacctggcaggaacctcgatttttttcttcttaccacaaaagcaaaccaaaccccttccacaacctaatatcatagcgtggtgtccttcctcactaatccgccactgcttctctagtcctgactccaagggaagaatgccatctaccgaatcatccgtaccagtcaaccagccccgcaaagtgcagcaacactcagctcaacgcgggtcagctccaaatcctctccctctgattattctttggcctttaaaatatttttgcctctatttgggctgacaggaagttatgctctcggcgcagatatctgataaacacttccacatattgtagccttctcaatagcttagccaaatttcggcgtcctcgctctgtctgcattttccttcattgctctttcacgtttggaatgcccccgtctctgcagcctgcagacagcggaaaccgcgggtgcaaatgtgcaggggccgctgacatgaccggctgcagaagcccactcagggttacccgaacaggctagcgttcgggattgcacaagaggtcaggcgatgctgtgggcttccaaatttgtacagctgcgacactctgcgacgtgccaccctatccccagtggggtggggtgggggattccctccgcagtccgctgaaagcgaggcaggaatcactgcaactcctctgctcaggctgaggtcgccaccgctccgcggatgcacgcgctgcaggggcgccttccgccgcgggcacggcgcgggaagggatggggtctggtgggagtgggcaggtggcgggagaggcgcgtgtccgtgcactagaggcccccgtgcgtgacacaggccgatgagctcctgcgggctgcacccacgcggagtcacagaccgaaaaggtcagccggtggccggtgtgctaacatatatagagagacgcccgccaggcgcgccgcaggctgggacgaggctaggagggcccaggctggaggagggctgaggaggg

SEQ ID NO: 8258 - DNA, 2300 bp, Homo sapien
agacttcccatgttctaagctcagcaagactacttactagctgtttgagcatattacttaatatccttgtggcttggttttctcatctataaaatggggtagtaaaagaagctacctcatagattataaagatataactaaattaatgtgtgtaaaatgcttagaacagtgtctggcattaagtaagcactcaataaatgttacctgttacccacaggtactcactggcattaagtaagcaatcaataaatgttacctacagtggatgccccatgtgtatggttggtgtgtggaggtagctagataaggagaaataaagtcaggaagatttttctaaggtaattattgattcaaatctgggagatttatttcctcaacaaatatttactgggcatttactatgcaccaagtattagatatttaagtgtaaagtaataggggttggaaatatagaaggaaaacttcccacgcaatgcaaacagcaggttcaaagtcacaaagatgtgagaaggcaaggcgagttcttggaaggtgacttcttggcgaattcaatgtgacagggaatagggtgagagttgaagaggagcaataaatgacaagagaaataagtggaggcaaggatgtctgtttataggcagtcttgcatatcatactatggcatttgaaatttattctgtaaacacaaggagccaaagaagggtttaatcaggggagtgatgtgatcaaatttgtgttcttaaaacacgattctggtgatagcattaatctgagcaaagtcagttttctttaggtatgggacagttttctatgcaaaccaaaactaatgggttttgaagtaaaagcacttaaaaattaagaagtaagagtgagttttccaaatctgcagtaaaatactactttgatttggaacatgtagtattgatcacagatcaaacctgtgcaaaaaagaagatcacaaacagaaacatgggacactctgagtgaaacaaccaactctaccagtctggcccttctaagatctatctcataacccttgtatgcctcattaattcccttagcaaacgaacatttattgcaccagacactgcttcaagcacttggtatacgacaaagaacaacaataacaacaacaacaacaaaagcccacaaaagattcctgccctctggaagcttgcatttctctgagatatagataataaacactaaacatactaagtaaattacatgatatattagaaggagataagtgttatcgaaataaaacagagtaaggaaaattgggagcgtgcatttatgataggaaccaaaagaggctaacgagttgtaagtggatgatttcagcaaggaatgaaaggaactgcaaagccctctgcgtgtagaattcatgacaaactctatggtgggggcaaagtcctgtcgctgcacatgggtctcagctgcaaaaagagagtagccatgaaaaactgtgtgtgtatatgcacacatacataaacacaataatagatgatttacaaatcatacatgtgatttatacgtgtgtgtgatttatacgtgtgtgtgatttataaagcctatgtaagcctactttaaacagtgtgaggtggacaaggcttaaaacgggctggaacattttccccctattatttccacaataaaccattcctgggcatggtggtgatgtgtgcgcgcgcgagtgtgtgttggacagcatcccttccttggaacagagccggccagagccctattcttctacaacctgtcctaataacagcctaacctggcaggaacctcgatttttttcttcttaccacaaaagcaaaccaaaccccttccacaacctaatatcatagcgtggtgtccttcctcactaatccgccactgcttctctagtcctgactccaagggaagaatgccatctaccgaatcatccgtaccagtcaaccagccccgcaaagtgcagcaacactcagctcaacgcgggtcagctccaaatcctctccctctgattattctttggcctttaaaatatttttgcctctatttgggctgacaggaagttatgctctcggcgcagatatctgataaacacttccacatattgtagccttctcaatagcttagccaaatttcggcgtcctcgctctgtctgcattttccttcattgctctttcacgtttggaatgcccccgtctctgcagcctgcagacagcggaaaccgcgggtgcaaatgtgcaggggccgctgacatgaccggctgcagaagcccactcagggttacccgaacaggctagcgttcggga

SEQ ID NO: 8259 - DNA, 2300 bp, Homo sapien
ccacacacaccctaccttgctttaagccccaactcaggtatcaccctgccttccctgagtctctctccccgctacaaggaagtgatgcgttctgggtttctctgactatcctaggtgtatttctgttcttgcacttagcacgtttgcatcacaattattttattttaaagtatttctctccccactagatagccatgttcttttgtatccccagttctgacacacagaaaacactcaatcaataatcaataaatcaatgtgaccttaggcttttccaaaagtagagcatcacacacaattctagaagcaacatttagattcctttggaacaatcataagatcagtaagctttaaatttgaggctgatttcaaagaagtatttcaagcttctttaattatagcatatatggaccaaatcctgtcaaaattagacacaaatgatgattcaaataactttgttttgctgaaataaggctgcatgtggctttacttgaattaaataatacattgtcttggaacctggatttgtttttcttcttcattttgtatcggtgttttgtatgaagcttgttagctttcaaggaattttcacatgtatatcctatttttgccttctaatcctctgaagacagctaagaagaggtgattatacccattttacacatgaggaaaatggaactgagagattattattgttccaagccagtgactaatgtgtaactgtgattaccagcaacctcttttctccaatgcaccatactacctctggttgtagctttaatttcttcctttcttccttcctttcattctttttacaatccaatttgactcacaaatcaaatatattctggactatctacaaattcaaccagattagagaataattttggttatgtgcctcatacgtacatttgtttttatattctgccatacacactgatgctgaattctgtaccagctgaatttgctggtaagccagcaacacctcaactatcatgtatttaattttaattaaatggaagttgtctaacctactacagaacaacaattataataattatagttagaaaacatcttagaattcctctagtggaaccactaatacagtgtataaatgctttctagaataggccaaacaaaaggttctcttattatttcttcaccatcctcagtaataaggttctcactatccctagaagcaatgctgtcaattttagaaccttggggaaacgttttactctatagtctgttatctctctgtaattccctcatggtgaaaacagcatatttttctggttgttgatactacaaaccgacctaagtctggattccagctctattgcttataagtagctgtgagaccttgcaaataatttagtcgcagacctcagtttccccatctgtaaaacagatcaaatgaagcaatacatgtaaattgccaagcactacaacatcttcaggaagtgaatatagtaagtgctcaataaatatttgttaaatgaatgaatgattccttatttatcctcggccttattttgaagcagtaactcctcatgttgaatcaccgattttcaaaaacaaaacatttatttagtgcagtaaaccaataacaaacaactttcttcttaggaacgtaatcttcttaaaactcctgctgacctgctcactcccatcaggtataatagggcaggaatactgttatgctgtaacctgaatcatacaaatctaacttctacctcatgtatttagaagcatcatttcaagttgcatccaatccttggacttgtgattaaagcataatttgtaaaccttgccagagtaaatcttgacaagtcagagtacaaggaagggactttgaagagctgttgtgtagatgatggaacagtgtttctgtcacttagtagagcttagatgagtctctatcaaagatcaggagacacggctctattgaagctactctatcaaagccacttcaaatccaggaattctatcattctatcaagaaaatgacatcacaatgatcagccccctaaacatgtcctttgggagcttaacctaatgattccatccacattcgttgtgactattccatttgcttaagtcccaggagactacagcaaacgagtgtatcaaggagtgagagtgaagcatacagtcaaagatctcctggcagaaaaacgatccgggcagacaagtaactcaagacttaatgtaagtcccaatttaatatattctgaggtgcttgcaggttctctctcctctccctttatccacacaccaatcacctacttcctgggtct

SEQ ID NO: 8260 - DNA, 2300 bp, Homo sapien
ctacagcaaaaaggcaggggtggctctagaaggcgaaaaagcaaagagggcacttcgcagtgcggtggtgaaacccagagtcagaaagtctccagaggatgaggctcctggcatccccagctctgtggggaggaggaaagggtcttaatgggcagtcattctgagcagaaaccccagtgtcgggcccaggaagagcgggatgaaagggggagggaagcccgctggtagccaggcggagccagaaaaataggaggtgcagagcgaaggcctctgctaggccgctggcctgccacctgggcccagagcgacttcttgctgtgccacacccactagctgccatgttcattcctcaaaacctgagatttcccctcaaaacacagatgggggatgcgggaatcagtctggccagccagtctggctccggtgttcatggccagggcagcctaagtcactcatggcttcttagctgccctgaaggctgaaatacagagcatctttgaggacatctgctctatctgtgggaaggaggacaaaatgctcaaactataataaaagcaagggccaggacccaaaggggtctcactccctgtttctctggactctctgtggggtgcctgtgtgcaggatttctgcagaagatagtccattttgttaagcctttgaatattcaaattgaaagtatcgcgcaatcattgattgtcaaatcatgggtttctagaggttttaaatacttggcatgagggggaaaaaactcaaacctatacccgaaggtataaaacattaattctgtttgtctcctgttccagggacctgggtgcagccggatgctttgtgaaattttaaaaatgttgcatctctgcttctctccctgccccaggagccctcccaggcgctgagtccctgctgctgcagcatccagccaccgacccagctcctgctgaccacgatgtcgggtaactcggctgcttctcctagggtcgggtcaggcgggccaggggcatttcaatccgggtgtgtttccacggcttttcctgcatagaacagagaggcacaaagtcaaggcatgcgagtaagggccggggatccggagaggacgcgagccacgctgtggccgctcccactcagcgcctgtcccggagggcagaggcccagaggccgagttggccgctccggacgtccgcgtaccccaggcccccgcccgccctcccacgtatccactgttgtgtcctgagacacgcggtgcggaccctgcgcgcccagaagctgctacggggggagctagaggctcacagtgagcctgggacgggggcagagcgcaccgactgcactgagccgagctgtggcggtccctgcgcggaccccgaggggcgcccgctgcccgcggagtccggagccgatcggggaacggggtggtggggctgcggtaggctggagcgcggagagggcgcggcgcctgggccctgcgggcggggcacgggattccctgggtccgggctaggaagagcgcaatctcctttcctggggagaccctaactcctggaacccggcttgagggggatccctgctgtccagctgcggtccccgcagtgaccaggcgaggcgctggcatcctggcactatctccaggcgtccaggctgaacgcgcggtcaccctcggccgccgcacccagcgcacttcccggcgcgattcctggacgcacactgcagggtagtggtcagggccggagccgccccggactcctgcggccacctccaccttgaaagctcgcccggctcggcttggcctaacagccagtccccaacctactcactgcggcttttcggggcccggggctgaggctgcccctgctcccagcgctcaggggtccctcccagcgaacccctcttgagcgcgcccgccacctcccgcgagccggggcagtccgaccgggccccgccagccccggggcggcccctaccgaagggcggcctcccggcggagtgcagggtcatcgggagccccggacggctttccccagctcgcgctgcgcggactcgccccggagcctcagtgcgcctcggagaaacgcctgccccagaaagggagggggtagggagagaggggaagaaggggagagtaggagcgggggcgaaggagggaggagggcaagatggagcgcggaaaaggcggagaaaagggacgagggagagcgggcagaaggcaaagacagaagggagcgagggagggagttcctcgggcctggcccctttactaggtcagtctggcaggtacctcgccggcccaggacggggctggccaa

SEQ ID NO: 8261 - DNA, 2300 bp, Homo sapien
aaactctgagcaaagggtgtgaacaaacattaccaaatagctggctttcaatccttggttggaatattagttgctttccccagataatattattatttctcaaataatgacaactaacatttattgagcactcactatgtggaaagcattcttctaacggctttgtatgcaataactcgattaaccctcacaaaatcctatcatccccaatttgaagacgaataaacagaggcaagaggaattgggtaatttgcttgaggatacacaccatggaggaactgagatctgagcccagtccatctggttctggaacctgtgtttacctcccctacatcatttgccccctcccatttcaagaagtcccgctgtcaaaggcctatttcatgaagtcacacattgcacatgaacagcatcaggcacaaaaactgttgtggggcagatgccaatgggctggagaaggaccaatcctaacagaggcaatatgagccccagctgtcagatcctatgttcacacccaaaccaacccccaagcaattgtatgattgaggctttttagggatgagctgccctctcttgggcaataaccccacctagtttatttggttctgttgctgccctgagtgcctttggcagtacttaccgtaggaaggtgtataaagtgtcagggtatacccttatgactgctcagttcaattttgtaataacctgaaactgcttaaggtgttgatacattttagggaagtggtcctgtactccagctgtctcttctgcagagacagggcccttttctgctagatactttaggtaactgatgatttacagataaatgatctcagagggtgagttccagaagaatgaggagggaagggaggatgttccacacagatgctatcctggaaggggcccctaaaatgaggtgaatttctgggagagattttctatgggtctgcaagggctgtacatatatccactgtcttcctaacaaaacgatgtatacttacctgctggccgctcctccccctgcagaggaccaacgcactttttatactttactttcacccatgggggatggatgggctcccccaaatcctgagccccacaacatgccccagctgtcctctgtagcttcccgattgggatgcagctgggtacagaagtcataggaacagcagaggaaggccaggtctgggaatggtgagtgcgtggggccttgagtggcctccacaccttgcagacacagctttgaaagaggcctggcatgggctggggaatgagggaagggcttatgcttacggttcccccggaggccgcctggtgtgcccgtctttgctgcagcagctccttcactgtgatcttcactcggacaccttgatacaccttcggtttttctggagaaaggcaactgagtcagtggtcgagtccaaggtctgggtgccagggtgcagagtgggggccccttttataggctatggcacccaaagccaagtttctaagttcggagaacacacacaaaaaatgtcaaaggatggtaaaaacccaaacatttcaaacttgaaagaatgaagagtagctgagcaggtttcagagccccagtaggaaaagaatccgtggaaatttgtggggccatccacccctggctgggcctcagtcctaggccaatagcaaacgggtttttctgctctggaatatggagaccagtgcagcggagcccaccactctgattaggtcgggggaaccttggctttcagacccagacagccgagagagagggtattatggacctggggaggggccaggcctggggcagggggctttctctgattatggcggctgacgtagcccaccccactgtgatgttcccactagcatggaagtcccgagtcccttccttctccgcctggccaggtgtggcttctgggcaggctccgacctctgcgtgcccttggtctggaagccagcccgggagcaagcggtgaggtttggccagccccgtcctgggccggcgaggtacctgccagactgacctagtaaaggggccaggcccgaggaactccctccctcgctcccttctgtctttgccttctgcccgctctccctcgtcccttttctccgccttttccgcgctccatcttgccctcctccctccttcgcccccgctcctactctccccttcttcccctctctccctaccccctccctttctggggcaggcgtttctccgaggcgcactgaggctccggggcgagtccgcgcagcgcgagctggggaaagccgtccggggctcccgatgaccctgcact

SEQ ID NO: 8262 - DNA, 2300 bp, Homo sapien
acccaaatgagttattgtgcttatagcagactcaaactatcagttagtagagccagttcaatgacaaaacaaagcaaaacctccccctaatgaaatgaagtttgttaccatatatacacagccttaattccatttccaagaactcaaaattccatcaaaaaatccaagagccattgtttaaaccactgacttccaattagtaggtctcttgactttacagtttaaaaaacattaaatgaatattgccaggaacctctttttattgctacccaccaacttacttggtggccgaaaaatctaaatcttgggaaatctaaattacgtgtgtatccaaaggtttatgccctgcagtgtgtggctacttctatacattgacttttaaattcttctctgcttgtttccttggatgatttccttgctgatagtttttgtatgatttcccacgggatggtgcaaactcacaaagcactattaccccatagttagacacaatcaggtatataaagaactgagaaaaattaccaggctctggttaaagcagaaaggggtggcctggaagctgtctgggaaatggtgtggagcactttgtgtggaattgagcaaaggctccgggtgcatctctgtctgaaggtaggaatcaaagatctggtcgaggcagcttgagttttcttcacatgaaacacaactggaaaattctccccgttgcaaataattgggcgtggaagaaattggttcaggctcaaaatacagtcctagaggagaaaggaaaaaggcaggtttttgcataaaaattgcaaaacacagatttgaatggagatctatactctgaatatttactatgtctagggggaaagggggcttaacaaatccagaaaagtaaacgggaatgcaattttgactctttagttgtcctagctaattcaagctccagggaaatgaacatggttaataatgtggaaactggctgtaaaactggttagggcaaaaataaaaggatggtgacccaatttgtgtccaagtgtcacagtcaaataatggctcaaacttcccctttcttgggctgtaaaaccatggacatccagcccctaccggcagttcacgtaaacctctcagaagtaactgacaaagttgttgaggctttgagaaaacttctgatgctacgggaaataattcttttgacttatggtgattgcttttttgaacttttcactcttactcagtaacttaagtttggaggagagaattttgagaagtgatttaaatgagaatgcaaatgataatcatggaaaccaggaacatagagtaccaattaacactattggctcggaagtacaaaaagcaaaaatgttttctcagtgaacatgttaacatcatgatgtgatcaaagtaagttgttaaacatcaaacaaagataatcagtaaacattactccttttccattttattattaataggcccaatttgtgataattatctgtaaatgctggaagaagagaggattagagtgtgctcatcaaagggactaaaggacactgtgttcttcttgaggtctcaagttcctttaaggtgaagctacggtgacacatttagtggggagaggccataggcagaggtttccttatatacgacctccttaaactcttagctgttgagtagcagaggtaggagtgtttatgtaatcgagttattcttattgggctgagaaaacctacacttgtttgaactgctttctgggaacagagaaggggagggaagcccctgtcggctggaaactaaaggaacagagcaaaggcattatttgagtgtcttgggatgttctgtattccatctaacagtgcactaaaaaaagataagttcctgagaacaattctgattttgtagttcagtttagttacttggcgatgaggaactggaataaatgtgaagaacaaactcttgagacaatatagcagagagtagagaattcagaaatgaagacaacatttatgcttgttttcttgctgggcttgcatgtggagtgactatgcctttttcaccttctgattggttggattccaattaaatggtggtgcctatcttaacccctgaatcaagactgaaagacttttgagatggacttttgaaagagtgtttgagggaactgttaatgctggctgtactgacctgcagaagatggtgcaactgggtctgaaaggtggacactgctgcctccggaccgctgtcaaagcaagaatatcaccgtgaagcaggctgaaagaaatgctctgaagggaaagctaagacattttgatgaggactat

SEQ ID NO: 8263 - DNA, 2300 bp, Homo sapien
ggaagaaatgagctggaatctgcctcatgagctgtgaggccataagaggtgatgggtttatcgctggccatgatggtgggcttgcccactgacattttgtttttctgccactgtacaagatctgatttgtcagagtagctctgggtctcaccttttccttccctctttccagaggacagaaatttattccgggggatatagcttctgttgatctgcttcaggttttaataataatgatcctatattactactaacaaacatggctgacacttggcatttactgctttcaacttaataaatatcttttattttaatgatttagagctctggctctagtcagatgaacttgggtctggcaccagcctataacctgatagcttggtgacattggacagatgaaattccctaagcatttgtttgtttctctgaacaatacaggtagacgtttccttgcagcgttgttgtggtgactagattaggtaatgtatttaaggcttaacatggagcctcttgcacagtaagtggttatattattactttgtggaaatcatcatgctaggcctgtggggagaaactgagatgaataagaaaaagttctgaatttcacggacttggagagaataagacatgaccaaaagagacaaaagacagacccgtgggagagaggaccagcgaggccacatatcctcctacgaacctgtgagacactcacagaactggttcttcattttatagatgaggaaactgaggctagaagagttatgtgacttgttgaaggggacacagtgagtgagtgtcagagccttcatgggaacccacgtctcctgtgactgaggcaggcctgagggatgtgcctctgtttctcatggaaactccttggcgcagcccaaggccttgagatgctgccccctgccaggccagggtgtgggctgccagccaccacagcatgggggcctccactgtcctgaacttcagaggctttgcggggagggcttataggcagccaggagacagccttctctggcttttaagtgaatcatttataaaatgttgacagcatttctcctcaagacctgccctcaaatcagcaaccgattagagacagtaattcataactttatcagatgaatttttattgggggtcactatgctccaggtcttgtgtggggcactggagaggcaaagatgaaacctccttgagaaactgtcagagtcatgtgacaattcaccatcacataatgaacaaagtgctctaagatctgagaagacgaacaagtattctctgggctgggggtttgtccttccggcaagagaggacggcaaggtcaaaggcagggaattgcatgggtgtttggtggtgcttagagggcactgggaccagtggtaggagggcagttggtggtgaggctggaaaggaaggcaacggctcgattgtgggaggccttctaggcctccagctctgtggctgaagggagaaggtgaatgctttgtaggctaggggatagcatgatcaggtctaggtggtgcaagatggctctgaggcagtatggatggcagagcagcaaggccccacacctgctctagggggtgtgccaaggggtcttgaccccaaactgactgagtccctggagcctgagcatgtggacctcagatatgcagtggcagaaggcttccaaactgtgaaggaaccggtagccaacaccatctacacttccagatggtgagcccatgacttacttaaagaagcttcctgttatcagtgggtgggcactcgcaaagaggctctgttcatcttgtgcctacaagcccagatccagtcaaagagcacgggcatgttctccttccttccttgagggttggcctctttttccgtgggcatagccgacatcagagccagcgcccccatatttcagcatgattaagccttgccattttgggggtggctgggggcgaggggaggggctactgtgtttcaaaatggaataaacagaaaagcaatattgaaagaatgaggaggttgtttactgaggcttgaagagatgacaggtgtttcctcccagttgagaaccagtgacccctgggaatcgcatttcccgctgagcaggcgcccatggcgggctgagtcctgcccatgccctggtggcctggaagcctgcatgggcgccgtgcaaagatcaacgttttccagaggagcttttgggctcatcactggcctggggagggcttgacacggggttcccacagcttgccccacaccaccttcacacccacacacagcaggtccccgcggggccggtgca

SEQ ID NO: 8264 - DNA, 2300 bp, Homo sapien
tgaggttgaagagcaggtcatctggactgctgggatgattttaaaggaaactttaatatctcctggacaagccagcagctggtgtctgcaagtcctccaggactttgcaccttgagacttggattcaggggcagctgagaagatagactgtgaactttcctttgccgagagaactggactacagcttaatggctggaccctaggcatctctaggacactacagttgtccattgtagattcctttacctcaagccacttctggacctgcctgtccttgggtgcctggtgctgagtcagcaacacctccctcctgtcttggcaatgtgtggccaaactaagccaagtctgattataatgggttggttcatctagaagctcacatcccgtactctttttccaatatggcacttagccaactggcacccaatagtgaagagtgactctgggaactgaggctgctgaggactcatgaccctgcagaagccaacagcaaaagctgtgtggagggtgaagccatcccgctgccaggcctctctctctgctccatgtcagttcctgtctggcagcgccatggccttggctggcagtcagagacccgctgctggtacttgctggtggcttggctctcttccatctagccagggcatttggaccttttttctatgttctgcttatgagcttgggaagcgagccagtggttctccttggaagttgcctccatccttgtcatttcccaccctagtcccaagggagacatgtttctttctctcttccgtattgacaccttctcttgcctttggctcaaatacagacacctcaggtagcaccagtgctgtggggaggccaaggggcgaggggcacgtacaggaagtggtggtggcaaaatagagttaagttcggttaccagtgctggatgaagctttgtatctctagggttgtcagtcagccaagaaggaaggcagttacaggcctaattcttggttcctgaactgattggctgtagcttttatcagggactcactggcacttctctgagcatcagtgttaacttctgtcatgggctgaattgtgcagcctccttcttctcctccaagtttataggttgacttcctaatccccagtacctcaggatatgactctatttggagataaggtctttaaggaggttatttaggtaaaatgaggtcatatgagtaggccctaatccaatatgactggtgtccttatgagaagagattaggacacagataggtatagagggaagaccatatgaagacaaagagagaaggcggccatctggaagccaaggagaggagctcccagaagaaacaaccccgctgacaccttgaccttggacttgcagtctccacaatggtgaggaagtaaatttctgttctttaagccatccagtcagtactttgttttggcagccctagtgaactaaaacaaactcctgcagacgtggcagagagggtttgcagaagggccaagagaacggtggcttagatgcttccggttttcccagcttcttcatggactctcaaggttggtggtatccctttggcttctctagttctttctgcttcagggagctaccaacctcctctggttttggtggttagcctaagtagctagtaaatagagtgtttctactcttaatcttatttcccctttatgaaaaccttatgataggcgctgcagaatctccatgtcacccagcatcgttggtcccgccctctggaagctcacattctatgcggaagacagacatgaggatcacttcactgcagcataggaggtgctgtgatagtgctcagcagggggcatgaactaaggaggacaccttgagcccacctgaagaagaaggtcacagaatgctttgtgatgatgatggccaagcctaaagtctgtcagttctttgaggacagaggctgggtctttctcaccttccttcacccatggcatctagcacagcactttgcacataataagtgctcatctaatgtgttgggcgaatggctctcttaaagtcccttccagcttcatgatgccataattctgtggcctcagaggtcccacagcagtcagatggcttaaggtgctgctggcagacggcgtgaaggtgaacagacatggggttttatgatatgcaaaatcactcatgaacaactaaactggaaaccagggaggagagcataatgagcttcccttcttagcttagatttctaggagaatcctcaggcataacaacaggaacacagccagtgcagctgccccacgtggatgatcagaggcgacgt

SEQ ID NO: 8265 - DNA, 2300 bp, Homo sapien
ctgagggtgggggctgctgggggctgcagcaggttgggagccaggcaggaagagttccagatgatgagggagttgaaaggaattttataaagatattgtctgcgacttgggttggataaaagtctccgcagacagggctgttcacctgctaggcttttgttctgccctgcagcgtctgcttgccacacagccccagggcagggtgatggtggggcggggtgatggtggggagggcatgctgtctgccatctgccggagaaatacaacaaacacccacacgcgagccaacggaaactctcagcaaaacaaacggcgctcgctcgagggcgccttgcctgggtgtgtggactggaggggcaggcgcgggaaggtgaaggggcacctgccgggggaggggctgggctagccgcctgcccctgggccagcaaggtcaggtacggtctgcacccatgtctgcctggacccctcaggcctgttaggtgaaagcccttcttttgttttttttttttctttttttgagacggagttttgctctcgttgcccaggctggagtgcaatggtgagatctcggctcactgccatctccgtctcccagattcaagcgattctctctgcctcagccccctgagtagctggaattacaggcgcccactaccacgcccagctaatttttgtatttttagtagagatggggttttgccatgtttgccaggctagtcttgaactcctgacctcaggtgatccacccatctcagcttcccaaagtgctgggagtgctgggattacaggcgtgagccactgtgcctgtccaaaagtcccccatttatccagttgccaggtctaaaaagccaggagttacaaagctggaggtggtcgtcaccagttctattgatcaccaaattcagataatcagggtgctggatttgcagctactgatcgagggtgaaatgaagagtaagacggattgggctcaagacctgacttagccatttctgtagacacttctgtgagccccttgcttccttatgtttaaaatggggtgataataatggctaacctgggaagttgttatgagaatggaaataatatctttcaaaagtactttgcaaaaatatatctggtggttattaacattttctttgtggctctgggtatttgcttctggctttgtgacatgcagaactcttctgcgggggaggtcctcagcctgggtgaagagcatttgggaaatcgtgcagcttgtggggcttgtgagcataaaccttggacttacagctgggctctgaggcccaggtcagtgaggaaagtgggagctgagatggcttagggcgggtggggtggagttgtgtttgattgcatggtaacactaaatatctggctgtggcctcaccctggggggttgagggctgggctatagatcttccccaacatctctgctccccttggggatctacgtttccccctttccccagaatccacagtgagtggcagtgggcacgagtgtccacaaacctgttgggacagggtaggcagcttgtttgctcttcccagggccaagcctggtgggctggacccagaagtattatgttactcagccaaagaattcctttcctcgcctgcctccatttataaaggggaaacaaaaccctgagcggtatgctttcgtggtgccaagccaagtcctcaagtgtcatctctggggagctgcctcctccccagggcagggtgcagcctcctggggaaacagcagcccttctttctccttcccacccgtggcggtggtggcggtggtgtccccacttaccctcaagagaccttggattctctctcactacccccgagtgctttccatatccaggtctgagcccttgagagtggggcagggcttgtggcttcccttggcccagtggagaacgggacagggttgctgggtgtctgtctcagttccagctggtgctagtgtactctggccaacagaaccaccaaacacatcttctgtttgctttgagaacttgagatggattttagatcctccagggcacgtactgctacacttcagagttctggccagaaccgggcagccctggggaagcctgcaccagtgctgggccggcccttccgagttgtgtcttgctggagagtcccagggccaggtgaggtctgaactttagaggcttgtcaggtgagatcttattctgcagccagcgctgggatggctgatggaataagggtcaggcaggatgagtgaaaggtgagaggtgtcaatgaaggcattgttcagggcttgggctgggaaggac

SEQ ID NO: 8266 - DNA, 2300 bp, Homo sapien
ttatacattacaatctccataaatttgcttgtgtttttccttcacaaattgctcctgctaccaaaacattccctcttcatctctagtatttttgcttctaggctcatcttttccatatagccttctctgtgtcctaacctttgataattttccttttcctttttcctaaatgttggcaataatgaagtttgtattagtcatcaggattcctgaagcactttttcatataaccatcttgatattaaataattatatataatataaatagaatatataacacaaacatgaattcttaatctattactataagttatattaagatatattcatattacatactaatataattaacatattaattatctatatatacacacattgtccatctcaccaactagaccacataaatccttagagattgttctctaaagatggaaaatatgcaacctgtttgctcctactgaagccatacctaagagctccggcaactttaattatagagactattttgttagactgcttatgatttacctgaaagataaattaacattttatactgaaagcaacagtattgattaatcaataaatataaacaagaagctaattaagaatctggtgcactcttactaatgagagtacaatgaaatgaaactagaaatatggaattataaaaaccgctggcagttcattttagctcaaaagaaaatcttctcccataaatagattcaattatttttagttcttcaaaggcactgaattgacttcaatttagtcttgcttcaacatataaactagtttctaggtatactatcaagaagtttaataatctgacatttattgatctataaaccaagatatggttttatatttcctatgagtaaatatgcatttaaaaaaacaggtttaggccaggtgcagtggctcactcctgtaatgctagcactgtgagaggccaaggggggtgcggtggatcgcctgaggtcaggagttcgagaccagcctggccaacatagtgaaaccccatctctactaaaaatacaaaaaattagccaggcatggtggtgggcgcctgtaatcccagctactcaggagtatgaggcaaaagaatcgcttgaacctaggagacagaggttgcagtgagccaagatcacgtcactgcactccagcttgggcaataagagcaaaactccatctcaaaaaaaaacaaaaacaaaaacaaaaacaaaaacaaaacaggtttataaagaagctgctaaaatccagtaatttctaattagtctaattcttcatttcttcctcttccaacaacatccttcaaaagctgtgggagatggtgagtttgtatgtattgaagggagggatatgttgtctccaattgtctccatctttttttttcttttttcttttttcttttttttttttttttttgagatggagtcttgctctgtcacccaggctggagtgcagtggcacgatctcggctcactgcaacctctgcctcccgggttcaagctattctcccacctcagccttccaagtagctggaactacaggcgcgcaccaccacgcccagctgatttttgtatttttagtagagacagggtttcaccatgttggccaggatggtctctatctcttgacctcgtgatccgcccgccttgacctcccaaagtgctgggattacaggtgtgagccacaacccccggcctgtctccaccttttctaattcccaattcccatcaatctagtcttgtatctagaagtggtaaattaagtcaatataaatgtgccaaagctaaagcagaaggtatttgttttctacactcttcttggcttcctcctagtcatcaaccttgtctctcctgatagctccttttccatctccctaatcaccaaaagcccagaaattaaaacagtaaacaattcccctgaaaggtgccttccttgtactgtctaaaacaaatgcaatcctctgtgtgggcatttaaaacaccacaagcattcttacttagattaaatcatgggtctccctggtctccaggcatgcctagacatgaaccataaagggaatgagatccttggagtttctctagtaactgcaggccaaatcaacagcaaccctaagaacaagcattcttttttttttttcaacagaactaggccacacatattttttgtcgttatttaaatttttagttgtactacatagaaaataaactcattttaaaaagttatttcagtaggcaatgcatcttcatgacttttacatatgagttttattttttattacttttgaagaa

SEQ ID NO: 8267 - DNA, 2300 bp, Homo sapien
ctcagccccattgccccaatccccacttccaaaccagattgccagggacagcacctgctaggtggaagttctgagaacgttgcgctggagaattcacgcctgaaagcctagcccttgggagctagaggcctgaactgggcggatacgtgcccatgtgtacagtttctgtgattttaaaattctgaatcctttaaatcttaggaaacaagctggatttaaagtgtaagtgcatttactaatcactcccactaaaagttgcatagactccaacagttgtaaatgattacttaaaagaagggatacatcttaatgagtgaacagagtctcttcatggaaaaaagaagtatgaaaaattttgttaatgtatttcttataaaagtattaacaagtctgtgtgtatgagtagctttcccgggagatttttgtcatggcaggaacaacttaaccacttcattgatagaaaagttaagattactgtggcaggaactgagatggacatcataaagtcaatttagcaaaggaaatggacacatagcaataaccacaatttatgtctttatggcactttattctttcgaaatattactaacaatattactttcaaaatattactaacaatatagtctcaagaagttaataatcacatgttcatataataacatacatcagtcagctaagaaaaaaatcatattcccccttatatctaaaattttggttaagagcctgaaggaatattgaaaaaaaaacaaaacaaaaccccacatacatacacattacatacattgtaaacttagtagctgaaatgttgatttttttcttttggctgagcaattaataggcaatggatgaaatcagcattttccaacacccctcttccccacgcacattgatgatgcacaggcagctcatttggacgaattcccaaatctttttacctggccgtgtggttagtgattggtactattagcaatcagctaactacactgcctagtaactagactcatagaaaaaattgcagtctcaagttggtaccccaacacgttgtgacaggcaggcaattcattggttgagttggagctcaactgagttgctagcttggtgaatactctactagacgatggcaaatagacacagtgaatcacagcatacagtattaaccgttacatggatggaggggcttcacctccagggattttgctttcctggcatgagactgtttcatcttctgtgactcctagagagagctaacagtttaactgtatctggagaaaccgcgggtttcctcgcacttgcagcgggcgctcgcggggcaggctgcgcaggacccacgccgacgccgcgcttctcaggcatcttctctcgaaggctgcgggctgcccgagccggcgtcttcttcccggccgggcggcggtgatgctgtgccttgttttgatggcagtggagttagtgattgtaaccaccacagtacaatcagctaatgacactgcctacaaaccgagcaccgggcacccgcggctgcagctcccggacggtccgcagcgccgacgcggggtcggggcccgcctcggaccccatttcaccgggggacgccctaccatggctgggcgcaagcggcccccgaggacacccccgggcccagcgggacccccgccggcctcgcagcgcacaacacgcgtagctgggccagcgggcggcgctgccggggaggacccgcgccctcccaggccgggagccgcgccccgacccccatgacccccaggagtgccaggcctccccttcccgcagcctcccgctcctctcagggccctcccgctcaggttcccctcgcttttcctttccccttcgcctcctcggcccgggctcccacttccttcacgccaggcttcagttcccagccccaaaccctagagctggctctctcgaccccgtgcgccccgccgctctgagcggccgagtgactgtggcgggggcgaccaaccgtccttggaaccccgcgggccgaggggcggggcgggcgcgagacggggcgggtgggggaggggatggggggggggaggaggctgagagaaagcgctgtgggcggtccctgaagggcctccaagggagacgcctagaagatggaggcccagattcttgagacgtttctctttctgatctagcaggagggacaaagagctcctccactccctcattccccaagaaggcccccagcctacccagtttccgtgaccattccgccctgggaaagcggcttcccaggtacctcaaattataggtttgaattttccaaatggaggtgg

SEQ ID NO: 8268 - DNA, 2300 bp, Homo sapien
gggtcatgggggtcggggcgcggctcccggcctgggagggcgcgggtcctccccggcagcgccgcccgctggcccagctacgcgtgttgtgcgctgcgaggccggcgggggtcccgctgggcccgggggtgtcctcgggggccgcttgcgcccagccatggtagggcgtcccccggtgaaatggggtccgaggcgggccccgaccccgcgtcggcgctgcggaccgtccgggagctgcagccgcgggtgcccggtgctcggtttgtaggcagtgtcattagctgattgtactgtggtggttacaatcactaactccactgccatcaaaacaaggcacagcatcaccgccgcccggccgggaagaagacgccggctcgggcagcccgcagccttcgagagaagatgcctgagaagcgcggcgtcggcgtgggtcctgcgcagcctgccccgcgagcgcccgctgcaagtgcgaggaaacccgcggtttctccagatacagttaaactgttagctctctctaggagtcacagaagatgaaacagtctcatgccaggaaagcaaaatccctggaggtgaagcccctccatccatgtaacggttaatactgtatgctgtgattcactgtgtctatttgccatcgtctagtagagtattcaccaagctagcaactcagttgagctccaactcaaccaatgaattgcctgcctgtcacaacgtgttggggtaccaacttgagactgcaattttttctatgagtctagttactaggcagtgtagttagctgattgctaatagtaccaatcactaaccacacggccaggtaaaaagatttgggaattcgtccaaatgagctgcctgtgcatcatcaatgtgcgtggggaagaggggtgttggaaaatgctgatttcatccattgcctattaattgctcagccaaaagaaaaaaatcaacatttcagctactaagtttacaatgtatgtaatgtgtatgtatgtggggttttgttttgtttttttttcaatattccttcaggctcttaaccaaaattttagatataagggggaatatgatttttttcttagctgactgatgtatgttattatatgaacatgtgattattaacttcttgagactatattgttagtaatattttgaaagtaatattgttagtaatatttcgaaagaataaagtgccataaagacataaattgtggttattgctatgtgtccatttcctttgctaaattgactttatgatgtccatctcagttcctgccacagtaatcttaacttttctatcaatgaagtggttaagttgttcctgccatgacaaaaatctcccgggaaagctactcatacacacagacttgttaatacttttataagaaatacattaacaaaatttttcatacttcttttttccatgaagagactctgttcactcattaagatgtatcccttcttttaagtaatcatttacaactgttggagtctatgcaacttttagtgggagtgattagtaaatgcacttacactttaaatccagcttgtttcctaagatttaaaggattcagaattttaaaatcacagaaactgtacacatgggcacgtatccgcccagttcaggcctctagctcccaagggctaggctttcaggcgtgaattctccagcgcaacgttctcagaacttccacctagcaggtgctgtccctggcaatctggtttggaagtggggattggggcaatggggctgaggaatttaaagtttatttagctatctttctggggggaggggagaggatgtggcagcccactgaggatataagaagctaaactactcccccactgactccgacaggacacaacccaaagttgacgttttgactctcccatatccaagatttggactggtcctaaaacctgatcaccgcaggggtgggcttccgacggcccccacgcgcgtggcggatcccaacacctacctaggaaaccgagggcagccggcaggggctggtaccaacttggcggttctcggaggggcggggcaggggcggggcggggggaggggagaggacgcttgcagaagcgtcctcagttgccatggaaacgggacccagcgaagaacctagcggccgaaaagagtcccaggaaatgtgccccccgggattactggtatttgctggctcctcggaacaagatgccaacttggctaagcagttctggatctcggcgtcgatgtatccccctagcgaatctcagctggtgctgcgcagagacagcagtcagcgtctgccggtggc

SEQ ID NO: 8269 - DNA, 2300 bp, Homo sapien
acttcaaacacacacagacttcagacacatgcacacacacacacacagagtgacagaatggtttcttcattcaatctttactctaaaaatgagttagcatcaaccatgctgaagaagaaaaatatagtctctgctctcacagaaacattcttattcttgtagaaaacgcatgcttatcagaatacagcaggtggagctaatccagcttgagctcagccttgatcatagttaatttacttatttgaaggtatcatgtggctctttgcaagatgtggctaaagggtaaagatagttgaattatagtggtatttataaactgaggagctttctaagatcgtagtgtaaatgaaatatttatgcaaggattttaaattataaattaattgtaaaatgggaattacattccaaattcagaatattacctaggcagagccaaggttctatggtttaacagaaattgagaacattatctgatttttatttccttgagcctccagaatttaattttcttttttttgagacagggtcttgctctccactcaggtggaagtgcagtggcaccatcagggctcactgccacctccacctcctgccccctgggctcaagcaatcctcccacctcagcctcccaagtagttgggaccacaggcacatgccaccacgcttagttaattaaaaaacgatttttttttttttggtagagatgaggtctccctgtgttgcctaggctagtcttgaactcctgggctcaagccagtctcccactttggtcagcctcctgaagtgctgggattgcaggcatgagccaccatacctagccttaatttttaattctatcccagtgattgagagttaactgtctataggtgtactagggaatttcagttcacattctgcaagaatctcactcctcagtgggttccatttcatttttatgttacaaatgcaatcattaggaaggtgagaattatgattgacttaaggtttttattgatttatcattttaaaacatctcatatttgggcctggtttcaaaaagcagtatgcatcttggcttgctgattttgataacagaatgcttcaactatgaatttactctatgaatttactaccattccctgtgcctattaactgaaatctgctatgttgattctacaactaccatataggaaatttatatctactctaataataagatacagaactgttggacctcaaattatctactatgcactttaaaagacaggctgaataatcagtgagaaggctttccccagtataatctgattttaaaagatagacctaactatagtaatctatgggagtggatcgaagatgttacaggattattaatcagagaaaggaagaatgctgacttgcaggaaaaagatgcagatctaagcacctttctatacctcctggaaattgcttgatcttggctcaactcctaggtctgacatatacacttttcatttgaaaaataacaacttactaaaatgagaaaaaaaattagtcattatataagagggagtcaatacaatttttcttaaatgcagatttcaatcaagtatgaatttatctgttgtgaggaagaaaaaaatgtgtattttcttggttctgttacatatattttcttagatctgttacatatattttaccaataataattgcctgaagaacgtacatgcatgcacacacaaaatgcatgcagagcagaagtacaagtgatttaaaaaactgctttaatattgctttaaaaggcacttattttaaaaaagtaataagtgagatttgtattttaatattgagaaaatatgagcataaaatgagcactgcattttaaaattcaacaaagtatacatatattgagggtaactctatatgattgaattatatgttattgatgattcagtttgcaataattatcaaagcttttccttagcaaagactactgagtcttgaagattttcattgttgctggttatatgagctatgatgagtgggtgaatgatactgacctcatctttcagatatgtctttcctgttctgcccataatgacttaagaaggagaggttagggattccccacacagatgacctcaaacttcatctctggctcatacttcttctttgagtttctagcccatatattcacaggcctatctgacagttcacctgcttttctcaaaagcatctcaaactaggtaagtctaaactaaacttgtagcccctcccccacaaaaccccccaaacctgatcttcatctaatgtttcctgtttcagagaatgacactacccat

SEQ ID NO: 8270 - DNA, 2300 bp, Homo sapien
acaattctatttctcaatgtgtaaatatattagtctcttagattgggtttgagcatgttaaactaggaattggaccctggaccagggtaattttaccaagaaaaattctactttgtggactttcttggcaaccagccttcccctagtgatacctccctacattgccaagtgtaatggttagctattgctgcaacaatgctgcataacaaaggggtctaaaacaacatttattactgctcacacatctgcagttttgtgtgatctagtttggctgacctaggcttagccagagagctctgcttcaagctacagcacctagagcagctctgtctcttactgcaagtttgtcaattgcctgaggtagctctgctccatttgtcatcctcttagggatacacatagaccagtgggatatctaaggtatgttcctctcagagagtggcagagaagaaaaagaaatatgaggcctttctggtctaagctcagaactgactcattctgttagccaaacaagtcaatcacatggtcaaacacaaagtcaaggtgtggggaaatatactctgcctctttagaaagagaaactacaaagtcatatggtaaaggatatgggtacagggaggtgtggagaattggggccgttattgtaatctaccaggtttggttgactgtataccctaacaaaatccatctgaaccaaggtccagggtatcaaagcgagaagtcgggacacgatttaattatgtaacagctttttaaagttgtagcagatgttataatattagaaataaatccttttcaattgacattaagtgcctagatatctgaacatttacatatatatttgccttatcaaacactcactaaactcttaaggcaactgttaatgttaccaacagttaagtgaaacttaggcaaacggaattgccaaaggccacacagacattaaatgaagagcagaatctgaaacagaccctcaaatgccaactccagtgcttcttttcaccataacagttctctcaagttgttttgataaccaagaatttctaagaagaaagtgtgttagatgtgacattgacgtattctaactgggacagaaggaaggtctataaatgatcttgccataaaggtcaggcctcatcctgccacaaccgctgttagctgttacgtgccgcagcagagctcccccatagtctcagctgatactgaaattcatcccactcccctctcacccccagcctgtattcaggctgtttgtttagaattgcagtggctagaggccttagaagcatcactgctttcttggctgttttgaaaagcagaaagagtacgtaagaagcagcaagctggaaccaaaatccagaggtcgtggcccagatggggcttctgctatgcttcacagcagcatggtgtggcagaaaaggcagaaagtcagattcaccttctgctacttagtgccttaatctttggacagatggctcactctattgcttgactatatttaaaagcattttgtttacgaaaccaaagtgaaacacacctactttgggagtttacaagaggaagcacacattgagggctaggttaggaaagcttttcctgagataatagtttcattctttcctgcggggcgaggggccaaagctgaactccctaactatgacccccacctcccaacctgttccctgcaaaaaacagaatcatttccttccagggatctgggacatcttttggcttctggtagaagccgctttcctttcagtcgggagggctccaactcagccaagttctttggatgccatccgcgcggtgtcccataactttcctggccggtgggcacactgcctgcgtgagtgtttgttctctgcatcgaccattccctgctcaggcgtcgcccttcgtgctgggactgcggcctgctgagccccaggtaggagtccacgcatcgcctctctctccaggtgcacccgcacagctggcgaacttggctaaggtcagcgggagaggaggggtgagatgtggtgctagttttaggcacactgtgctcgttatcagattgcctaggggcccgactgaagtattcctccgcccagcgcctcgggcaaacgcgggatctcccagggaagctcggagggggacagggagctggttcccctctgcgactcgcccctctctggctggccgagtgtctggcgccaacctcgctggaggaggctgtcgggggcgggccagccagcggggctgccctcctcgcagtgacgtcccagggggcggaggggcgaccgactgactccgcgccctcc

SEQ ID NO: 8271 - DNA, 2300 bp, Homo sapien
ctttagtgccatgcctttttaaatcccttaaatctagaatggttcctcagcctttctttgactttcatgacactgatgttttttaaggatacaggtcagttgttgagtagaatgtttcttagtttgcatctttctgatgtttctagatcataatatgcatttttgacaggaatactacttaagagatattgtaacctcagtgcctcacatctggaggcacatcatgtcattttatcacataattggtgacattaactttgatcatttggttagggtagtgtcggtcagatttctccactgtagaggtacccttgttaaccctttatcatgaataagaaatccaaagactgtgcaaatatcttgttccccagccaaattttattcaatgattttaacatctattgataattgtctgaatccattattactgtaatggctgccaaatgatttgctaattgtcatttcttctaacatatattagttggcattccaccgtcatttcacttctcccctctttatttttctgtttaaaagtaagtatgctctacgattcttttaaaaaattcaatgtgttagaatcaatttctatatttatttatttatttatttatttactgagacagagtctcgctctgtcgcccaggctggagtgcagtggcacgatctcggctcactgcaacctctgcttccctggttcaagcaattctccctgcctcagcctcccgagtagctgggattataggcgcccactaccacgcccggctaatttttgcatttttagtagagatggggtttcacacaggctagtcttgaactcctgacctcaggtgatccacccgcctcagcctcccaaagtgctgggattacaggcgtaagccactaagcccggcccattatttattcctgatactcaaactgtctcagatttggtaaggggggagcaccttcgagccatctgctttcttttgacatatcttccttgacatagccaagaaatctccttgctttaaggagcaggatctttcaagggcattttatactttccctgtctctgccctcgaatgagccatctcgccacggagtctggctcctttaggtggagaatggtatttagaaaccaagatataaaggcatatgatacatctcaaaatagtgaggtgtcactgtccctgtttccttgagtcacatttggaagcgtggtgtgatttataatcctacctcgactattgcctgtgtgacctaggcaattccctttattccttgaggtcttcttcgtcctttggggaaaaaaattggattagagaaatatttctaaactttttcagagtcaccaacgcgtttgggaatctgacagaagctacgggtccatctccccagagacatgctcacataagcaaaaactggcctgtgttttagggggttccaaactctgaagctcacatgaggctccaaatctctggattaagtgatctccaagatctcttcagcgctgacattgacattctgtgagtctataagcgactgcactgctgtcagaatgactcctcggagacatcaaaacgtggagggttttattatatatagcaacgagaagagaaaaggacacaaagaaaggagcctgtgagcaacgcattgctcagccacagttctttgccggtgccaaatttaggacgcgctgtacttgtaggtgagaggttttggcgggaaggaccccgggtgggcggagaacgccggggcggggaaggagatcgcaggccgcatccaggtctctgcacccctccgcacggtccgccagggctcgctcttgcccttcgcctggaaggccgaggaacggagcgggccgagcagcgaccccgcccctggcagcggtgaggcggaggggcgaggggagggcgtctgagcccggaaggagcgcgccggccaggctcgcgcccctccccgtgcgccgtcccccactctccagcagccgacgtcggcggtgcttcggtcgccatggtgaccaatccaggctcgggcccgcccccgcccccctgccccggccccctgacgtcggcgcacgtcagcggcggcgcgcgcctggctgggccctggggagcgggagggaaggagcgaaggagcgaaggagcaagcggagcggccgtcgcccaagccaagccgcgctgccaaccctcccgcccgcccgcgctcctgtccgccgtgtctagcagcggggcccagcatggtcatggcggatggcccgaggcacttgcagcgcgggccggtccgggtggggttctacgacatcgagggcacgctgggca

SEQ ID NO: 8272 - DNA, 2300 bp, Homo sapien
aggaggagagctgacctttcacgtctagtatgctctggcattttacattcttattctcatttaatcctcacagcatcctatctgggtaggtggattatcactacatttatagatatggaaaaaataactttcctagaggacttgaagcttgaaagtgataaaactggtaattagctgtagttctcataacttcataggttgtactcttccatgaagctgtaataatggggattgttactgttattactgttactactgcttgcctctagtttttatgttagcaagctaagagaatgctttgcctaaggtgcacatgtatgtatggtctcaaggtatgaatggagtgagcttattttaacacattgggcctttacagcaacctgctgactaagtgtatttatcattttcactttacagatggggaaactaaggctcacaaagactgatccaaagtcacaaatccagtcaatctgtctggcagtagagacttgatccagtctttcttgagccatctcttaaagctcactgtgcatgcaatgctgtgctccagctgggtggagagccagttcctgtcactgagacaggctcttcagtcaggagtatgtagcaacataagacagcatgagtataacttaacaagataataggtatttgtttcttcggtaagaatatgagactataaaggcttagcaaaagggtatgaacttgcatttgtaacaatacttactaaattttttaatgcatgttgaaggcatctaagtagtgtttccagagtgcattctctgtatcaaaactgtagagtcagtatggctaagatcataaggagaaggccattaactgttttgaactataatgccactgcgatccataaattagtaaataagtgatggtgataggtggcttgtggctgggctatgtggccatcatatgttaatgagctattcagatggttatctgcctaaaacaggatatgtggaccaacacttagagggttgttacttaggaaacactgcactcagttgccttcaagggttatatatctggggtaatggcagccagtcactcagttgtgtttaggtgaatgtcttagagctttactcatttgtttctttccttatagaccatttaagataaagagctctttagcagtcatcaggtaattgaaattctaagattatcaaatactagttgggttgtccactttaaggctgattttctttcacatgatataaagtatttttccagtctctcacttactcgctttgggaagaaaacttgattcatttacacattcattcagcaacattccttgagtactatttgctagtcattgtgctaatgccagggaaacatcacaagataagatgccatcccagtcctcacagtaaatagtagtgatattgttaatatagcatattagaaaatttattacagagaaatgcagtatagtttgagagcatagatgaaaataacatttatttccatcctaatagatttcggttttggaaatttctttaaaagtggtgaactgctggcaacatggtgtggcagccccccttatgcagccccagaagtctttgaagggcagcagtatgaaggaccacagctggacatctgggtactgctttgctttgctgtgttgttaaatgcatctatactgataatacttggtgttctggcccatcttagaagctcctggtacttaacacataagcagtatttcatattttccccatccactggactataattactcagagcatcttgaaatggatccctaggaaagaatttctaaggataggtgttgtcatcctaatatcagcagtaatttaaagttaagtagtaatcaaaattatcagattcaaattctttggtatttattataagatacttattgtagtagtcagggttttggatttttttcaaattctgagaaaataataaatccagacaggaatttttcagtccatatgatttcaagagccctggggatgttcaggaaaacaaagagtgtttgacgttcttggtagaaaagtctctgcattgttttcttccctagagtatgggagttgttctttatgtccttgtctgtggagctctgccctttgatggaccgactcttccaattttgaggcagagggttctggaaggaagattccggattccgtatttcatgtcagaaggtaatcaacttttcatcttattaatggtgttttacagtgttagtgctccaagtgaaatgcctaggtaaaagcttctttttttctaagagtttgggtgccaaataaagtgactgagct

SEQ ID NO: 8273 - DNA, 2300 bp, Homo sapien
ctgttcctgagcagctattcataggagaaaatggattgatttccacgggggaatagttaaggtaatgaggtaaataattacctcctcacaggggcctttaccagccagaacttgcaaccacaacccccatgccagtatgctgttctgcctgccattaggcagtgtgcgtggcaactgcatgggaagggccaatgcttgcggggagctgtgctgcgctcacccctgtgggataggaaccatcgataacgtatatgttgctggaggagacaaaattcagtgcactggggcttattagcctctgctggaattttgggccagtgagccctttgttattctacaatgggaggctttggctgtctgccatttgaatttttttcaatcctttttgtggtatcagtctgtctatatagaattcttactttccattccccaggcatatagaaccaattaaagactaaatcaaatgggcaggtacttaaattttgaacataaaagtctttctaaaaccttccattatgtttatggttgaaaaaatagaagaatcttggtgactacccctttttttttttttttttttagcaatgagccaagtagttaaaaaaaaaaaaacaactcatcttccccctcttcatttcccttatttaaaaaaaaataataactggtagtcctcaaactaatatacccctgttcttctggaaaccactaaaaaagttgtttattgtaataatgatgactcagagaaacctgggcagcagtgccagtttgggtcatcatgggcttctgtctcagagttctgagtcctgcagttgacttgccttcacttctaatctatgtgttgtcatgcataataaatatgtgcatgtttaaatattttacttaatttctagttcgccacaagtcttgacatgttttcctttgtggatttttctgtctcagcagtgcagaaactgagtttcctctctcccctggcgtttaggtcaatggctgtctgcttgaccctgtgcctcctgtcctggtgcggaagggatgccagtcactgcccagcaacatgatggagacctccattgacgaagggctggagacagaaggagaggccgaggaagaccccgctcatgcctttgaggcatttcagtccacacgcagcgggcagagacggcacactctgtcagaagtgaccaatcaactggtcgtgatgcctggggcaggtacggtagaggagcgacactagcttgagtcttcatggcatcatgtcatactccaattgccaacaagtggtcacgatgccagccaacacctaaaattgagtcgatagcttattcctttatggattagattcagcaggtatagcagacacagcctggcagcagctatcaaaggtgaattgaaatgtctctgagttggctcccatagtccccaggattcatctgggtgccacgtgattgatcagggactctggctcttttggactggctgagatcttacagatgccacttctggagtgttttccccactaaacttgaagatgactaaattggccagtaaaagggctctgaaaagatgttttgattggaaattaaggacatggtagctgtcaaaactcaagctggttatgctttgtaccctatgttccaaggagatgctattgctgttggttttatctgttctgttttctcttaaagggaaaattttctccatgaatgacagcccctcccttgacagtgtggactctgagtatgatatggggtctgttcagagggacctgaactttctggaagacaacccttcccttaaggacatcatgttagccaatcagccttcaccccgcatgacatctcccttcataagcctgagacctaccaacccagccatgcaggctctgagctcccagaaacgagaggtccacaacaggtctccagtgagcttcagagagggccgcagagcatcagatacctccctcacccagggtgagcacttcctcctctgctttttgaaactcgcgtcgtaggagagcagtttcttgccatgttggtgtggtcacctgtggtcactgaaaggccttgtattttagttaaactgtttggtcttggtgctttctttcaggaattgtagcatttagacaacatcttcagaatctggctagaaccaaaggaattctagagttgaacaaagtgcagttgttgtatgaacaaataggaccggaggcagaccctaacctggcgccggcggctcctcagctccaggaccttgctagcagctgccctcaggtgggtaccttgggcccttccctcaatggctctgtg

SEQ ID NO: 8274 - DNA, 2300 bp, Homo sapien
tcaagtgatcctcccacctcagcctcccaagtaactgggaagacaggcacgcgttaccatgtttagctaaattgtttttattatgctgtggttatttaaatttacgaatataaagtaggaaaaatgtgcttttatttctagttcttacacagctaaaaaaaaaccacaacaaatttacaaattaaatacaaatgaaaccacaaaatgaatactattcaattaaaaatattatagtaatttaacgtgacaaatgatgtattttgctaaaactgtcatccgtcgtattgttactatggtgttgcctgctatagctcagcttcttttgtgttcaacatgcctatgccaccaagtgactcctgatatcttaattttctcaccatttttctgttacaactaccaaatagtgcaatctcatgatgcatttggctttcattttgtgcatgaaagtatcattgtcattttaaaaccacctctgttcttttctcattatcccagaacaataaaagcagcactaaaacacacatgtaaatgtgggtgctgaaattgtgtggcaatacttggttgtaaggtggtcacccaaataattcagaatatgcttatacaaatctaaaaaatatgaaaatgaaaataaaattaaaaccctagagaatacattcgcagacataatttgagaaaaactgttcaggtctgctggttcccaaactttcattactatcaaaggctctagctattgtgcttacttccaagaaccccatttatttatttatttatttatttatttatttatttatttattcattatttcattcattcattcaaaggctctattgtgcttacttccaagaacgctatttatttatttatttattttagagacggggtctcactctgccgcccagattggagtacagtggtgcgatcctggctcactgcaacctctgcctcccgggctcaagcgattctcatgtcagcctcccgagtagctgggactacaggctcccgtcaccagcccagctaatttttgtattttttagtggagacagggtttcaccaagttggccaggctggtctcgaactcctggcctcaagtgatccgcccgcctcggcctcagaatcccatgttttaaaaaagtttgtctcctacactgcatttatagttttattaatcaggcacatagaattaccatttcggagcttgtgatcaccatatgtagttatcactccaagctgcttaaattccagtctaaaacaaacaaaacattctaattattctgtgctaccctgacaggggtaagtgaaaactttccattcaggtttgtaagaacgagctcccagacctccacctcttccccttgctgcctctgaggactcttggaggtctagggaggccagtttgggttttcttgctcaagaaagtagccaccccacccaatttggaaggattaaagcttgtcctagttttgcttcattgttgtacttctagcatgctaaagagctaaaaaatgggaggaagaaaatacaacagaaggcaccattccagtaccaaactgaaaagaaacacaaaaacaagagagcagcatgtttttaacagcttgcgtggaaaaaatattgactggggagtttggacagcactgttcattttctctcaccgcccgcgttatttgtcttacggagcaggagccagataccattctggagaaagagccgcgggaagaggtggaggggttctgtggaagtttgagtctgagcggagaaattagggctggagatccagtggctcagggccaggaagaagtcaggggaggtgctaaagcctttttcctcctggcctcgggcactctctttggtccgcctgagtcttaagagggcacagcgcagatcattcaggtaggttcctggctccttcagactacaacgagctggatgaatccctgtccctgtttctttcggctggggaaaggacgcaggggttccattcgctttcttagcccacccgtcttcttgagttcagacctacaactcctgcagtgggggtcagaagggagccttaatcatcgggacagaaacgcggctccccaacttcggctaaaccagcgtggcggccttcgtccctactgcctgggcgcggggcggggcctgggcgcggggcgggaggcggtgaccagcagcaggaggagaaagaacatggcgggcgcatcagagctcgggaccggcccaggagcagcgggtggagatggagatgattcgctatacccgatcgcggttttaatcgacgagctccgcaatgaagacgtgcaggt

SEQ ID NO: 8275 - DNA, 2300 bp, Homo sapien
aatgttgcacaggatgaatttgagatgagtgatccctgtggagatgctattgtgttagtcctacgtagacagggagggacctgcattagacttaaatgaaaaggaggagatgggtatatgagatacagttaggctgggtgtagtggctcacgcctataatcccagcattctgggaggctgaggtaagtggatcacttgaggccaggagttccagaccagcctggccaacatgacgaaacctaatctctactaaaaatacaaaaattagccagtgtggtggcaatagtccctgctactagggaggctgaggcaagacaatctcttgaacctagggggcagaggttgcagtaagctgagattgtgccactgcactctagcctgggtgagcaaggaagactcttgtctcaaaaaaaaaaaaaaaaaaagaagaaaaagaaaagaaaaaaagagttaagctggatatttgaacttggtaactaatgactgcatgtgagaattgagcaatatgatcaatctccattttcaatacttgggaatttttagtaggaaatcacaaccttctgagaccttgtcaagagattagcattccctctataaacttgtcccagttactggcatggagctcgacagggtaggatatagctctgtgattagaggagtggatagagtgtcaggattagatgaatgacccccaagatatgggggtcacaggtatgatatcatcaatgtgccagtataaaaatgattgtaggaaatgaagacctttcaccagatctggtgggaagagagagcatgggctttccggtaagatagtcctgggctggaacatagctccaccatttactagctccaagtttatttagtttcctggtaaataaaacaaggttgttgtattaagtttaaaaaggataaaatatgtaaaatgcctaccacaatgccgtagtagcgatgacagtgatggacatctggttcaatttgccgcacagaatttcatcagtctacactctgccattaccggtttgtctctctgaagcagtttttagctacaggctgcctctgtcactcttaccaaaatacagagaaggcaaggtgttaaaaatgacattttaaggaccttttagtagatagctgtgctgtgatatttaactgaatacttcacatctcactatgtagatttctttaatcactttctatttgttttttcatttaaataggggagctgagaggtggttttttttttttttgagaatggagaatgctgaaaagtgacggaaaagagggttggagggaggtaggaatggctagagttagaagcaggtggatgggacagccctgatgaagaaactcctcaggttctatttcttcgctactcggggatctgccccaattggcccagtaacgctataatttagtattttctgcgcatgtcaaggtcttttgtccctcggcggacaccgtttgccagccaaagctatgtctgcgcgctcaccgacttcatagggtgccgaattcttttttccccaggcttgccatggctagtcgaggggctcggcagcgcctgaagggcagcggggccagcagtggggatacgcgccccggctgcggacaagctgcgggagctgctgggcagccgagaggcgggcggcgcggagcaccggaccgagtacgtgtgcggcgcggcaggggcgtggccggccggcggggcggttcggggctgcccccgggagggtcttagctgtggcgcgcggggctcagtccggcctggcctcaccgcgggaggcccgagctccctcttcagctaggtcctattggtcttcctgggcgggtcagcattcagtcttcgcccaccttagatccctccactgcgctgtaaaactgccttggagtgcggatctgtgatgctcctgggccaggcctagagtgggcacagcctctgtgggagatgtagacaggatcaaagagtataccttttacggctgttcctcacagctccttttattctccctcaagtcccgaccctttactgggcccatccaacccgccatcacctcttcccaaaccctggaggctgcaggttagaactgcattaagggagctgtcaacatatggaattggagtaggctatgtaccttgcacctaggcttctatctgaacataagggggaatgaataaagccatcaaaagcaatgaccttgttaagaaaagaaagaaaaggagaatgacagctttgtggccttcaagtgagtgattagttggcttgggataaatggagtgacataaatgcattgagctaaagtgta

SEQ ID NO: 8276 - DNA, 2300 bp, Homo sapien
gtaaaatgttgggttggataatatttggaaggacttgctgatgaattaaacatttgtgtgtgggtgagagaggtgtggggttagagaaataaaggaattaagcaagactactaggtttttgacctgaatacctagaagattggaagtgtcattaacttggatggaaacactgccatacgagtaagtttggggagtgggataaagaatcaagggatctcttacagacacatctattgctgagctctccacattgactattttgctaactgatggcaggtaatgtgatttatccctttcttctatcctcagtagtgcttggtacatgtataaggtagcgtttgaaagctggatcttaaaacaagggcaggaatgtgaagggagaattgttaggcaagtagggtgtgcattttgggcagaggacatccataaacagagatatagataagggagcatttgggggcactttctaggctagttagctgggatgtaaagtgtgcataggaaagtagtgggagataagattggaacggtaagttggggctggagttcatgaataccaaatgctagaataaggagtttgtactttatttggtaggcaataggaaaacatccggtggttttttattaaggaagtgccccagagtagtgctttggaaaattaactggttaatgttgcacaggatgaatttgagatgagtgatccctgtggagatgctattgtgttagtcctacgtagacagggagggacctgcattagacttaaatgaaaaggaggagatgggtatatgagatacagttaggctgggtgtagtggctcacgcctataatcccagcattctgggaggctgaggtaagtggatcacttgaggccaggagttccagaccagcctggccaacatgacgaaacctaatctctactaaaaatacaaaaattagccagtgtggtggcaatagtccctgctactagggaggctgaggcaagacaatctcttgaacctagggggcagaggttgcagtaagctgagattgtgccactgcactctagcctgggtgagcaaggaagactcttgtctcaaaaaaaaaaaaaaaaaaagaagaaaaagaaaagaaaaaaagagttaagctggatatttgaacttggtaactaatgactgcatgtgagaattgagcaatatgatcaatctccattttcaatacttgggaatttttagtaggaaatcacaaccttctgagaccttgtcaagagattagcattccctctataaacttgtcccagttactggcatggagctcgacagggtaggatatagctctgtgattagaggagtggatagagtgtcaggattagatgaatgacccccaagatatgggggtcacaggtatgatatcatcaatgtgccagtataaaaatgattgtaggaaatgaagacctttcaccagatctggtgggaagagagagcatgggctttccggtaagatagtcctgggctggaacatagctccaccatttactagctccaagtttatttagtttcctggtaaataaaacaaggttgttgtattaagtttaaaaaggataaaatatgtaaaatgcctaccacaatgccgtagtagcgatgacagtgatggacatctggttcaatttgccgcacagaatttcatcagtctacactctgccattaccggtttgtctctctgaagcagtttttagctacaggctgcctctgtcactcttaccaaaatacagagaaggcaaggtgttaaaaatgacattttaaggaccttttagtagatagctgtgctgtgatatttaactgaatacttcacatctcactatgtagatttctttaatcactttctatttgttttttcatttaaataggggagctgagaggtggttttttttttttttgagaatggagaatgctgaaaagtgacggaaaagagggttggagggaggtaggaatggctagagttagaagcaggtggatgggacagccctgatgaagaaactcctcaggttctatttcttcgctactcggggatctgccccaattggcccagtaacgctataatttagtattttctgcgcatgtcaaggtcttttgtccctcggcggacaccgtttgccagccaaagctatgtctgcgcgctcaccgacttcatagggtgccgaattcttttttccccaggcttgccatggctagtcgaggggctcggcagcgcctgaagggcagcggggccagcagtggggatacgcgccccggctgcggacaagctgcgggagctgctgggcagcc

SEQ ID NO: 8277 - DNA, 2300 bp, Homo sapien
attgacagctatgccccatcggacacctccaatagtatcatgtcttgtggtataatcatgtaaagcactgttttcagttcacaataattttatgaggctgttagttacttttttttttttttttttttttgagatggagtcttgctctgtcgcccaggctggagtgcagtggcacgatctcagctcactgcaacctccacctcccaagttcaagcgattctcctgcctcagcctcccaagtacctgggactacaggcacgtgccagcacggccagctaatttttatatttttagtagaggcggggttttgccactttggccaggctggtctcaaactcctgacctcaggtgatctgctcacctcggcctcccaaactgctgggattacaggcatgagccaccacgcctggcccagttagttactattaatatccctagtttacagttgaggaaacggaagcatgtaaagattaagtaagcttgcttaaaataacaactgttggccgggcgtggtggctcatgcctgtaatcccagcactttaggaggccaaggcaggcggatcacaaggtcaggagatcgacaccatcctggctaacacggtgaaaccccatctctactaaaaatacaaaaaattagctgggcgtggtggcgggcgcctgtactcccagctacttgggaggctgaggcaggagaatggcgtgaacccagtaggcggagcttgcagtgagccgagattgcaccacaccactgcactccagcctgggcgacagggcgagactctgtctcaaaaaataaaaataaataaaaataaaaaaataacaactgttaagtggtgggctgggatttgaatccaggcagtctggcttctaagtgcacgttcttagccattagactatatggctctcattattttgcactgtcaaaaataaatgatcctcttttacacacccaagagtacattatttgtactttcatttagcatttagggtttatatatctgtctttccaactaaacttggggttcctttggggctttatagtctcttctaaacatatcatagtagcttgcacgtgtgccttatgtttgggtacagtaactatgttatggacatcttaaacattttccttgtgagggcgctcctttcctcacctttggaaaaatttggcaagcagttccctgttcttagctacgccagctttgcgtccacaatgcgggaagatgaaataaatttgatcaaattctctctcgtgcagttcaaagacatctgccagctgggtgcagtccacaccgaaacgtacatcgatacctggcaaagatagtttgggggcgcaaaatatagacaggaggatgcctcaagacatggaacagaaaaactcttcctaacttaaaccgtgcagaccagcccaagtctgggcacaaagccggctttatgtgaatatccgtgggacgatcaagaacaatctccacgtgggttacatccccacgcccccaccctttccactttgggacgcgccggccgctgggcggggtttcgcagaggggcgggctcgctacctcgctcgcgcaggcactgcagattctcccaggccagtggatcccgagccaactcggccgggcgctggaggcaggtggcggtaagttgagtgctctgatccagggtttcgctcagagcggcggcgaaggagaaattcccctccccaaccaacaggaggcgccgaggggccatggcctccacggactcccggctcgcgttctctgtggcgctcgttttacgtcacttccttcacggatctctctccgccccgtcttctcccgtcactagttgatgacgcacccatggcgcctggttgtctagacgagccggtgtaccgactccccggtggatgataactatgagtgcaaaagcaagacgcgcactttcctgtcacctcgccctttcaccccctcgggaagatcaaagtgtctttagcccaagcatggccttgagcgacttcatcacacctgcatgaggtcacaagcagtcactagcgcaggggggtgaggcgagttctgggtgaaagaaacggggcggggctgaggccaaggaagaggttggactgtgtctcgcatgctcctgacgcagaaggttttgaaccttttttcacctcgtctgaaatggctgcctcccagtgtctctgctgctcaaaatttctcttccaggtgcttaaatctcctatcttctattcgttcaagaaagagtattgagtgtctattgcgtgccaggccactgtgagggtggttacgatatgtggatgaaca

SEQ ID NO: 8278 - DNA, 2300 bp, Homo sapien
agctgggtgcagtccacaccgaaacgtacatcgatacctggcaaagatagtttgggggcgcaaaatatagacaggaggatgcctcaagacatggaacagaaaaactcttcctaacttaaaccgtgcagaccagcccaagtctgggcacaaagccggctttatgtgaatatccgtgggacgatcaagaacaatctccacgtgggttacatccccacgcccccaccctttccactttgggacgcgccggccgctgggcggggtttcgcagaggggcgggctcgctacctcgctcgcgcaggcactgcagattctcccaggccagtggatcccgagccaactcggccgggcgctggaggcaggtggcggtaagttgagtgctctgatccagggtttcgctcagagcggcggcgaaggagaaattcccctccccaaccaacaggaggcgccgaggggccatggcctccacggactcccggctcgcgttctctgtggcgctcgttttacgtcacttccttcacggatctctctccgccccgtcttctcccgtcactagttgatgacgcacccatggcgcctggttgtctagacgagccggtgtaccgactccccggtggatgataactatgagtgcaaaagcaagacgcgcactttcctgtcacctcgccctttcaccccctcgggaagatcaaagtgtctttagcccaagcatggccttgagcgacttcatcacacctgcatgaggtcacaagcagtcactagcgcaggggggtgaggcgagttctgggtgaaagaaacggggcggggctgaggccaaggaagaggttggactgtgtctcgcatgctcctgacgcagaaggttttgaaccttttttcacctcgtctgaaatggctgcctcccagtgtctctgctgctcaaaatttctcttccaggtgcttaaatctcctatcttctattcgttcaagaaagagtattgagtgtctattgcgtgccaggccactgtgagggtggttacgatatgtggatgaacaaaatgtggcctatgatttcaatgagcctgcagtctggtggggaatgcacagagcaaaacaggcaactctgatatggcagggtgtgtgctctgggagcacacagaagaacgttaccaagtttgggggcgaagagggtcagagagtccttggatgaagtaaacccgagttgaaagctaacagggtaaaagtgcatcttaactgagtcaagaggcgtgaagaggcagaaggaacaatatatgcaaaagcttgatggagaaacagaatagttgagtttggctgaaacacaattggagggagagtaacagatgagactgaagagttaggcaggggccaggtcatagggagcgttgtaagcctttaaaaaaaatcaacttttattttacaaatgggggtacaggtacaggtttgttacgtggatatattgcacccaggtaggttgcaggtttgctacatgggtatattgcacctaatagtttttcaacccacaccacccgccctccccactctagttagtagcctggagtgtgtgttgtttccatgtttaggtccatgtttgctcaatgtttagctcccacttataagtgagaatgtcagaggtatttataccagagcaactccgtcttgaataggggctaggtaaataaggctaagacctgggctgcattcccagtaagttaaggcattcttagtcacaggatgagatagctcagcacaagatacaggtcataaagaccttgctgataaaacgggttgcagtaaagaagccagctaaaatccaccaaaaccgagatggtgatgagagtgatctctggtcatcctcattgctacactcccaccagcgccatgacagtttacaaatgccatggcaaagtcaggaagttaccgtatatggtctaaaaagtggaggtatgaattaatccaccccttgtttagtatataatcaacaaccataaaaatgggcaaccagctgccctcagggttgctctgcatatggagtagccattctttattcctttactttcttaataaacttccttatgctttatagactcaccttgaattatttcttgtgtctcttggggtctggatcaggaccccttccggtaacaagaacatgctgtatttggttctctgttctgttgtaagccattttaacagactgaatcttactctgaaaacggtggaaagccactgaaagattttaaataagaagatgatacaattatactttcactttgaaaaattctcctttcctgtggagaaaggtttgg

SEQ ID NO: 8279 - DNA, 2300 bp, Homo sapien
agatctaggtgtaactgtctctagggctggaatgacagacatcaccatccactcagttgtccaagccagaagcctggggcttatctttgactctgacttgtctttaattttcatccagtcactaagtcttgttgatttttgaatcagactgccaccctccattcccattgccaaatttcaattcaaatcactgtcagctttgtctccattattgcagttgcctcttgttttatcctgccatgccatcagccttgttcctctccaaacctttctccacaggaaaggagaatttttcaaagtgaaagtataattgtatcatcttcttatttaaaatctttcagtggctttccaccgttttcagagtaagattcagtctgttaaaatggcttacaacagaacagagaaccaaatacagcatgttcttgttaccggaaggggtcctgatccagaccccaagagacacaagaaataattcaaggtgagtctataaagcataaggaagtttattaagaaagtaaaggaataaagaatggctactccatatgcagagcaaccctgagggcagctggttgcccatttttatggttgttgattatatactaaacaaggggtggattaattcatacctccactttttagaccatatacggtaacttcctgactttgccatggcatttgtaaactgtcatggcgctggtgggagtgtagcaatgaggatgaccagagatcactctcatcaccatctcggttttggtggattttagctggcttctttactgcaacccgttttatcagcaaggtctttatgacctgtatcttgtgctgagctatctcatcctgtgactaagaatgccttaacttactgggaatgcagcccaggtcttagccttatttacctagcccctattcaagacggagttgctctggtataaatacctctgacattctcacttataagtgggagctaaacattgagcaaacatggacctaaacatggaaacaacacacactccaggctactaactagagtggggagggcgggtggtgtgggttgaaaaactattaggtgcaatatacccatgtagcaaacctgcaacctacctgggtgcaatatatccacgtaacaaacctgtacctgtacccccatttgtaaaataaaagttgattttttttaaaggcttacaacgctccctatgacctggcccctgcctaactcttcagtctcatctgttactctccctccaattgtgtttcagccaaactcaactattctgtttctccatcaagcttttgcatatattgttccttctgcctcttcacgcctcttgactcagttaagatgcacttttaccctgttagctttcaactcgggtttacttcatccaaggactctctgaccctcttcgcccccaaacttggtaacgttcttctgtgtgctcccagagcacacaccctgccatatcagagttgcctgttttgctctgtgcattccccaccagactgcaggctcattgaaatcataggccacattttgttcatccacatatcgtaaccaccctcacagtggcctggcacgcaatagacactcaatactctttcttgaacgaatagaagataggagatttaagcacctggaagagaaattttgagcagcagagacactgggaggcagccatttcagacgaggtgaaaaaaggttcaaaaccttctgcgtcaggagcatgcgagacacagtccaacctcttccttggcctcagccccgccccgtttctttcacccagaactcgcctcacccccctgcgctagtgactgcttgtgacctcatgcaggtgtgatgaagtcgctcaaggccatgcttgggctaaagacactttgatcttcccgagggggtgaaagggcgaggtgacaggaaagtgcgcgtcttgcttttgcactcatagttatcatccaccggggagtcggtacaccggctcgtctagacaaccaggcgccatgggtgcgtcatcaactagtgacgggagaagacggggcggagagagatccgtgaaggaagtgacgtaaaacgagcgccacagagaacgcgagccgggagtccgtggaggccatggcccctcggcgcctcctgttggttggggaggggaatttctccttcgccgccgctctgagcgaaaccctggatcagagcactcaacttaccgccacctgcctccagcgcccggccgagttggctcgggatccactggcctgggagaatctgcagtgcctgcgcgagcgaggtagcgagcccgcccctctgcgaa

SEQ ID NO: 8280 - DNA, 2300 bp, Homo sapien
tgctggggttacaggtgtgagccactgcgcccagcctcacttattcacctattcagtttacttttatttgagttccttctatgtgccggtcactgagttaggttctgaaaatgtaagaatttgaaaaaacagtccacgtactatgtgttgaaagtggcattttgttgttgtagcttgtatcatatgttgtttcaaagtagtgtccaaactggaaagaaaaattaacagattaagaatctggaagtctacagctaacatcaggaaataaagatcaatatgacatgaattctcacggactgtcatattttagatggactgagttctatggtgttagtctatatccttctaactttcacatgttttgtacgtttgtttgtttaggagcgatttaagtgcaagactcagataaatgacaagtctagataggcaaggaccaggggaaaagctagtctaagtcagaagacattataaatttctgtagactaagagataaagtccaaacagaagtaagagaaaaagaggactgcccttccttttgaaaccttacagataataaaatattcaacttgacagtaaagtagcataggtggttcagctgcggactgttcctctgccccaaccacttcactgaaaactgagagatcactgcaccagaagttattacatccctgcatttcaaatggccactacatttcttttgccaacagaaggaaacaaacaaacaaaaaagacaaagttagattacctgggaaggcaagggtttgggctgcacgatattcctcaggtcatatctttcctggttccagttgcccatcagggtacggtttgaataggtattctcattagtggtgcatcgccatccatactggaaaaacttggacatattattccaatctgtccacacttcaccatggccatctgcattaacaaggctgccacagtgtgggtttgtgaggaaacaggcgaggttctgtctctgggaaaagacaagaatagaaaagcttattgcataaaccagagaagagaaaaagcatcttttcctgcccttgttttacatagccaggtataacacaagcacaccgtactaatgatccaggctatgttatggttctgtttcttcttctctaagtcctgggaccctttgatccattctttcaatcagcaacagtgggtgactacatggattaaatccacacccccgctccccaggccccgtgaagagacaggaaaaacttcagtattcccaatacaatatggagaattagctaaatttttaaggtaattttgagatgtaggcattgagggactaaaagcactgctacagtcaaagagaacaaaaagaagtgagagttgagtaactagataacacaataaatgagtaataaatgatcatttccttccttctagctcaaatgatgccttccctgaagttagcttctctttcaactcacataaaactttatctttccctgtatttataactttttaccatacattagagttctttaagtctgcattatatctcctatacagagctgtatgccccttaaggacaggatctgttttattcattattgtaccctgtccttctgcctgttctcccaatcaatctggattgcatataccagatgatcaatgtctgatttcattttttttggtaagataaaagctcaatctttctttttccccaaaatgtgagtctggccccctgacttaggaagatgatacctttcctgaagaagagtaacttgatgctgagtaggttgagctctttgaagatttcttatgagagtcacagaaatccttacttggctgttccatgttctttaaagatgtcaacaaacctggctttcccagttctccaagcaaagaaagaatcacccagattaccatgggcaagtggccatgatttgggagtcaccacccacttgcctttccacaggcagaaacaaagccaataatgcagcattgaaggatgacatcccaggtaactaccctcataccatctgcctttgtgaagacagatgcatgcactgatgttaccaaacaacatgatgaccagagtagctggtgccacaaagtccaatgggcctggtactcatactggagatctaggtgtaactgtctctagggctggaatgacagacatcaccatccactcagttgtccaagccagaagcctggggcttatctttgactctgacttgtctttaattttcatccagtcactaagtcttgttgatttttgaatcagactgccaccctccattcccattgccaaatttcaattcaaatcactg

SEQ ID NO: 8281 - DNA, 2300 bp, Homo sapien
taatagtaacaacagcaatatgtctatcctaacttagtcttctagacattgatttgtaacccctgatcccgactgttatggcttgggactggaatgtagccagcctccaaagctgatagcactacctggactattacagtatgcactgaatgaatgagcagaaaacaaaaaaacaagctacatacctggcgctcttcatgttttccatgcacctcaatcacatctcccaacaccttaactttgagttcctctggggagaagtgcttcacatccaggttgacagagaacctgtccttctccaggcgcatctagaaatagcaaggtaagggaatgggatgggagaaagagggcaaaaatactgattacacaggtgctgtcttattctgcagagctgctttctgtccgggtaattcatccttctcttctctgcttaaaaaatctcctttttaaataaacatagctgtctgcttcagggagccaccacagtgatacctaaggctcatggtgatcagacccaaactttatttacagggacagagaagaagacagatcacccaggggaccagtcgcaaggatgggtgcaagcctggcatctgctgcctctctgactccaatgcctggctttgtggtttgtctgtgagacaaaggcctcttcttctggctcaggtctctttgccagttttccacccacccaatctggaatgttctgctggtcctgcttgtccttccaaagcccttgcccactcagctcctgtttactcacacttgaatatttttaaaccagagtgttatctgtgacagctctgtcaaccttatttgttcaccctgttcttccaccctcttaggacaaatgggcgtccctatattgtttcctcgtagggcttgattggacccaggccagcgccctgtcgtagccctgagaaacccagaaaatcatagaagagggaatagaaaggcagaaaatacccatggggatgaacagctcaggatgaggcagggctctctcctggctctgaaacctgagatggtaaaatcggtcaagagtccaaggtgttggaagagataagcaaaggagtttgaaggcagctctttccctgcagattgtcatgaaccaaaccagaaaggggtatcctgtagagaagttaggggacggaggataaacttgacagtgcatgaaaaaatgtaataaatgggatacagaggactatcaaatagaaacaggtgatgggggaggaaggcactagcaacctcctcatttttcttcacatttggacacacatgtgcctaaaatggtttaggcagggtaggaaaggaaaatggatggagaagtttccaggaggttccagtaaggactctcccgtcctagctgtggggagactcacctctgagagtccagtgtcaaaccagctgggtgcccgcaggaaggagggtggccgaaggtagaagggactcagggaagtagacgtcgggaaaagatcagactccaacaggtgctctccgaagaactggtcaaagaggcggctgggggagtggaaaggaaagaaggggcggcggatccaggggtggtggatggcgatgtccatggtggctaggtgagtgtgaggggtcagctggctggtcagctccttcagctgcagctacagccagccccttatatatgcagtcttgtgaagcttctggaatggtgatgtcaggggttttattatcctagctcaccagcagttcatggagacttgtgatccgggatttggcaatgtgacacatacccagtactcactgagctaagaaaagagagacacaaacacgtctgagccggccagtgacttgtcatggtcttgtttcactagctttctgtccacacccaatggcacccacccccacccctgttctctgaagctggtacagagtcaggaatcccaagcaggcacgcggggtggggggaggatgggagccggcgtagtgtgcccctcctcctcctttccagtcctgaatgccaggggaatcaggccagcaactatcttgggcctgggcagggactggaatcttcctaggctgagccccagggacattaactctttgtgagtccttggaagagagcagtgatggtcaacatgtcagcaccagccatctgcctcgtgccctgggttgacctgggtttaggagaggatcccacatctgggcagaaagaccccaccccctgaaaaaagagcaaacagatttcttgcatctttcgttctatgtggctctcagaacattaaatccaggagtgctttaggaattgggtgcacagtgcctgccac

SEQ ID NO: 8282 - DNA, 2300 bp, Homo sapien
acagagaagaagacagatcacccaggggaccagtcgcaaggatgggtgcaagcctggcatctgctgcctctctgactccaatgcctggctttgtggtttgtctgtgagacaaaggcctcttcttctggctcaggtctctttgccagttttccacccacccaatctggaatgttctgctggtcctgcttgtccttccaaagcccttgcccactcagctcctgtttactcacacttgaatatttttaaaccagagtgttatctgtgacagctctgtcaaccttatttgttcaccctgttcttccaccctcttaggacaaatgggcgtccctatattgtttcctcgtagggcttgattggacccaggccagcgccctgtcgtagccctgagaaacccagaaaatcatagaagagggaatagaaaggcagaaaatacccatggggatgaacagctcaggatgaggcagggctctctcctggctctgaaacctgagatggtaaaatcggtcaagagtccaaggtgttggaagagataagcaaaggagtttgaaggcagctctttccctgcagattgtcatgaaccaaaccagaaaggggtatcctgtagagaagttaggggacggaggataaacttgacagtgcatgaaaaaatgtaataaatgggatacagaggactatcaaatagaaacaggtgatgggggaggaaggcactagcaacctcctcatttttcttcacatttggacacacatgtgcctaaaatggtttaggcagggtaggaaaggaaaatggatggagaagtttccaggaggttccagtaaggactctcccgtcctagctgtggggagactcacctctgagagtccagtgtcaaaccagctgggtgcccgcaggaaggagggtggccgaaggtagaagggactcagggaagtagacgtcgggaaaagatcagactccaacaggtgctctccgaagaactggtcaaagaggcggctgggggagtggaaaggaaagaaggggcggcggatccaggggtggtggatggcgatgtccatggtggctaggtgagtgtgaggggtcagctggctggtcagctccttcagctgcagctacagccagccccttatatatgcagtcttgtgaagcttctggaatggtgatgtcaggggttttattatcctagctcaccagcagttcatggagacttgtgatccgggatttggcaatgtgacacatacccagtactcactgagctaagaaaagagagacacaaacacgtctgagccggccagtgacttgtcatggtcttgtttcactagctttctgtccacacccaatggcacccacccccacccctgttctctgaagctggtacagagtcaggaatcccaagcaggcacgcggggtggggggaggatgggagccggcgtagtgtgcccctcctcctcctttccagtcctgaatgccaggggaatcaggccagcaactatcttgggcctgggcagggactggaatcttcctaggctgagccccagggacattaactctttgtgagtccttggaagagagcagtgatggtcaacatgtcagcaccagccatctgcctcgtgccctgggttgacctgggtttaggagaggatcccacatctgggcagaaagaccccaccccctgaaaaaagagcaaacagatttcttgcatctttcgttctatgtggctctcagaacattaaatccaggagtgctttaggaattgggtgcacagtgcctgccaccgaagaggagaaaatgaggtgtggaaacgtgcaaaccgtttgtgagggtctcagcgaggcctcttcatgccccaggcaccaccagctccccctccccagctcgttcccagccaggaccctcagctgtcctctcaggccccctgcgacagctgaagagtgtgcgggggaggggactaggggtccgggcggcgctggtcacaccctcgttgctctcactcagggcccccactcccagcccctccccccccaagaggctcggcactattttgggtggtgtcgaccccgcccccacctcctatcgagccctggctctccgggcagctggaggggtcgcgctgcgcctgttggggctgcacctcggaccagggcttctgctgcatctgcagccatgtcgggccgctcagtgccacatgcccacccggccaccgccgagtacgaatttgccaacccgagccgcctgggtgagcagcgcttcggagaaggtatggcacagacaccacccccttgccccccacccccaccccctgaaattc

SEQ ID NO: 8283 - DNA, 2300 bp, Homo sapien
tcctcttcctctggatcaggaggcgcagggagcagggagatgtagacctcattgacctctgtgtccaaatgtcggccaccccgaggtgcttccaggtttaagatgccatcatgggagagagcagctcggactcgccaggggtcgacatcagcaggcaggacataggtgcggcagaactctcgggacacgaagccgtggcggtccaggcgctgggggtgccgggcagacacctccagcaggttatccacagtcctcacagtcacctcgtctggggtaaagtggctcacatccagaaatgcctggaacttgccctcactgagcctaagctcggaggcccctgccctgctgccctccccagctggggcggcccgaggccggacatagtagccatggtagagtgtgggggtcaggatctcttctggcaggaggcctaaagggcagagagaaggcaagaggcaggatgagggaggatgaggctggcacaggggcgaaatgggaaatctggagaggagggattgggaagagcaagaggggagtcaggaggagtagggaacgggagggaggccacactgtagctaggaggagaaggcagctcggaagaggggaaagagaacggaaaggtaagggaggaggaggaggagaaggaggaggagggggaggaggaggaggcaccaaacggcctgggtggatagaagggggacaaggaggcacacccaggccggcaaagagcaggtatcagcactgcaagcaccaagtgtgtcttgaggtcagcaggaatgggaaagatctctgcttggaggggatgaggggtagtctggggtggggggtggctggtcccaggagatcagttaagcccagagtggggtggaggccagcaacgttgggaggtcagcccagaatttcagggggtgggggtggggggcaagggggtggtgtctgtgccataccttctccgaagcgctgctcacccaggcggctcgggttggcaaattcgtactcggcggtggccgggtgggcatgtggcactgagcggcccgacatggctgcagatgcagcagaagccctggtccgaggtgcagccccaacaggcgcagcgcgacccctccagctgcccggagagccagggctcgataggaggtgggggcggggtcgacaccacccaaaatagtgccgagcctcttggggggggaggggctgggagtgggggccctgagtgagagcaacgagggtgtgaccagcgccgcccggacccctagtcccctcccccgcacactcttcagctgtcgcagggggcctgagaggacagctgagggtcctggctgggaacgagctggggagggggagctggtggtgcctggggcatgaagaggcctcgctgagaccctcacaaacggtttgcacgtttccacacctcattttctcctcttcggtggcaggcactgtgcacccaattcctaaagcactcctggatttaatgttctgagagccacatagaacgaaagatgcaagaaatctgtttgctcttttttcagggggtggggtctttctgcccagatgtgggatcctctcctaaacccaggtcaacccagggcacgaggcagatggctggtgctgacatgttgaccatcactgctctcttccaaggactcacaaagagttaatgtccctggggctcagcctaggaagattccagtccctgcccaggcccaagatagttgctggcctgattcccctggcattcaggactggaaaggaggaggaggggcacactacgccggctcccatcctccccccaccccgcgtgcctgcttgggattcctgactctgtaccagcttcagagaacaggggtgggggtgggtgccattgggtgtggacagaaagctagtgaaacaagaccatgacaagtcactggccggctcagacgtgtttgtgtctctcttttcttagctcagtgagtactgggtatgtgtcacattgccaaatcccggatcacaagtctccatgaactgctggtgagctaggataataaaacccctgacatcaccattccagaagcttcacaagactgcatatataaggggctggctgtagctgcagctgaaggagctgaccagccagctgacccctcacactcacctagccaccatggacatcgccatccaccacccctggatccgccgccccttctttcctttccactcccccagccgcctctttgaccagttcttcggagagcacctgttggagtctgatcttttcccgacgtctacttccctgagtcccttctaccttcggccac

SEQ ID NO: 8284 - DNA, 2300 bp, Homo sapien
atcccttaggtgatttcctttccttttcttttcttttcctttttttcttttctttttttttttagagacagagtctcactctgtcacccaggctggagtaaagtggtgtgatcacagctcactgcaccctcaaactttcttgctcaaccctcctacctcagccttctgagtagctgggactacaggcacacatcaccacacctggctaatttttcagtttttatactttgtagagatgatgggttgttgctatattgcccaggttgatcttgaactcctgggctcaagcgatcctcttgcctcagtctcccaaagcagtgggattacaggcatgagccaagccactgtgtaaacccagctgcttaggtgctttttaaaacattacagaaggggtgactaaaaaggaaccagattatggagggcttggagtgccaggctaagcagtttgaactgtatcctgtaggtgataggaaatcattaatggcttttgaactgggaggagaaggagtgggtaacaagatgaaaaggatacagttaatggtagagtagagtacagaatggattgcatggaagaagcatggccatgaaatagtgcaatgattggggcacaagaaaagaaagtaagatgtgggaaccaggcgtggtgggagggtcacttcaggccagaagttcaagtccagcaggggcaacatagcaagaccctatcttggccaggtgtggtgcctcacacctgtaaccccagcactttgggaggctgagatgggaggattgcttgaggccaggagttcgagaccagcctggtccacataacaagacccccatctcacattaatttaaaaaaaaaaaaaaagaccttgtctctaaaaagatttttttttttttaattagctaggcacagtggtgtgagcctgtagtcccagctactcgagaggctgaggggggagaatcttttgagcgtaggagtttgaggttgcagtgagctagccactcaactccagcctgggtgacagattgagaccctgtctttaaaaataaaagaaagaaagaaaataagatgctttgtaataataacaacaatgcctaactcttactgagtgtgtcccatgtgccaggccctgcactagagctttatttttcaccacaatcctgtaagattgtcactcttacccatgtttcataagaggaggagttcaaagtccagggtattctctgtggagtgcagagctgagtggtgggccctgaacatccacttaaaggacaataaccaggcatccgaggaaaacactaaaaatggggtgagagaactgaacacaagaatgatgggtttcacagattctcgtagagcccatattttctactggtgagtgcgggtgagtctaactttgggttactggaaggagacgcagagttgaggggtaagtggagaatcagtagttctgaactgtggataaggaaatgagtggttaagaagtgctgaggccatcctgatcatagaatcatctgattttataccagaaaggggattagattcagtttttttcatttcacagccctagaaacttaggccctataaaggttaagtgatttgcccacatcgatttcaaatagcaagggagaatatatgaggaacccatttccccaaacttaagtttccaagagactccagtatcccaacccagattctgtacaaaaataataagaaactggtaccaattgcctcgaaagtgaaactcagttaaacctgagtggtgctgagcaaactactacattaggcactcatctattatagaggatatatttcaaagacagagtgatgtaatggagaagcatttcgtaaggaaaccaagagcccttttctatctcaggtttctttttattgaagcttgaagctcaagttcatggcttcatcaaaagacgcttcaaatcctgaagttgagatagctctcacctggagcccgtgtgttgttctaccctttggctgggaacacagtcacctgggaatcattccagcaggtggcttcaaaagtccaacctgctaggttgaaatctgacactgacacagactccgggagctgccgcggaaagctcaaccaggaacccggaaatgcacaagcctcttgatgcataaaaacagctgggctcccttggagacagagcgccatgggaaaccgggtctgctgcggaggaagctggtgagtaggctggaagggcaaaggggaacatctatctctgttggtggatgtagaggccccgaaaatcagaggacctggagatagttgtctgccagcctcccactgcca

SEQ ID NO: 8285 - DNA, 2300 bp, Homo sapien
aatcccagcactttgggaggctgaggcgggcggatcactgaggtctggagttcgagaccagcctggcgaacatggtgaaaccccgtctctactaaaaatacaaaaattagccaggcatggtggcacgggcctgtaatcccagctactcaggagactgaggcaggagaatcgattgaacccgggaggcggaggttgcagtgagccgagatctcgccaaagcactccagcctgggggacacagcaagactccatctcaaaaaaaaaaaaaaaaaaaaaaatagtattagccccataaagtgtgagaatttaaagcacttgcgacaagtacatattttgtagtcaaatgttggctgctattatatcattaccattatcactttttcccggcccgttgtctggcaaagactcaatgcaggcagattcagaaaaggtgggttggaggactgacccccaccactaattggtggagaaactctgtagcctattttctatatattaaatgaaggtggccgggcgtggtggctcacgcctgtaatcccagcactttgggaggctgagtcgggcagatcacctgaggtcaggagttcgagaccaccctggccaacaatgcgaaaccctgtctctactaaaaatacaaaaattaatggccataccaccctgaacacgcccgatctcgtttgatcttggaagctaagcagggtcaggccgggataatactggcgaggcgcggtggctcatgcctataatcacagcactttgggaggccgaggtgggtggatcacctgaggtcaggagctcgagaccagcatgcccaacatggcgaaaccccgtctctactaaaaataaaaaaaaattagccgggcgtggtggccggggcctgtaatcccagctactctggaggctgaggcaggagaatcgcttgaacccgagaggcgaggctgcggtgagctgagattgcgccactgcactccagcctgggcagcaaagcgagactgcgtctcaaaaaagtgggaaaaaaaaaaggtagaatcattaactctgttttcaaagattatttactgcaaaggtcaaataagatgatgtagatgatagtacttcgtaagcttaaagtgctatatacaaatttctgtctttggattatacatgccgggccatgcgcggtggctcacgcctgtaatcctagcacttaggaggccacccgaggtcaggagttgagaccagcctggccaacatggtgaaaccccatctctactaaaaaagtaccaaaaattagctgggcatggtggcacgtgcctgtagttccagctactcgggaggctgaggcaggagaatcgcttgaacctgggaggcagaggttgctgtgagccgagctcgtgccaccgcactccagcctgggcgacagagcaagattctgtccccccaacaaaaaaaagaattacacatgttgcctctctgggttaaaactcagtttctgaggatagaaggaagtaaatgccagtagcagagcttccagtatttctcctgattatcttcagaatacttcctgtggtccttgactaataaatataggaagaaaggaaaatgcattgttgcttgactaacgataggggagtattactcttcactttattagtattaatacctaagcaactaggtttaaaaatgccactgggttagctgggtgtggtggtgcacacctgtggtcctggatacttgagaggctgaggtgggaggatcacttgaacccaggagttaaaggctgcagtgagttatgacagtgccagtgcactccagcctgagtgccggagtgagaccttatctctaaaaaaaaaaaaaaaaaaaaaagtaaattttaaaatgccactgggatagccctgttgtgcttgtaatatcttcagctggacttcctgctaactagggtcctatttctgatacttcaagatgacttaagttggtaggttttggggaggggtctggccccaactcggttagttgagctttaaattttttttttcctggcttgttattttgtacatttcttattcttcctgttttagatggccctgattcgtctcttctagggactcttgaagatggggacccaagtggttatgagattcaataactccttgctgccaacagagccttctgtaagtttttggtgtactattgtgaaaagcgtgatgatgttactggaatttcaatacagttctacttctggggatttctccatcaggactcagatcctggaacagaattttaatatatttgtctttttttttgcttttccttcttgtgga

SEQ ID NO: 8286 - DNA, 2300 bp, Homo sapien
tttctatgatataagggacttgggccaagtaaggaagttgggccaaaatgttttggagctttaaaattcagtgatttcataagtctttttccagaaacactgagctcacagatcctactttgatcaaagacttgtttgagaaacgctgacctctggcatagataactgtcagcaggatctccctctgatgtctcaatattttctgctctgtgtacaaagcatgaggggctctcaaccaatcaggatcctctacccagggatccaccaagtaggtactttggttttgcatcattatgcacgtagatgtattgcatgcaagtctgtgctgttggaaatttcatgcttctctttataaaggaacttgttgaattgacatgggttagtgactctccgggggtgttacaccacgaagtgtggtagtgtcaaagggagttcttggcagttaaattcctcagctagattatgaaggacagtggtctttggacttgtgggctgctcaggtttagaatgatttggtgtcttagcttttccccagcattagccagaattgaacccactacattcaaccagcagctgccactcaacacctgtgctggccctctgccccctgcctgttgtggtcagggagatgtgttctttttcagaaacatctttgtgtttagcagctttagacattcagacaagatattgctagcctggctgctcttggtggattttctttttctctaaggacctgaagaggtcattaggttgaataagagccattactgacttttctggctaaggtactaatcaggatttgaggaggaatctgggtcttccagaaaatcataagtgtagactcctagatccttgagctgcctgtcactgattggctgcgtccttggacaaggccctgaccttctctgagccctaatgctctgtaaacccttcctctccatctgggatcacgaggtggaatgtaaaatgaatgttttttcagcttcgagttttcctatagaaacaagagtttgcactgagttgcaaatgactagtattcctaaaaataaataatcaaggctatgacttgaatagctagaaacagcctagaatagctttctgtttcacttgaggaagctttttacctctttcaaatgcaccaggacatttttgcagtctttattttaattaaagcccatttattttaaaacacattaaaatatgggttgtatattttagcagttattttataaagaatgaaataggaaaattttggaaaaggcttggtcatccttgatgtttctgttgcgatcctgcgtgatgtttagcactgttctattgaatgtgttctgataccatcaataactaaagttctttttatcctcttttccccctttcttcctctgctctttctctttcttatttctttcccttctgcttcctcttctttagcttgacctcactgtccagggcccatgtggaaaaaggttgctgttttcggttagtctgggggaaaatcctatgattcactccctttcccacccaccttctggtgggccgtttgtggccttaagttagcagtgtgtgtgtgtgtgtgtgtgtgtgtgtgtgtgtgttgcgcaccctccccacgggcacacccgcctgcaagcctggtgtgtgtgtgcgcgcgcgcggctgcaagcgcatgcatacgccagccgggccgcctgtttgtcaacgtgtgtgtgtgtatgtgtgtatgtgtgtatgtgtgtgtgtgtgtgtatgcacacagcgcgcacatacagcagcacgtttgcctaaaagccgtgtgagtgtgtgtgtgtgtagcgcacgcacacacgcccgtgctgcggcccgggcggggggggggtgtgcgcgtgcgtgcgggcgtgcagcgcgcgccctcgccagcccgcctggccgtgcggctttcccgcaggaaagcggggctgggggcagcccggcagcgccgctcaacctagtgcgcgcccagttgtttccataggaaccgcgaccgcgccgggcccctccagcggaggcccccgtgcgagcatgcccagtgcaagccgctagtttggctccagtctaggtttccagtaagtggcatgcgggactccggagggatcccaatgagctgagccgagagcctttgtgtgcagagggaggaggaggaggcggcggcggccgccgggctggagaccccgcccggggagcccccagcaggaacaatgctagcctgcctgacccgagggaacttactggacgtcctgcaggagggcttcaatgaggtaactgtcctgctcctcccactcctc

SEQ ID NO: 8287 - DNA, 2300 bp, Homo sapien
taaaaataaataatcaaggctatgacttgaatagctagaaacagcctagaatagctttctgtttcacttgaggaagctttttacctctttcaaatgcaccaggacatttttgcagtctttattttaattaaagcccatttattttaaaacacattaaaatatgggttgtatattttagcagttattttataaagaatgaaataggaaaattttggaaaaggcttggtcatccttgatgtttctgttgcgatcctgcgtgatgtttagcactgttctattgaatgtgttctgataccatcaataactaaagttctttttatcctcttttccccctttcttcctctgctctttctctttcttatttctttcccttctgcttcctcttctttagcttgacctcactgtccagggcccatgtggaaaaaggttgctgttttcggttagtctgggggaaaatcctatgattcactccctttcccacccaccttctggtgggccgtttgtggccttaagttagcagtgtgtgtgtgtgtgtgtgtgtgtgtgtgtgtgtgttgcgcaccctccccacgggcacacccgcctgcaagcctggtgtgtgtgtgcgcgcgcgcggctgcaagcgcatgcatacgccagccgggccgcctgtttgtcaacgtgtgtgtgtgtatgtgtgtatgtgtgtatgtgtgtgtgtgtgtgtatgcacacagcgcgcacatacagcagcacgtttgcctaaaagccgtgtgagtgtgtgtgtgtgtagcgcacgcacacacgcccgtgctgcggcccgggcggggggggggtgtgcgcgtgcgtgcgggcgtgcagcgcgcgccctcgccagcccgcctggccgtgcggctttcccgcaggaaagcggggctgggggcagcccggcagcgccgctcaacctagtgcgcgcccagttgtttccataggaaccgcgaccgcgccgggcccctccagcggaggcccccgtgcgagcatgcccagtgcaagccgctagtttggctccagtctaggtttccagtaagtggcatgcgggactccggagggatcccaatgagctgagccgagagcctttgtgtgcagagggaggaggaggaggcggcggcggccgccgggctggagaccccgcccggggagcccccagcaggaacaatgctagcctgcctgacccgagggaacttactggacgtcctgcaggagggcttcaatgaggtaactgtcctgctcctcccactcctcagctcccctcccccagcgtctcccgcccagtctccggaaggggtcctcctcctcctccatcctttggggaccccagagcaaatcgcccccagaaccccaaaggggctaaggtggtacttacggtgcagatgggtgaaccaggagaaatcagaagggctgcctgcccacagctaagctgggccatgaccttccctggtagcttacctgagcccaagaggacaggaccacaaattcagaaatcacctccttccagaagagggggtctccatcctccctagagcttctctctccaaggaaatcctcagggaatccctggatatttggcaaaagtgctcatctatatcaggagctaaccagcggagccaagggagggtggagtggtactgcattggtagaaagtttgagagggcaggggactgtagatggtccatgtgaagtgccctcttcatgtctgaatctctttctgagtgcggggcagtagatttctctgcaatcaaggacatggttgtctgagaggagctactgagcgagaggggacctgggtcctgggtccagggagccagcgcgtgcaccggtccatgtgagagcagaggaactggggcctcactctgacaggcaagatgggctagggccgacaaggggtcatttcctccccacttgtttctcttacaattctgtttattgcatttgcttttcttgtgacccaggaaattctggtttgggatgcttccccctcaagatttgctccatacgtcttcgactgcagctaagccctactcttgcgggttgtcttagcccagcatccagggaaacctaggctgttagttgtgtctttcttcatttctctctcgctccttttccttccatctctctctttcttctctctgtgactctctgaaatttaagatttttaaaatcagtttttactcaacatatgaatacattgtcttcttaaatatgagcatttgataggcaagactgaagtgcctttggctccccccacccattccagccttttctccagaaataaccattctcat

SEQ ID NO: 8288 - DNA, 2300 bp, Homo sapien
gaacctgtcagggcccagtccagtggttctgacatttgcatatgaggtgccagtgtttatgatagccagttccattgtgctgtccttgagcctaagtgtaactcttaaggccggaaaagtctgtgtaaagctcatagaagagaagaaattgagcagagttgtcttagagcattagaatgtttccaactttcctctacaggaactgtggctgattagtatgtgtttgagcaaactaatgatgtttgcgactctagctaaaagttgtgtgtatcctttagagccaagtacagagaccaaaacaggatacagtgccctaataaaaaccttatcagtggcagaaaaaagattactttactggctcatgtaaattgtgcttctataaacactccccagatcatgtttttactaacttcattttgttgctgaatcataatttatgctctaatgaccttttctttcctatcccaaccctgtgtaatctgctctatttagggctaattgttccttgtcttgtatgtatgttatgtgtccttgttttcttcctcctatttttttctcataaaactccatcctattttaatgcacatttcctaatttattgaggtcatatggaactctttctagtattttaatatactggtaaacttgctaactttttaccttttttacatttaatagctgtgctctttcttacttataaaattcacataacataaaattaaccattaaacattataaagtgtacaattcagtggcatttagtatcttcataatgtggtgcgaccatcacctctatccactcagaagacatcttcatcaccccaaaaggaagccctgcgcccattaagcagcaggtgtgcttttaatgagaatctaaatcatttcttccttgcttgctgcttaggttatcacctggagcggaattacaggatgttttgttgtattgcttcctgcacttctgcaggcctttcactcttctgagcctgatagtgcctgctagagttggtggtaggaggaagagtggatttcttcctgagggcacctgctttctcctccaaggcaggaggactgaggggagggctgtgagactgtgaatgtgtgaatgaggggcccaccggctatcaggctgcagtgagctaatggtgacagttttctaggagaggggccagaggagaattgtttgctttaccctgtttttcactactggattttgacattttcttctaatgctgacccctcatccagctctttggcatgctgggttagtagctgccttttcctcagtgagtccctggggaaggagagggcttcttgtggctatctggaacccagcaggttcccgcacattctgagccctcgcccccagggagcccacttagtggctctgtgacccatgaagagcccaggagcccccagatgtggcttgctcaggacgggagtggctcagaaggaaggatagcccctgggtgtctcattccctgccactgctcctccggagacgccctggggaagccctgccagcctgttgctccgaaaaccgcataccagcctcacattgtagccaagcaaaatgatccttagttggttaaaaagaacacacgaaacgccagaggggaaggtgggaggggataggtgctcggcgaattttcctggggagcgtcagagtctccaccccgaggagcggccagagccccatgcgggcctgacctgtccgaccgacccctcgtccaccaagggagggctcagagtggagaaggcaaggtttttggtgcggggctccccagcactcagaccactagagccctcctcgtgattctgccgatacgcggctcttcccctgcctatcctgaggctcccaatctcctctcctcgcatcccccaacccctcgtcgacgtccccacccccacctccaccccgcccagccccgcccctggcccgcaccctcaacctccgtccagagcggtcggttggccagcggagctggcttgggtcggagcccggctgcctcgccgcgtgtgacagcccagggagggagcagagggtggggcggggagggatccggaaggtggcacggagtgggatcgccgctggggactcgaggcgcagcctgcgccgccgggagcctccctcccagtgggagatgggttgagatgcccccgccaggggggatgcccggcaccgtgcgtccgcggaggccaagatgcagcggccaggggccggcagcctgcgaggggaggcagcttccgccggggccgggctgctgcacagtctgagcggccgggactgcgcgcttcagagc

SEQ ID NO: 8289 - DNA, 2300 bp, Homo sapien
tccccttgtcatgctctagctcaattactgatatataaccgctcctctgcccagcctggcaatgtacgccctccagcaacttttccccttgaaccacccccaccctgtactctcctttgtgatcagctcagagctgatctgccatgataacttggctggtattgcctgtatctgtgagagatcagtgttttggaaataaaatttccttctagctccaaaagctactagacacagactggcatcagtctttgaacgtgggcccagggatggtgatggaggaggtggtgggaggtaaaacaaagcaaaacttggagttctttgaatgctagattacccatcattttggtaaatctcttctcaatgaattaggcttaaaggcatccttgttgtgggagagactttgtaggactgggtcattcctttattcaatattaatttcattcattcaaaaagttaatcattaaataaatattttattttctgtgggccaagtactgtgttacccatggaggagtaagatgaataagaacatgtccctgttctcaggaataaattatgaaagctgctttctgaacaactcttcataataatcgtttttcttcctttttcttcaatcacagcctgacttcacccagtccaatccacagtgcaaagagcgagtccattataacccagtcagaagagaaggcagattttgtgattattcccgctgaaggaatagagaacagaacaggtactatctctacgcctgcctgggctggttcaaggaacagtcagcttgaagaatttagaggtccccatcaccaataagctccctggccttccccatctccatggtctgtgcgtgcagggtcagcactagagggctctaatgactttgagccaattaatgtggttatcctcttgcagaatgccatttctgatatcctagctgtcaaaaatcttgcagcagcatagataggccctttctcagctggctgcctatgaattaggaaatgactttggggcagtcaaaagccttactcaagtaaacacttttattattcctatcttatacaaataattgcaggacttacataacttaaattgggaccagaaatgcattgtatgagctgaggtgtctgtgagggcacagagaatagagagcaggtctatatcaggcttggtatgaagctacagaaaggaccacaaagagttccctttgtttagacttccatactctgtctcagttgctctttattttttcttacatagagagaaaaacatgcaagaagcaaagtgcaagacttagaattgtatttacccacaagagttgtaatgaaacacaggccctcagaagaaaaactggaattgaattcttctgtattctgctccccatctaaccctggcattagtaccaaagagtcagtcatgttactgagtcaaaactcctgaggccttagagagagagggagagcatttactgagtgccgctctgggccaggcaccagcaggccctgcacataagttacctcatttaatctttgcagcaacccagaggggttattatattcgtctcttgaatgaagaaactcactgaaagagtttatgcctttctgaattctagaatgcattttaaatggctgtacatacaattagatagtataaaatagacaaggaaaccagagcaaagagaccttaaagctaggaaaataaaagtgatattaaacagtttgtgcaggtatgtttttattggtttgtttgctgtgtgactcacacagtattctacatgaaagtggtccacttatgagtgagtgctgaaaggaatattgaattgaagtctcccctctaaagcttcagagtaaccagtaagattttgttttcattgcatctgacagctcctctttttgtacctggcaaagtcaggctcttggaatgccagttctaagaattaagggtgaagtctgtgtggcgcataccaaggctcccgtggagggaatcttaatacttcctaagagttttaaaagaggatagattgttctagcaccaagtgagcctgaggcctgagctcacagccaattctttaggcctcacaaccccacctggtggagagtccagtctgtgctatgagaacaggttcagaacgcaggtgacctgaacctgtgaacgctaccctgtgaacgctgtctgctggaaatcagttttcttcaacatgaactgtactccctcttttcattttttagaagggacagattctccattatctcgagactggcggccagggagcctggaacctatctggagacctcatgggaagaaca

SEQ ID NO: 8290 - DNA, 2300 bp, Homo sapien
gtttgtgctgggaactgcagtgcttctgaattgtcaaatatttatggacacgtaaacaaagcccacattatgtgtgtggctctggcagccggcaggcggtggagggcgtgctcccagctagcctgcaacagggtggggacacaaaagattcctaaagaagaaaggagattggtgctgtggcaaagcaatttgcataacgtatgccccaggaactgagaagtgtgggaggaatgttgcctgcgtaaacattcccaaagaaagttgttggttttccttcatttgctctgtatttttaaaatggctggcttatgaggccttttagatctcttttctgccactccattaacaaataccttaatggaatgtttttgtgtgtgttttacttgcataggaagtatgtcatggagaactttgagattatacccaaccaggttgttcccaggataatttgcattatatgaacatagatattcatcagtttggctcaaagtttgtttgcattttcttagtctgggagaaattcgatggcagattagacagaaaaagaagagaaatgacaggcagaaagtcagcatcttaatatttcctgcaaacagaagagttttaattcacagccacatgatcacaatgagaatttggttccattgtagaatacaaaagggctcacagcatccactgggcttcttaactcttttcagtgattaacaagttgcttgctaagccacatccaagatttctgacttattagtattccttagttagaaccctttgaacagtttgctgttatagttgatatttccataatgttgaatgcccttagctccccgcggccctggcttcttatatatgtctgtacctgttgccatgactggtgagatagcaaaattcatttgacttactcaaattttattataaaatggggtcacatttttcagtctttcactgacctgatagatactcacctgcagggacagatccaagttttgtgagtcctcacatatataatttgtgtgtgtgcaggggggcttcttaaagaataagattacaaaattatgaatataataattaggtataggcaacgcatggtgggccacacctgtaaccccagcactttgggaggctgaggcgggtggattgcttgaactcacaggtttgagaccagcctgggcaatatggcaaaacccttgtctttactaaaaatacaaaaattagccgggtgtggtggcgcatgcctctaatcccagctactaggaggctgagacatgagacttgcttgaaccctggattgcagtgagccaaaatcgggccaccgcactccaacctgggtgacaaagtgagactctgtctccaaatattataataataacaataataattaggtataggaccttgggagaggcaatgcatgcggggggcctacagctggagctttcttagcttcatggtaaatctgcctccctattccacctacgtatattctaatgaaaaccacctgggtcaggagctgaaatgaatgaggacatctctctgcaaatgtgttttccttcttgttcaatagaggttgctttagggagtaaaaatgcagaatcagtaaaacaaagaaaaatcaaacaaacccaagtgagtgctccaaatgtattccaaataattcattataatactcatttctaagccgtgatgattctacactgcttttagatcattttctccctggtaaaattgagtttgagcagctccagtttgaaatgtgttgtgtctcttttgaaaaaaaggtttgtttttagattttcttctggggccaaggcaccttgaagcagagcagtcaggtgtccagagagctgaaagagccagagcatggacctaacgaaaggaactagtcccagggtgagcaatgggaagtatctaaggagcaaaaattaccaacgaaatgtcttgaggaggctgagttgtgattttaacttggggtgagcttaccaagttcaactctggactaagtcatctgaaggagagttaagtttctttctgcctttgtggttattcaggccttactgctcaatggatccttacctgaagatgaacaggagaggcccttggccctctgtgaaccaggtgtcaatcccgaggaacaactggtgagctccatcttttgtgattggacactaaatctgtatgtattttacttgtatttagcatttgacactgctgttcatgccttcttgaaatgctgtcttccttgaccagttctggttttcctcctacatttttgaccattgtttccttcttcattcatttaataaaca

SEQ ID NO: 8291 - DNA, 2300 bp, Homo sapien
accatggttgatggaatatgtcataactgtccttataagcaaggatatccagctcaccttttgttaggcttgataggaaccaagagggttcaagctgagggaaagaaagcctaatgctattaagatcataggaaattgggaagagggatcatgaatcaaagaacagttatgctcagtggaaatataattctaatcctggtccagactaggcattggaagccattggaagcaggatagcagcaaggctctggaagccagcatgggagtgatttcagggattctttaacaacagagtggcgggcatgaatagggcccatctctccaggaaatggggactgggcagagaggtagaaggaaaaacagctaatctagattgagtatttatatgcccaagatataaatgagaaagcccaggtgggagaaagtagagtgcattgtccaaggctgacatcacaaaagtagtaagtggtaggtttataatttgaatctacgtctatctgatcccaaagtccagtctttctctctcgaatacaccatgctgtcaggattgagggtggggacaaatagtaagcagagaaaaaaaatcaggcttcagtaagtttcatagaacagtggataggattttgctctggatgctagtttcctagagggggacagaaaaacccctcctcagcaactcgtggcaagaccctttaccccatttgtcttccagtctgccataacgaatgctggaaacacattaaaggctttagtaatttgtaataataactggctgattgatgaactgagacaacaataattagtatgctttttcccctaggatgccttgcagcagagattgactcagcaggacacatctgttcttcagctcaaacaagagctactgagggcaaatatggacaaagatgagctgcacaaccagaatgtgagttaaatgaatgagccttgacctcagtgagccccattagcagaacaggctactgcacgaagaactattagactggccatcctaatctcttatcttgcttctgggatgcctgccttaagtgtctgcagttatttttattccccattagactcatctctgttcctaggtgaaagcccacatcatactgggcaggaaggtccttgatctcctcttcaactttgaggacactgagatacagaggcaaaattgtggttctacagtctaattacttcactaaaaatgtggagagcagctgtgtatttttaccatcataccctctctgtgctgcatactgtaactgccaacattaactggttactaagtagctggtttccttgagggttagcaggcagtacctgcgtgccatgaattctttcttattcttgcaggtggatctgcagaggaagctagatgagaggaaccggctcttgggagaatataaagtaagaatgaatatcagtttggaaatgacttccactgacttttcatgaacagcccgttattgttgctcaaaaagcacttaagtattctattttcatcctttttgatttttttttatccttgctttttagaaggaagcatttttctgtgtcccctgatgcactagctctgaagaatagatggcacagctaggagaaggagtacaggactaggggtctagaaacttcagttctagtcttacctttatctctgactagtatgaatggctcatagtggtcctcctacaaatgccagttcccttcttcattactcttgaagaatcctttgcactatgtaagattattatggtgtgtaaagtcttcctggtatatttgaggaaaggactttttttcctgaggctctactttacttgagtggaagttacactgcagagggtgaacttttcagtgtccctggttttgccgctcatcttaaagctctatctttattgcagaaagagctggggcagaaggatcgccttcttcagcagcaccaggccaagttagaagaagcactccggaaactctctgatgtcagttaccaccaggtcagaacatattcagccactgacttccctgcctctttggcccaaagaaatcattttctgatttagtgtctattttgcaggtggatctagagcgagagctagaacacaaagatgtcctcttggctcactgtatgaaaagagaggcagatgaggtaacctagaccccgtgttctccctcccacatttatgaagcaaacggggagattgtgtttctgactcagagctgaaccaaggccacaggcttgtttgttaggaggctctatgatgagctagttaaaagtgcaggttccagaataagaaaatctg

SEQ ID NO: 8292 - DNA, 2300 bp, Homo sapien
agaattactttattgctacagatattttacaattagtatttctatgtaagcacataggctattatcaaggacaatttatttagcacttattttgaaattatatgtaaacatgcaaacaaataagaacccaagagtataaactctatgacaaaagtcagtatgcaagcattaagaactctttcagaaatgtgtatttaaaatgaccagaattcccagatcatttgaaagctgcctcttaaatgcctcttatcaattcatcttaaatgtttgctatattaaattctttatccctgagtgccttcatttgacttccaattacgtattttcaactattaattggctatcccattatgttaaaattaaatatgtacataactcaaaatctttcactaccaactaatttctgtttctctcaatatcagtgatatcaccattctcttaagtatctctatttcaaacctttgagtcttgagtctccttttccataatttcctttatccagtctgtttagtggaattcaagcttgttctctcaggactgatttgagaaacctaagcattcctagcccacctctggggtaagctcgccatctctggactgtttgagctatgcattcctataatttaactacacttaagtcaaaagtatattcaagacacaaactcgctattctttgaaaaatgcaaaacagggtttaagcaagcatacctaagtgcacaacagatccggaagatcacctcatactttataccaaagtctaatttagatccagttattaagttcaaatgcagcaaaagcagcaagatattttagccaactcaaaaacatttttataataatttataagtcctgggcgggcatggtggctcgcgcctgtaatctcagcactttgggaggccgaggcaggtggatcacctgaagtcaggagtttgagaccagcatgactaacatggtgaaaccccgtatctactaaaaacacaaaattagctgggcatggtggcacgtgcctgtaatcccagcactcgggaggctgaggcaggagaatcgcttgaacctgggaggtggaggttgcagtgagccgggatcatgccactgcactccagcctgggcgacagagtgagactccatccccaaataatagtaataagtcctttcagtaattacaattattctttcattgcttcttccaattgttaattcataagttgtacataattgtaacaatataattgctctcttcatattatttaaaatatgccttttcattcaatctagaaattttatatttctcaattatattgcttacatattattctgatagacagctgtacctgcttaaacattccaatttaagtaggcatgaaatagtacatccaatctgttttagttttccaaattaattgttagcaagattagcccccatttttttttttttttaacagatgggagtctcattatgttgcccaggctggtctcaaactcttgggctcaagtgattcccccacctcagcctctcaagcattgctgggactacaggcatgcaccaccgctcctggctaaaatcttgttttaagtttcttccctccaacttcctcttgcgttcttggtgttctctaaccatctctacaggggggaggtggtgatacacagcacatgcttcctccttatctaatgtcaccttcagttcagaaacgatatgttttctaattaaaagacaactttacaagagaagcgtgcctaacaaaatgtgtagatgactttttattcattgattcaaaagacatacattcagcccccgctatttactggatattaagctctggggctacatggaaggaccacgcagacactcttcatgccttcaacggcttacagttaagtttttcaaacatttgaaacataacgaagcttttggttacttaaaagaattctatggtattagggagcaacacctgttttgtaaacctatatcttcatacagggaatatgcttaatcttgctacagtatacatgaatgcgggaatgtatcttcctctgggctgcctttcgttaccacttggctgggtggaacacctgttcactccactttccacttgggctacaaacctgaaacgaaatctttgcaaccagtacagcctgcgcggggcgcggcccagtccatcccccttcggatgcgcagaagcagaggtcaccacgccggacccctcgattccctcgcgggcgattcctggctccttcaccaccccagcactccaagacccccgccctttggcctgaggctcccactgccctagccagtt

SEQ ID NO: 8293 - DNA, 2300 bp, Homo sapien
cattcctataatttaactacacttaagtcaaaagtatattcaagacacaaactcgctattctttgaaaaatgcaaaacagggtttaagcaagcatacctaagtgcacaacagatccggaagatcacctcatactttataccaaagtctaatttagatccagttattaagttcaaatgcagcaaaagcagcaagatattttagccaactcaaaaacatttttataataatttataagtcctgggcgggcatggtggctcgcgcctgtaatctcagcactttgggaggccgaggcaggtggatcacctgaagtcaggagtttgagaccagcatgactaacatggtgaaaccccgtatctactaaaaacacaaaattagctgggcatggtggcacgtgcctgtaatcccagcactcgggaggctgaggcaggagaatcgcttgaacctgggaggtggaggttgcagtgagccgggatcatgccactgcactccagcctgggcgacagagtgagactccatccccaaataatagtaataagtcctttcagtaattacaattattctttcattgcttcttccaattgttaattcataagttgtacataattgtaacaatataattgctctcttcatattatttaaaatatgccttttcattcaatctagaaattttatatttctcaattatattgcttacatattattctgatagacagctgtacctgcttaaacattccaatttaagtaggcatgaaatagtacatccaatctgttttagttttccaaattaattgttagcaagattagcccccatttttttttttttttaacagatgggagtctcattatgttgcccaggctggtctcaaactcttgggctcaagtgattcccccacctcagcctctcaagcattgctgggactacaggcatgcaccaccgctcctggctaaaatcttgttttaagtttcttccctccaacttcctcttgcgttcttggtgttctctaaccatctctacaggggggaggtggtgatacacagcacatgcttcctccttatctaatgtcaccttcagttcagaaacgatatgttttctaattaaaagacaactttacaagagaagcgtgcctaacaaaatgtgtagatgactttttattcattgattcaaaagacatacattcagcccccgctatttactggatattaagctctggggctacatggaaggaccacgcagacactcttcatgccttcaacggcttacagttaagtttttcaaacatttgaaacataacgaagcttttggttacttaaaagaattctatggtattagggagcaacacctgttttgtaaacctatatcttcatacagggaatatgcttaatcttgctacagtatacatgaatgcgggaatgtatcttcctctgggctgcctttcgttaccacttggctgggtggaacacctgttcactccactttccacttgggctacaaacctgaaacgaaatctttgcaaccagtacagcctgcgcggggcgcggcccagtccatcccccttcggatgcgcagaagcagaggtcaccacgccggacccctcgattccctcgcgggcgattcctggctccttcaccaccccagcactccaagacccccgccctttggcctgaggctcccactgccctagccagttcccgggctcacttccagcttttccagaaagcttggccacgcccctcggcccagactctcaggccactcggccgcaattaacccgcgtctctgcgcctttttaggcccctccccctcggtcgtgcccttgtcatctcttaggccccgtctcaccctttcggatgcctcccctagaaccctaccactttccacccctttccgtctgttatttctcccaaacttgcgcccgcacaggcccctctggaacactcctgccccgtagtgcccctcgtccccgctccgtagagaaagagcgtgcgtgccgcgcatttctggcctggggagcgggtggagtaaacctgcgggaaccattttacgacaacgtgcggctgtgcggtgtggctgacggcaacgccgctgctcttggagaggtcactccggagacggcgttggttttggggtgtggggggttggtggcactatgtggcgcgtctgtgcgcgacgggctcagaatgtagccccatgggcgggactcgaggctcggtggacggccttgcaggaggtacccggaactccacgagtgacctcgcgatctggcccggctcccgctcgtcgcaacagcgtgactacagg

SEQ ID NO: 8294 - DNA, 2300 bp, Homo sapien
catgtattaaaactgcgtttgattatactgttgttatttgatttccccaaggctgctggcttttaattaggaatccagactggggtggtggctcacgtatgttaccctagtactttgagaggctgaggtaggagggttgcttgaggcctaggagttcgagattagcctgtgaaacatagggagaccctgtctctacaaaaatcatttaaaaattagccgggtgtggtgatgcccacctgtgatcccagctacttgggaggctgaggtgggaggatcgcttgggctgcaatgagctgtgattgtgagctgtgattgtgccactgcactccagcttgagcgacagagccagcaagaccctatctcaaaaaaaaaaaaaaaaaaaaaaaaaaaaagtctgccaggcgcagtggctcatgcctgtaatcccagcactttgggaggctgagtcaggtggatcacctgaagtcaggagttcaagaccagcctggccaacatggtgaaaccccgcctctactaataataccaaaattagccgggcatggtagtacacacctgtaatcccagctacttgggaggctgaggcaggagaatcgcttaaacccgggaggcagaggttgcagcgagccaagaccacaccattgcactccagcctggtgacaaagtaagactctgtctcaaaaaacaaaacaaaacaaaacaaaacaaaaaaaaaacaaaaaaaattagcaatacctaagtgtaaagtattctctggttattctgggatcatttcattcaagacctccccatccctggcaccaactcgacataccagaatcctggtctgtagacaaagctgtggttctggggcagcacagagctgtttcccttctttcagctgctgctgaataaacttctcatagccctcagggtcactctgagctagatcatctaggaggttccaaaactgagtaacttgggtaagcagaccttttgaggatgtctccatgacttatgagtggtgaataattttcttaagcctgtggaaaaacacgacttcaggaagaaaactgtctgtgtaattattgattcatttctgctttggggaggtggaatgggtcaggaattgttttggtgaagttaggacagcatttgtgtctaaaaggttgtggatcagcaccactttatgttttccttattctttaattatctagtacctcttcctaaattctcacattgtcctctcagataaggccttacttctatttggaccctgacaagtcagagtaatcattttaagtctgggtttcctgatcttcttgttccaacacctgactggtggctccccagttctgaaattgccagaggtgtggtgtggggtgagggccacataagacttccttaatcctcagtatagtttagtatttcaaagcatggacttgtgagccagaatgcctagattccggtcttagttctatctctcactagctctgtgaccttgagcaattaatgttctgttcaaaatgaagacgataatacctctaccataggattattgcgagattaagtaagctaatagagaggctgggacacttctctacgtcttcagataaatctccttagcctcttctcccattggagaggtgtcccacagcatctttagaatgaggaaaagaggtttagattcttcaattactgtgtaagggttatgctaaacgggaaacttaactaacggataatcattccataggtctgcaaacccacctcttctctcagttctaacgggtaatcattctataggttggcaaacccacctcttctctcagttccttgacaaaccgcgacgcctgttaccagggtaaccagcctgggtacaacatctaattgggtccggggaacttcagggagaaaagtctcttcatatctagttccggaatgtcccccttctggtgccaggcttgcttttcagttgggcctgacccacttctcttccaggaaagcgcccgccttccttctgcacccgtcaacctctggagtgtcctgaaaaccctcccttgtgggagtctctgggctgcctgttggtgggacgatttctcaggagcacgacttccggcctgaaaaggaagtctcctcctttttctcccaaaccacttcttcccccctaccccccgccacgcgaggctgcggcgcacggtatgggtgtgtttgtgtgtatttgtgtggggagggcgtttggagggaaggttaccgggagctccgaggccgctggggaacagggatcccggtgacaaagatggggatatttcctctgtcttccactt

SEQ ID NO: 8295 - DNA, 2300 bp, Homo sapien
ttttatttaatcctcataactactttttatatgaggcaagtatctccatccctattttgtagatgaagttcccttaaagctgtaacgtcccaagccacatagtcccaggcaaatgatgtatgtcactgtctaaattaaaaatcaaacctccaatcccaatatagtttgcactgaagcaaatacgtagatttgagagtgtcaggaaccacgggtgtcaacagtaacagaaactgattactcaaaacatcaaatgcaaagatgtcctaaatttctccatttgggggcattttatttcctacttgctacggaagcttccaaaaactagatgacaagaatattttcgtgtgtagctagcaggagctttgtgcaaccaccccaacgctcactcaccccttgatcctgaggaaatcaggcatcttgctagtgagacgaagaaccactccattacaagatctcctccgacccaggaagccaaggagtcagggctcaaaggcagctctgcagcttcacccgagtccttcgtgaaaacgcagccttcccactggttactctgccctcacctgtggcccaggccactgccgcgtttcccccagcccagaccgacaggcagatctctctcccggactgaggccggaggctgagccggggcggaattcggacagcccggttgacctgggcattccccgctcacgctcctctaggacgaaccccgggggtaagtttcactccccagaaaggctgggaacgctttggatggctacggccttcggttgggccccagaaagtatctagggagcctgaagcgggggttgaggtttccaagtggaagacagaggaaatatccccatctttgtcaccgggatccctgttccccagcggcctcggagctcccggtaaccttccctccaaacgccctccccacacaaatacacacaaacacacccataccgtgcgccgcagcctcgcgtggcggggggtaggggggaagaagtggtttgggagaaaaaggaggagacttccttttcaggccggaagtcgtgctcctgagaaatcgtcccaccaacaggcagcccagagactcccacaagggagggttttcaggacactccagaggttgacgggtgcagaaggaaggcgggcgctttcctggaagagaagtgggtcaggcccaactgaaaagcaagcctggcaccagaagggggacattccggaactagatatgaagagacttttctccctgaagttccccggacccaattagatgttgtacccaggctggttaccctggtaacaggcgtcgcggtttgtcaaggaactgagagaagaggtgggtttgccaacctatagaatgattacccgttagaactgagagaagaggtgggtttgcagacctatggaatgattatccgttagttaagtttcccgtttagcataacccttacacagtaattgaagaatctaaacctcttttcctcattctaaagatgctgtgggacacctctccaatgggagaagaggctaaggagatttatctgaagacgtagagaagtgtcccagcctctctattagcttacttaatctcgcaataatcctatggtagaggtattatcgtcttcattttgaacagaacattaattgctcaaggtcacagagctagtgagagatagaactaagaccggaatctaggcattctggctcacaagtccatgctttgaaatactaaactatactgaggattaaggaagtcttatgtggccctcaccccacaccacacctctggcaatttcagaactggggagccaccagtcaggtgttggaacaagaagatcaggaaacccagacttaaaatgattactctgacttgtcagggtccaaatagaagtaaggccttatctgagaggacaatgtgagaatttaggaagaggtactagataattaaagaataaggaaaacataaagtggtgctgatccacaaccttttagacacaaatgctgtcctaacttcaccaaaacaattcctgacccattccacctccccaaagcagaaatgaatcaataattacacagacagttttcttcctgaagtcgtgtttttccacaggcttaagaaaattattcaccactcataagtcatggagacatcctcaaaaggtctgcttacccaagttactcagttttggaacctcctagatgatctagctcagagtgaccctgagggctatgagaagtttattcagcagcagctgaaagaagggaaacagctctgtgctgccccagaaccacagctttgtctacagacc

SEQ ID NO: 8296 - DNA, 2300 bp, Homo sapien
cctgctttctggataaatttcttgccatgccccaagtgattaatgctctttctcgttgccatattaatgcatgatgctgtctatccagaatgatatttcatacctggtaaacgtatacctattcaagaaccagttcaaagatcagcagctgaaataccactaattctgtaaaatcttttctaattccccagtgtagattttattatttcctccttagtgctccaaagcactttgcaaatatctctgttatacagtacttatcaaactgtattataattatctattttattcatcattttatttcctactgtgtacggaagcttccaaaaactagatgacaagaatattctttgtatctcccagttgttccaaaataatgcttggcacactgcttgccttcagtaagcgttgaggagtaactaggttgtacctcccaccttattgtgagcatctgtgtgccggatgacattcctcaggaggaccttccccagtggaatccgggacattcttcaatctgaaatgaatcaacaaataacgtttagtaataatttctgttattactttatcttttcttgaagttttataaagaagcatatgaggtacaggaaagatcactgaactagaagtcagagattctaaagaatagttttccctttaccattaaaagagggaaatgcctaaacacactaatgtgagatgaaaggagataatgtacattaaagttctttgaaaatgcacaagactacataaaattaagtgctttcatgagcaccattttatttaatcctcataactactttttatatgaggcaagtatctccatccctattttgtagatgaagttcccttaaagctgtaacgtcccaagccacatagtcccaggcaaatgatgtatgtcactgtctaaattaaaaatcaaacctccaatcccaatatagtttgcactgaagcaaatacgtagatttgagagtgtcaggaaccacgggtgtcaacagtaacagaaactgattactcaaaacatcaaatgcaaagatgtcctaaatttctccatttgggggcattttatttcctacttgctacggaagcttccaaaaactagatgacaagaatattttcgtgtgtagctagcaggagctttgtgcaaccaccccaacgctcactcaccccttgatcctgaggaaatcaggcatcttgctagtgagacgaagaaccactccattacaagatctcctccgacccaggaagccaaggagtcagggctcaaaggcagctctgcagcttcacccgagtccttcgtgaaaacgcagccttcccactggttactctgccctcacctgtggcccaggccactgccgcgtttcccccagcccagaccgacaggcagatctctctcccggactgaggccggaggctgagccggggcggaattcggacagcccggttgacctgggcattccccgctcacgctcctctaggacgaaccccgggggtaagtttcactccccagaaaggctgggaacgctttggatggctacggccttcggttgggccccagaaagtatctagggagcctgaagcgggggttgaggtttccaagtggaagacagaggaaatatccccatctttgtcaccgggatccctgttccccagcggcctcggagctcccggtaaccttccctccaaacgccctccccacacaaatacacacaaacacacccataccgtgcgccgcagcctcgcgtggcggggggtaggggggaagaagtggtttgggagaaaaaggaggagacttccttttcaggccggaagtcgtgctcctgagaaatcgtcccaccaacaggcagcccagagactcccacaagggagggttttcaggacactccagaggttgacgggtgcagaaggaaggcgggcgctttcctggaagagaagtgggtcaggcccaactgaaaagcaagcctggcaccagaagggggacattccggaactagatatgaagagacttttctccctgaagttccccggacccaattagatgttgtacccaggctggttaccctggtaacaggcgtcgcggtttgtcaaggaactgagagaagaggtgggtttgccaacctatagaatgattacccgttagaactgagagaagaggtgggtttgcagacctatggaatgattatccgttagttaagtttcccgtttagcataacccttacacagtaattgaagaatctaaacctcttttcctcattctaaagatgctgtgggacacctctccaatgggagaagaggctaaggag

SEQ ID NO: 8297 - DNA, 2300 bp, Homo sapien
aattagagttggattgtgatgtttggagctgagacttcttcctctaggcaataaagaagccatcaaatgtttttaaacagggtgtggcatgatcatagttatattttagaaagatggtttgtcagctgggtagggaatgaatcagatggggagatacagaagggagagtaattaggaggcaattgcagtattacaggtgagagatgatgagggttcgcatgaaattagtgacagcagggatgaagaagaggaatttaggagatagaatccaaagaagttggtggctaattagattataatgataagaatggaatctaattcagttgacccttgaacaatgcaggggctaggggcatcaaccccctgcatagtcgaaaatccatgtataactttttactccctcaaaatgtaagtgccaatagcctactactgactgaaagccatagcgataccataaacagtggattaacacatattttttatgttacatgtattatatactgtattcttatagtaaagtagctagagaaaacaacatttcattaagaaaatcacattgagtaggctgaggaggaagaagagggacttgttttgctatcttacaggtggcagaggtggaagaaaatctgaggataagtggacctgcacagttgagattcctgttgttcaaggtcaactgtgtaaccacctatgtgactgggtagatgatgacaattctgttaattgagataaagaacaaaaaatgggacaattatgataggaaaggtaattagtttggttttcaacatgttgatggtgaggtgcttataggatgtccaagcagttgaaaattcagacttggagtagaggagaaaagttggggctggacataaaggtttcgggattattgatgtataggttgatgataagaggtcatgagagtagatgaggtcacctaggagagcacatataatgaaaagagggccaaggcccctggtttagttttcttcagtaaactgtactacttttggtttgatcatattattattatcatatcacctgatttttaaaattatgggcgagggtaaaactgttacccgagctgcctatgcaattatgttaacctgcccctagttatatagtaagcttagatttaaaatggtagctagaaaaagataaatctagcacagatctaatgaaattatgcaggaagacttagaaataaaatgtgttctttgggtaatcacattctgcttttcaagaaattccctagcagccatactgattattttattttattttatttttgacaaaaattataatattaccagaagagatttagcttagggagtttaaagacctgtccttactagttttttgactttgttaaaatctctgagcttttgtttctttacagtaaaatgtaataatggtagctgctatattttcctcatgagattgcttaaggttcaattgagatgatataattaaaatcatattgcattttggaaatgtggcattatcatttgctaatcgcagcataattgcaagattgataaggtgatgtttgtctgtgcagcggtttaaaaattctattggggaagatttccacatatttgagatttactggattggactgttcagccactttctagagaaaccaatttgttttccaggttcctgatcatagcccagtctgtagcccaataattagtcagattgtattttcagttagttgcttttttttttttttctttttttgttgatacagagtctcactccatcgcccaggctggagtgcagtggtgcaatctcggctcactgcaacctctgcctccagggttcaagcgattctcctgcctcagcctcctgagtagctgggattacaggtgcatgctaccacgcccggctaatttttgtatttttattagagacggggtttcaccatgttggtcaggctggtgtcaaactcttgacctcatgatctgcctgctttggcctcccaaagtgctgggattacaggtgtgagccactgtgcccggccagttagttacttttctgtaatgtaaagttatttttagtaacttatttttatttcctttttaaaaattctagattcaggaggaatcagatatgtggaaaataagagaactggaaaaacagatggaagatgcttaccgggggaccaaaaggaaaatgctacccagcagttcaaggtgaagttgcagctctgagaactaaaataattctcatctttttcagaatcatcaacttttgtttaaaaatactttggtatattaaggataaattcagttctgtga

SEQ ID NO: 8298 - DNA, 2300 bp, Homo sapien
aggataaattcagttctgtgagtccttaagccttccttctttcgtaaatctagacccaggcataaagataatggctgtgacgcatatggccctgctctttgtacttatttacaatggagagttaaaaaattctacctgaacaattatgaatgtgtagggttctgtggattctaaccttacctgatagcttttaactgaagattttatactggaatcttgtggtcactaagctgatcagtcattctattctctattaatctttcattctttcaggcttttctttttgtagctggaactgcaggtgcatgccactatgcctagctactttttttttgtagaggtggtgtcttgctgtgttccccaggctggtatagaatcctgggctcacgcagtcctcccacctcaacctcccagtgttgggattataagcatgagccacttgcctggcctcagacttttcttcaccctgtctattcaccctcttcaccagatcaacagccttttcacattaccttaatagcttgagtgtaaatatgaaggattatgcaggcttagttatcttccttgtggagaggcctaggaatgcttgaataattgggaagatccttacacgcttgtaagtgtaagagctacatatataagaaatacttaaactctttaggagcagggcttgtgattttctcatttgctgctatattcctgccagctagaccagtacctggtacataggaggcccttacaatttttttttttttttttttttgagatggagtttcgcttttgttacccaggctggagtgcaatggtgtggtcttggctcactgcaacctccgcctcctggattcagccaattcttctgcctcagcctcccaatcagctgggattacaggcacctgccaccacgcctggctaatttttgtatttttagtagagacagggtttcaccatgttggccaggctggtcttgaactcctgagctcaaagtgatccacccacctcggcctcccaaagtgctgggattacaggcgtgagccactggacctggccccttaaaaatttttgataaccgattagcagcttactggctagttagtagaaatggtaaacagaagctggatcagtggttctcaacttttttcctactccagtattcccatgggttagaccttgttcccactgttattgggacctctctatagtaagttgctggtttgcacagagggaagtgtatttcagaatctctagggtagtttgaagtgtcccttgctatgattatgttctgcttccctctttgcatgccctcctagttgagaatcagcgagtgaactatcacatgacatagtccagagttgatttcatctctctatgctttgcaataggatgggtactaatggtcagatttttttctttttttcttttttttttttcctgagacggagtctcactctgttgcccaggctggagtacaatggcatgatctgggctcactgcaacctctgcctccccgggttcaggcaattttcctgcctcagccttccaagtagctgggactataggcgtgtgccaccacacctaactactttttttgtatttttagcagagacagggtttcaccatgtcccccaggctggtcttgaactcctgaccccaagtgatccactcgccccggcctcccaaagtgctgggattacaggcatgagccactgcacctggcctggtcagatttttttccactggactttacaaatgtacagaggaacagataatcaaagtgctgggattacaggcatgagctactgcactaggcctggtcagatttcttccactggacttcacaaatgtatagagaggagcagataatgtctttgccttttttttttttttttttaaacagtatcatgttgtttccttccccctcagcttgttccatgagttttgtgcatgatgttccataaagtaaactcacagattgcttttacatctaaaagttcttctgctttctcttttagccggatgcgcagtgatggttttgatgaagaaagtcaaagatactattggaggccaaagaatgaaatttctgggacactggaagatgattttcttaaggctaaatcctggaataaaaagttctatgattatgaagcaaacatgccagacaggtttgtgattaattcctgtgagcattaatatttggcctgagaacgtgtacttatcaaaattaattgtccccacaaaaaacttgtgtacaaaagttcataccagcattattaataatggccccaaaaaataatggccaagta

SEQ ID NO: 8299 - DNA, 2300 bp, Homo sapien
tctttcgcaaggaatacacatcttgcctttttttttttttttttgccatgttttccttttcttggtcatgtataagcaataaagctgttttttgttcttcatctttcttaaccccaaattttcttctatgccttaggcttcgatggttcttccaacccccttaatatggcttagggtggtttttcaaaacctacaatcccccatttgcactactggccatggaacatttatttctagtgttcctgccaatcagagatctctatattaaattctaaaatgggattaaaagaagagttggagaattcacacttattgagtaactgatgtcatacaacctggaatttctgaattccaaataaataaatttcactctttgaacatttcatcttttactttttagcaccaacagacttgataacagcctgatgctgatctgacaatgggttgatagccttcccccactgacccttaaatctgcttagtaacaagtcctttgcttctgtcattctcctgggggatggcctactgccctcctttctgtacaatctgggcaaaccgactggtgatggcaagagtggtgtcaatgaagcggtctacacagctggagagacaattttcagtgcgagagtctaggcgattccctggcttctccacacatttatcccaacataactccatgaagtgatgcacctaaaaggaaagaaaaatagtaaccattggggtctgcagataggcctaactcttgtttattaacttctcactttttgacacctgacaaaaccattctttaaatcaaccacggagtcactttgggctcttctctttcttcatttcctaattagtcaccaatattgatccagatcctcgtccctacagattgtacattctcaggtaggactaataaccttttatattccccaaagtagctagcaccattgtgaaccaactagggaaccaattaattttcccaaactattgcactcattttattccaaacctatcccctagacaaggtaattcttccattaaccttttgggggttatggatccactccccagaaaaatgcacatacaggcacagaaattatgtgcactgtcattagaatgttcagggcccaaagatttctagccagggttcttgctggtcatccgagcaccctcttcctcccacccaaaaggaaaaaaccattttaccaagagcttactatttgtgaggctgggtactaagaaatcagttctctctaaggtcctcaaggatagctgtcatcacctcccatttaagaggcgtgattatgtagtccaaggtcatgtagccagcaagaagtcaggccgcgttagaaccatgtccgaagggctccaaacccttgttctacatccatagtctacagcgactacttcagagtccaccttcctccgataatgttctagtcgttttcaaatacattgtcgcatatgatcctcacaatccagtgaggcagtggggtgacggcgacaccaaaacccacagtggatgagtatcttttctacgggcacgtggcctgcaaggagcagagggaggatgagaacccagatctttcgaatgccagcccagtcatgtcgccggctaactagtctcccgtacccttgcgtcgcccaaatcttccctgttttacaccttttcttttctccacgctacgcttatatacctggcacctgagcactaccggtcaccagggacaggagagccataactttgtctttcgtgaggggaatgggatgcagccgggatcgagcaccagtgagccgccagtgtacagacctccgagcgtgcccaggaccaccaaggaaggtgaaacttcctttcccttcaccctccccgtccccgcacctgtgcagtaaactgcgccttctgctgctcggcggccaccaggcgctgcaactccgcttcatcggcttcgcccagctccgccattgttcgcctcaggctcgccaccttccgacagctgtgtttgcgcatgcgcgacgggtgtgcaccgcctctcgacttccggttcacccagcatttcctcttccctgttttctttcgtcgtcgtgggtgggaattgtcgcctaagtggttccgggttggtggatgaccttgagccctcaggaacgagatggcggttctctggaggctgagtgccgtttgcggtgccctaggaggccgaggtgaggggtcttcccaccctgaggtgcttagcgtagcctccagccagggaaggggatggaagtgaggactcatctgccgggtgggagatctcttgaggagaagaaaataccga

SEQ ID NO: 8300 - DNA, 2300 bp, Homo sapien
gaccagattcataaaagttgatgtgagaaacacacatctttcatgttcaacatatgccacacagtaacccaaactgacaggcagtgtacatataggatataactctgagtacaaaggaagtaaaatatcaaaatagtagttgagagaagctatctctgttttttgaaggctttatctctgttttttgaagtcttttagcacaagggtatctcaatgcctacatattgattagaagacagatccaagaagatggataaaaaacagaattgctgtattgctacagaattaagccagtcttggttcagtgaagtgaacagacaccttatgaatgtaagttagtggtccaggcgtggtggctcacgcctgcaatcccagcactttgggaggctgaggtgggcagatcacctgaggtcaggagtttgaggaggtcaggagtttgagaccagcccggccaacacggtgaaacccgtctctactaaaagtacaaaacttagctgggcatggtggtgggcgcctgtaatcccagctagtcgggaggcaggggcaggagaattgcttgaactcagaaggtggaggttgcagtgagccgagatcgcaccactgcactccagcctgcataacagagcgagactctgtctcaaaaaaaaagaaaacaaaagaaaaaaatttgtaaagacttaggctagaaggtcttctatgattataaatggcatcattcaaccataatggcactgtctgcccaaaggtgtaaactaggtcttcatttgacaaagttggacacaagagtcccccctacaggtaggaagtcctgctaaaggcatgaccattagtgaaggtaaagatggctagagcccagaaagcagcagcgatggagagaacatacaatggtggctcggtgacaagtgtatgtgctgcactccacaccattctgggataggtcggtcctgaagaaatgctgagatatgagcaggtctgaccactggagttcgaagcaacagagctgaggaaagagtcattaggatgatcataagaacctctcctttaacaggactgacaaactttctaaatgaccataggtaagctacttaacaataaataggggataacatcttatttgtaaaatgaagatagcatctatttcactggggttactgtgaagttaagaccagggaacatctgcatgttccctactttatttaatgacacctcaggcattctttaacctaactcagtaatctggaaatcatgagagacttttcccctaaattcaatcgccaaatcctattggcgtatctctttaacagttcttgagacaatcttcttttctttgtgctactttcctagttcaggacctcatcttgcccggactactatgacagtgttttcctcatcagaatgaaagctcgttgagggcgggaactacgttttcttcacatttgtatcctagcattactacagtacctgaggtaacacaaatgcccaggttaaatgattttcgaactgatcccccctccactcccacatccaaacacaccaactccagaagaaatgggcaagctcctaaccctctttcccgactcagggtgggagcgagtggggagcattctagggacagtgaacggggagaaaacagaactgctatgtggattagcctcatcaggactgcgacttccagagggagctctctttctgattattccctcaactcgtcagctcacagcaagtgaaatataccttcgggtaaacatctggacccctagactacagtggtcattgctgtgatttcggtattttcttctcctcaagagatctcccacccggcagatgagtcctcacttccatccccttccctggctggaggctacgctaagcacctcagggtgggaagacccctcacctcggcctcctagggcaccgcaaacggcactcagcctccagagaaccgccatctcgttcctgagggctcaaggtcatccaccaacccggaaccacttaggcgacaattcccacccacgacgacgaaagaaaacagggaagaggaaatgctgggtgaaccggaagtcgagaggcggtgcacacccgtcgcgcatgcgcaaacacagctgtcggaaggtggcgagcctgaggcgaacaatggcggagctgggcgaagccgatgaagcggagttgcagcgcctggtggccgccgagcagcagaaggcgcagtttactgcacaggtgcggggacggggagggtgaagggaaaggaagtttcaccttccttggtggtcctgggcacgctcggaggtctgtacactggc

SEQ ID NO: 8301 - DNA, 2300 bp, Homo sapien
ggggtggggcagaaaattctggaagtagaggagataggaatgggtggggcaagaagaccacattcagaggccaaaagctgaaagaaaccatggcatttatgatgaattcagggtaattcagaatggaagtagagtaggagtaggagactggtgagagaagctagagtgataaacagggtgtagagcaagacgttctctcaccccaagatgtgaaatttggactttatcttggagataatagggttaattaagcacaatatgtattagctagggtaaagattagtttgttgtaacaaagacatccaaagatacagtagctgaataagatagagaatttttctctcaaagaaagtctaagtaggcagctcagaagtagtatggctggaagcaacctgatgatattgggacccccaactttcttcagtcttgtacccatcatcccctagttgttgatctcactcacatagttgaaaatcatcatacttcctgggttcatatcccagttatcaagaaagggtcaagagaagtcaggctcattcctttcaaagactctaattggaagttaaacacatcaatccccctcatattccattgactagaatttaatcacatggccacaccaagtgcaaggaaatctggaaaatataatctttattccaggtagccatatgactctttaaaattcagaaataatatatttttaaaatatcattctggctttggtataaagaattgatggtgtggggtgaggaggacaaaattaagggttgagaggctattattttagttattacaagaaatgatggtgtcatgaattaaggtagacataggggagtgctgatgaggagctgtgaatggattttagaaacacttgagagaatcaataggacatgatttagggttggatttggaaaggagaagaaagtagaaaagatgatgcctacatttttcacttaggcaatttgtaccattcagtgaaataggaaacacaggaggaagagcaggttttggtgtatacaaagaggaggatggatgacgcatttcgttttggatctgagatgtctgtggaacgtcctagtggagatgtccaaaaactcttctacatgtggttctgagttcaggacaaagatttgggctggagatagagatattgaaggcttatgcatagaaatggcatttgaatctatagagataaaaagacaaatcagaggaaatgtgtaaagtgagagaggaaaagccaagtactgaactggggggaatacctacatttaaaggatgcagtagaaagaagctaataaacaacagagagcagactaaccaaaagggaagaagaaaaaccaagagaattccaccgactcccaggagagcatttcaagattgaggggataggtgttgtgttgaattttgcagccttgagaatcaagggccagaacacagcttttagatttagcaacaaggagtttggtgatctcagtgaaagcagcttgatggtgaaatggaggcagaggcagattgcaatgagtgaaacagtgaatggaaagtgaagaaatgatacagataattcttgctaaaagcttggctgttaaaaggaggagagaaacaagactagctgcaaagtgagattgggttgatggagcagttttaaatctcaaaataaagagctttgtgcttttttgattatgaaaataatgtgttaattgtaactaattgaggcaatgaaaaaagataataatatgaaagataaaaatataaaaaccacccagaaataatgatagctaccattttgatacaatatttctacactcctttctatgtatatatacagacacagaaatgcttatatttttattaaaagggattgtactatacctaagctgctttttctagttagtgatatatatggacatctctccatggcaacgagtaattgcagttatattaagttcatgatatttcacaataagggcatatctttgccctttttatttaatcaattcttaattggtgaatgtttgtttccagtttgttgttgttattaacaatgttcccataagcattcctgtacaaaaatgttcacacatttgtctgattttttcttcaggataaaacccaggaggtagaattgctgggttgatagaagagaaaggatgattggcaaattaaagcttcagtagagggtacatgccgagcacaaatgggatcagccctagataccagaaatggcactttctcatttccccttgggacaaaagggagagaggcaataactggtgctgccagagttaaatttgtacgtggag

SEQ ID NO: 8302 - DNA, 2300 bp, Homo sapien
gaagttttagtttgccttaatttttatctttattgtttcagactcttcagcagtataaagttttcatcaagtcaaatatattcactttaaagtgactgtgctttattctgataccatgtccttcctaatttggggggcacaggtgagataagttttatgaaataaaaagattaaaaattcttacatttttagtgtccttccttggtaaaatgtagagttgtccactgtgtttatctcctcctccttattatcatggttgctgttattatttttaatggttcattaaacccaagggtctgggaaatactcatggaattcatctcacagccttcacactgtatgatatttaaacaggtggttgtccatctgattcttaaaatatttccaagaaaaatgattccacctaatgcataaatgctttcatcagattaagagaacaccatggacattttattttcttttattttttaaatattaacttccattgcataagctaaatgggtaggaataagtgagatgatattgttatctagagctttaaaatattcaaagggctgtcatcattatctcatttaatctttgaaaacaactctatgaagtacaaaggacactgagacatttgttgctctatatcaaagaaaaaagtgtttgtcccaaaacttcaaaatgtgtaaattacacattctgcatctttacagctggagaaaattcactggcaatggaatatttaaaattagagcttgcttagtgtgctgcttctgatcactacttgatcccacttcgtgctttcatgttaattggcccaattggactctacagttggaaggtgaaaacttactatttcaacttgagtcacgtatgtattcttatcatatacttcttaaaggtactattttttttcttctgatagtcaccacaccaagcacttccagccaccctgccacagacttcctttgtaatcactgttgaaggacatgatgtttttatgacttcccgaaatgaaaaccctatcttgtttttaaaacaaacaaaccaacaaaaagtagtgtttatgtaagcattttgttccctgactctaggaacccctctgtttttatatcaactctgtactggcaaaacacaaaaacaaaatgccaccttgctaattcccttcctagcaaagtaatacagtttagcacatgttcaagaaaaaaatggctaagaaattttgtttccactaattattttcaagactgtgatatttacactctgctcttcaaacgttacattttataagactattttttaacatgttgaacataagccctaaatatatgtatccttaaattgtatttcaaatattttaggtcagtctttgctatcattccaggaatagaaagttttaacactggaaactgcaagtaaatatttgccctcttacctgaattttggtatccctctccccaagcttactttctgttgcagaaagtgtaaaaattattaaataaaattctaatgatggtatccgtgtggcttgcatctgatacagcagataaagaagttttatgaaaatggactcctgttccactgaaaagtaaatcttaatggcctgtatcaactatcctttgacaccatattgagcttgggaggaaggggaagtcctgaatgaggttataaagtaaaagaaaatatttgcaaaatgttcctttttttaaaatgttacattttagaaatattttaagtgttgtaacattgtaggaattaccccaataggactgattattccgcattgtaaaataagaaaaagttttgtgctgaagtgtgaccaggaagtctgaaaatgaagagagacagatgacaaaagaagatgcttctaatggactaaggaggtgctttcttaaagtcagaaagagatactcagaaagaggtacaggttttggaaggcacagagccccaacttttacggaagaaaagatttcatgaaaatagtgatattacattaaaagaagtactcgtatcctctgccactttatttcgacttccattgccctaggaaagagcctgtttgaaggcgggcccaaggagtgccgacagcagtctcctccctccaccttcttcctcattctctccccagcttgctgagccctttgctcccctggcgactgcctggacagtcagcaaggaattgtctcccagtgcattttgccctcctggctgccaactctggctgctaaagcggctgccacctgctgcagtctacacagcttcgggaagaggaaaggaacctcagaccttccagatcgcttcctctcgcaacaaac

SEQ ID NO: 8303 - DNA, 2300 bp, Homo sapien
ctgtggcagggtggctggaagtgcttggtgtggtgactatcagaagaaaaaaaatagtacctttaagaagtatatgataagaatacatacgtgactcaagttgaaatagtaagttttcaccttccaactgtagagtccaattgggccaattaacatgaaagcacgaagtgggatcaagtagtgatcagaagcagcacactaagcaagctctaattttaaatattccattgccagtgaattttctccagctgtaaagatgcagaatgtgtaatttacacattttgaagttttgggacaaacacttttttctttgatatagagcaacaaatgtctcagtgtcctttgtacttcatagagttgttttcaaagattaaatgagataatgatgacagccctttgaatattttaaagctctagataacaatatcatctcacttattcctacccatttagcttatgcaatggaagttaatatttaaaaaataaaagaaaataaaatgtccatggtgttctcttaatctgatgaaagcatttatgcattaggtggaatcatttttcttggaaatattttaagaatcagatggacaaccacctgtttaaatatcatacagtgtgaaggctgtgagatgaattccatgagtatttcccagacccttgggtttaatgaaccattaaaaataataacagcaaccatgataataaggaggaggagataaacacagtggacaactctacattttaccaaggaaggacactaaaaatgtaagaatttttaatctttttatttcataaaacttatctcacctgtgccccccaaattaggaaggacatggtatcagaataaagcacagtcactttaaagtgaatatatttgacttgatgaaaactttatactgctgaagagtctgaaacaataaagataaaaattaaggcaaactaaaacttcattccttttcccttcattttaccacagagggtaaaaattcaacacagattgctattgttctgggacagtgtttgagactccttacttcgccatagttatctaggctagtattatgtggcctatatttcacaatattagcaactcagattaaacacattgagcgcttattttctaggaacttatttaaaacaaccggcttcttcacaaacagcaaataaatatacacacacagaatacttccaagacttaatgataactaacatttaatcaagcaaaaggaaaaaaaaaaccttagtaatgtatgtaaatgttaaatatagttctctaagatgtaagattttgtacctggagcttatggatgtgtgttattgacctttgtgttatgaggtaatttgcttttttttttcttccacatccactaactgggcgtaagcttggaatgtatatctttgaaattgcaggtcaaagcctccgcattaaagcacccgatgaggcaaagctacaattatgtgagccatgtgtgttatgcaacactttttgatagctgttgccaattagacttaacttattgacacacccggggaagaattttctaagaaggcgtgattctgaacgtttggttgcaccaaagaggaagagggggcagtaactgaggctctggatctaaaagccttgcttgtgggccaggggaacacgtgattaaagccttcctgcaaacagagcatctgcaaacgcagttttaaacccttcctgcaaacaaaccaagtaaattttactcgaaaagaggccgtggatgtgctattttgtgttcctttgctgagattctaagctgctgggacacacaccggccttgctttggcaagtcttccttgttctttcttgaccagtttcagattttttcctggttcaaacacacacagggtggcagggagagatttttgtttcacgagtattccaagtggaggggaaagagcgggagaaaaccgggaaaaagctgcctttccgtggggcctggctctgggaggctacggtggggaagttggggggggtggtggtgggagagctgtcacgtgactcgtgcaggggctgctgggagtgcggcgcgcttcccacctccacccccgaagtccgagcaccccgcgcccggggtcttcactccctcgcgttcgctgacgaggaaggtccccataccgcgaagtacattggccttggggtggggctggagggatgggcgcctgtgagaatgtgacggactgtgacacaaggaagggtgcgaggatggaaacttcctctgaggggctctagtggggcggaaacaacagtagggaggaagtgcggaggggcggcgggaagt

SEQ ID NO: 8304 - DNA, 2300 bp, Homo sapien
ttcaattttttctttctttcctttgctttttttttttgagacagaatcttgctctgttacctaggctgaagtgcagtggtgcgatcttggctcactacaacctttgcctcttgggttcaagtgattctcctgcctcggcctcctgagtagctgggattacaggcgcctgccaccacacccggctaatttttgtatttttagtagagacggggttttgccatgttggccaggctggtctcgaactcctgacctcaggtgacccacccacctcagcctcccaaaatgctgagattacaggcatgagccactcgcccggccaaaaggaaattttttaaaactaaatacaacaagaagatttgtgagttaatacgacatgtcatctggatttcgacctaccatcattaagaaatgttctttttctaagcatttattactaatatgaaaaataaggccaacagattgtttgagactagatttcataatatacttgttatatcctgatggtatcaccattgtttaacatctagttcttccctttgcaggttcagtaaattgatttgatcatttcatttgatatgattaagactggagaactgattttaagtcacaatgtgtttactgttcagcactgttcagaattgttataccttgtagtataaaggtgcctgaaagcctaatcatgaaggcttatttatttatttttttattgatcattcttgggtgtcgaaggcttattttttaaatcaaatttggatggctttggtaccatccacgtagacaagagtaattatcttggccaggcatggtggctcacacctgtaatcccagcagtttgaaaggctgaggcaggcagatcacttgaggtcaagagttcgagaccagcctggccaacgtggcaaaaccctgtctctaataaaaattaaaaaaagtagctgggtatggtggcgtacacctgtagtcccagctactcaggaggctgagataggagaatcacttgaacccgggacacagaggttgcagtgaaccgagattgtgccactctactccagcctgggtgacagagtgagactctgtctcagaaaataataataattattattatctcacaactggagaaatgctattgcaggaatactattgccctttaatttacacttctaatgttactctttactatttcaataaaatatcacaaatttataagttatttttcattgattactaatcaaaatatataccgaactatcttcgtactctgctatatgtattaagacactcccttctgacaattttaaccacttctttcttgaaatacaattttgctaggaaaacatgatatgttaatgttaaaagcaactctgtggcagtgctgtgggagttactagaagaccttttggtaagggagtcagagaggtagattttaaattggatttttgaaaaggaaaggggatatttcaggcaggggaaaagtttcttcagtggcacagaagaacaaacgtatcatggtatgttagtcactttgctgggatgataattcatgaaggggaatagtgtatggtctaaactggagagcagggacaatcttgtttcttggtattcttactttgtagcacagtatttgctacattggtgctaaaaatgttaataaagtcatatacattttaagggcatactttcactcatgctagattgtcagaaaatgttctgtaaaattaatgaatagaaaagaaaaggaaggatgaagtgatttaaaggcagagaaaaaggatgaaaggtaaattgttgccagattgtagcgtcctctagtggcagtctaaattcggactttattctgtgtcggaatcttccagaagaggagtggcataaaaaaattgatgctgtgcatcaggataaacggacttaactgtagtgtgagaacaggtttgaaaaagaaaagtttagggcgggggagaccactattggtggtctaattttaatatttcaaacagctgcgtattatagctagggtgtttggacggttgtcatggaaataagccccgccccttaagctgcgtcctctctttgacctgtcagtgagggagggacagtccaggcagttctgtgcgtgttcactgtttagtagtactcaaaactgccagtgtgagaggatttggaaatcactggatctgctcaatacaaaaatgttttttcgagtctttctccattttatcaggagtcattctgccactgcagtggatttccttcctgtgatggtgcaccggctcccaggtagagggtttgcccctttctcttcctcatcc

SEQ ID NO: 8305 - DNA, 2300 bp, Homo sapien
gtctcgaactcctgacctcaggtgacccacccacctcagcctcccaaaatgctgagattacaggcatgagccactcgcccggccaaaaggaaattttttaaaactaaatacaacaagaagatttgtgagttaatacgacatgtcatctggatttcgacctaccatcattaagaaatgttctttttctaagcatttattactaatatgaaaaataaggccaacagattgtttgagactagatttcataatatacttgttatatcctgatggtatcaccattgtttaacatctagttcttccctttgcaggttcagtaaattgatttgatcatttcatttgatatgattaagactggagaactgattttaagtcacaatgtgtttactgttcagcactgttcagaattgttataccttgtagtataaaggtgcctgaaagcctaatcatgaaggcttatttatttatttttttattgatcattcttgggtgtcgaaggcttattttttaaatcaaatttggatggctttggtaccatccacgtagacaagagtaattatcttggccaggcatggtggctcacacctgtaatcccagcagtttgaaaggctgaggcaggcagatcacttgaggtcaagagttcgagaccagcctggccaacgtggcaaaaccctgtctctaataaaaattaaaaaaagtagctgggtatggtggcgtacacctgtagtcccagctactcaggaggctgagataggagaatcacttgaacccgggacacagaggttgcagtgaaccgagattgtgccactctactccagcctgggtgacagagtgagactctgtctcagaaaataataataattattattatctcacaactggagaaatgctattgcaggaatactattgccctttaatttacacttctaatgttactctttactatttcaataaaatatcacaaatttataagttatttttcattgattactaatcaaaatatataccgaactatcttcgtactctgctatatgtattaagacactcccttctgacaattttaaccacttctttcttgaaatacaattttgctaggaaaacatgatatgttaatgttaaaagcaactctgtggcagtgctgtgggagttactagaagaccttttggtaagggagtcagagaggtagattttaaattggatttttgaaaaggaaaggggatatttcaggcaggggaaaagtttcttcagtggcacagaagaacaaacgtatcatggtatgttagtcactttgctgggatgataattcatgaaggggaatagtgtatggtctaaactggagagcagggacaatcttgtttcttggtattcttactttgtagcacagtatttgctacattggtgctaaaaatgttaataaagtcatatacattttaagggcatactttcactcatgctagattgtcagaaaatgttctgtaaaattaatgaatagaaaagaaaaggaaggatgaagtgatttaaaggcagagaaaaaggatgaaaggtaaattgttgccagattgtagcgtcctctagtggcagtctaaattcggactttattctgtgtcggaatcttccagaagaggagtggcataaaaaaattgatgctgtgcatcaggataaacggacttaactgtagtgtgagaacaggtttgaaaaagaaaagtttagggcgggggagaccactattggtggtctaattttaatatttcaaacagctgcgtattatagctagggtgtttggacggttgtcatggaaataagccccgccccttaagctgcgtcctctctttgacctgtcagtgagggagggacagtccaggcagttctgtgcgtgttcactgtttagtagtactcaaaactgccagtgtgagaggatttggaaatcactggatctgctcaatacaaaaatgttttttcgagtctttctccattttatcaggagtcattctgccactgcagtggatttccttcctgtgatggtgcaccggctcccaggtagagggtttgcccctttctcttcctcatcctcctcttcttgccagtctgcgcttagaattctgtgcctctttcctgaaggttgctgggagcttctgaagctttgtgtcctgtgtggctcagatgagatagcaattccgcagagtcctggaagttaaagaaggctgagttaggattgtttcctcatggtcagggaaacagccttcacatttgtatattttatgcaatatttaaggcaggattcagggacttggtattctttggga

SEQ ID NO: 8306 - DNA, 2300 bp, Homo sapien
gcagatcacttgaggtcaagagttcgagaccagcctggccaacgtggcaaaaccctgtctctaataaaaattaaaaaaagtagctgggtatggtggcgtacacctgtagtcccagctactcaggaggctgagataggagaatcacttgaacccgggacacagaggttgcagtgaaccgagattgtgccactctactccagcctgggtgacagagtgagactctgtctcagaaaataataataattattattatctcacaactggagaaatgctattgcaggaatactattgccctttaatttacacttctaatgttactctttactatttcaataaaatatcacaaatttataagttatttttcattgattactaatcaaaatatataccgaactatcttcgtactctgctatatgtattaagacactcccttctgacaattttaaccacttctttcttgaaatacaattttgctaggaaaacatgatatgttaatgttaaaagcaactctgtggcagtgctgtgggagttactagaagaccttttggtaagggagtcagagaggtagattttaaattggatttttgaaaaggaaaggggatatttcaggcaggggaaaagtttcttcagtggcacagaagaacaaacgtatcatggtatgttagtcactttgctgggatgataattcatgaaggggaatagtgtatggtctaaactggagagcagggacaatcttgtttcttggtattcttactttgtagcacagtatttgctacattggtgctaaaaatgttaataaagtcatatacattttaagggcatactttcactcatgctagattgtcagaaaatgttctgtaaaattaatgaatagaaaagaaaaggaaggatgaagtgatttaaaggcagagaaaaaggatgaaaggtaaattgttgccagattgtagcgtcctctagtggcagtctaaattcggactttattctgtgtcggaatcttccagaagaggagtggcataaaaaaattgatgctgtgcatcaggataaacggacttaactgtagtgtgagaacaggtttgaaaaagaaaagtttagggcgggggagaccactattggtggtctaattttaatatttcaaacagctgcgtattatagctagggtgtttggacggttgtcatggaaataagccccgccccttaagctgcgtcctctctttgacctgtcagtgagggagggacagtccaggcagttctgtgcgtgttcactgtttagtagtactcaaaactgccagtgtgagaggatttggaaatcactggatctgctcaatacaaaaatgttttttcgagtctttctccattttatcaggagtcattctgccactgcagtggatttccttcctgtgatggtgcaccggctcccaggtagagggtttgcccctttctcttcctcatcctcctcttcttgccagtctgcgcttagaattctgtgcctctttcctgaaggttgctgggagcttctgaagctttgtgtcctgtgtggctcagatgagatagcaattccgcagagtcctggaagttaaagaaggctgagttaggattgtttcctcatggtcagggaaacagccttcacatttgtatattttatgcaatatttaaggcaggattcagggacttggtattctttgggatttgcaataagaagaatattcaatatttaggcttttctaaattgaaaaatcactgccacacgttctaatgtaattgtttggtttctctatttgcattttgcggggactgccttaaaactcatttatgttttatagccttctattatagttaccattgttacatgattttatgtatagaaattggctgatctagagctttcagaaatcatactaatatgcactataaattttaaaattacttaatgtagtaatttaatgtttgcagtatgcaagggaatgtattacgtactggaaggagagaggagacaaacaccagaccctgtactcaaggagtactggtagtatcatttatcatacaagacagataagataaggtccatatgagagctataaacagatgctgtgagttcagactaaggagaatcagttcttgctgtaggtaaggggaatgctgtgtttataaagcaaatgacatggcaactggatcttgaaggatgagttaggtgagtaaatttcatctgaaggagttgggaaatatcctagatgaagaaaattgattggcgggggggggggaattaaacattctattttgacatgttgaaagtcacctgcaag

SEQ ID NO: 8307 - DNA, 2300 bp, Homo sapien
catacatgcttgtggataagaatggctttagaatttcccttagtaaggatcattacacaacagtccaaaggactgttgtcacgtggtcctatttgtgctctcaaattcttgctctttaaaaatttttttttaaagaaacggtattaatcctaagcaaaaagaacaaagctggaggcatcacgctacctgacttcgaactatactacaagcctacagtaacaaaaacagcatggtatgggtaccaaaacagatatatacaccaatggaacacaacagaggcctcagaaataacaccacacatctacaaccatctgatcttagacaaacctgataaaaacaagaaatggggaaaggattccctattaaataaatggtgctgggaaaactggctagccatatgtagaaagctgaaactggatcccttccttacaccttacacaaaaattaactcaagatggattaaagacttaaatatcagaccgaaaaccataaaaaccctagaagaaagcctaggcaatgccattcaggacataggcatgggcaaggacttcatgactacaacaccaaaagcaatggcaacaaaagccaaaatagacaaaagggatctaattaaactaaagagcttctgtacggcaaaagaatctaccatcagagtgaacaggcaacctacagaatgggagaaaatttttgcaatctacccatctgacaaagggctaatatccagaatctacaaagaacttaaacaaatttataagaaaaaaaatcaaacaaccccatcaaaaagtgggcaaagcatatgaacagacacttctcaaaagaagacatttctgcagccaacagacacatgaaaaaatgctcatcatcactggccatcagagaaatgccaatcaaaaccacaatgagataccatttcacaccagttagaatggcgatcattaaaaagttgggaaacaacagatgttggagaggatgtggagaaataggaatgcttttacactgttggtgggagtgtaaatgagttcaaccattgtggaagacagtgtgacgattcctcaaggatctagaactagaaatatcatttgacccagccatcccattactgggtatatacccaaaggattataaatcatgctactttaaagacacatgcacctgtatgtttattgtggcactattcacaattgcaaagacttggaaccaacccaaatgtccattaatgatagactggattaagaaaatgtggcacatgtacaccatggaatattatgcagccataaaaacgatgaattcatgtcctttgcagggacatggatgaagctggaaaccatcattctcagcaaactatcacaaggacagaaaaccaaacactgcatgttctcacccataggtgggaatcaaacaatgagaacacatggacacagggtggggaacatcacacaccggtgcctgtcagggagtagggggctgggggagggatagcattaggagaaatacctaatgtaaatgacgagttgatgggtgcagcaaaccaacataacacatgaatacctatgtaacaaacctgcacgttgtgcacatgtaccctagaacttaaagtataataataattaaaaagaaaaaagaaaaagagaaacgagggtcttgctctattgcccaggttggactcctgggctgaagtgatccctctccttctcaatagctggggctacaggagtgcgtcaccacgcccgcctggctcaattcctgctccttttggtctataaagcggactgtggccctggggttcatccgattgagtcaccagtcactggagctttacaggagagagtgggagaggaggctcagagaggtcactcaggacccaaagtgtgcccagacgggccctaactacgtggcgtgacctcaggcggggcaaacagatcaaggacacagggtccccacccaccctgaccactccagggtatgcttaggtatcccaaatcttgctctccgaagagattcagatagcgagagacacccttaactgtctcccgaggccgggattggccagagcggaagcggagacgcacttcctaggggcgcgtctggcacgcactgcgcagccgcggtgggaggaggcaccggccgcgcggcgggaggaggtgccggccgagcaccgcagacagcgccgggaagatgagcacggaaggtggtggccgtcgctgccaggcacaagtgtcccgccgcatctccttcagcgcgagccaccgattgtacaggtagggtgtgcacacaggtacagcggcgggcggtgggcgccg

SEQ ID NO: 8308 - DNA, 2300 bp, Homo sapien
caagcaattctcctgcctcagcctcctgagtagctgggattacaggcacacaccaccacgcctggctaatttttgtatttttagtagagacgaggtttcatcatgttggccaggctggtctcgaactcctgacctcaggtgatccaccctccttggcctcccaaagtgctgggattacaggcgtaagtcaccgtgcccagcccttttcactttcttgatagtggccttcaaagaacaaaagcttttagttttgaagtccaatttatctatttttcctttacttatttttgcctcaggcatcatgtctaataactgttgcttaaaccaaggttatgaagatttatacctatgttttttcctaagagttttatagttttacatgtaggcccttggttcaccttgagttaattttgtatatggtacgagtagggctccaactttattcttttgcatgtgcatattcagttgacccagcaccatttatttccccattgagttgtcttgttacccttgtcaaaacccagttaataataaatgtgtgggtatgtttctgaaatctcaattctatttcattgatgtatatgtctatccttatgtcagtaccacactgtcttgattactgtagctacacagtaaattttaaaattgggaagtgtgagtcctcaaactttgtgagttttgtttgtttgttttcaagatcattttgactatcctgagtgtattgttatagttttccgtatacaagtcttgcacttgttttgttaaatgtattcaattgacccatcttcaagttcaccaatactttcttctaccagttcaaatatgctgttgagttcttctggtgactttttaaaatcgtagttattgtacttttccattgcagaatttctatttggctctttttatcattttaatctctttattactattctttacttggtgagacaatcaccaaaatcaatctcatactttcctttaattctttagacatgattttttctagttctttgaacgtatttataaagctgagttaacgtctatgtcaagttcagcgtgtgggcttcctcagggacagtttctgtttacctgggatgtttttttcttctgtataagccatactttcttgtttatttgtatatcttataatttttcttgaaaactgaacatttaaaaaacatgaagccaagcaaagtgacttatgcccataatcccagcactttgggaggctgaggcaggaggattgcttatgcccaggagttcaataacagtctggacaacatagcaagactctacaaaaactataaaaattaaccaggtgtgatgacacgtgcctatagccccagctacttgggaagctgcagcaggaggatcacttaagcccaagaatttgaggctgcagtgagctatgattgcaccacttcactccagcctgggcaatagtgagactgtgtctcaaaaaaataaataaatacatacatacacacacacacacacacacacacacacacacaaatgtgacaactttggacaccagactcccttctcctccctgagtttgtttttgttgctgtttgttattcttttttattgttgttgttgctgctgtttgttttatgactttcctaaattaattatgtgaagtctgtattctttatcatgtgtaaccaccaaagtctctgttctgtttgcttattgaccagctaataaatagatttttaaaaaatttctttaactaataactctggaaccaacaagtctcccagtctttgctaagcacttctgcatgtgtgttttggggaatgccttcagtgatcagataggcagtttacagctctaccttagcctttacttcttacttgtgcagagcctcaaggtcggccagaggtgagtaattagggcctcctcaggtctttcctgggaatgtgtgtagccctgcacatgcacatggctttttagattcccagggattcgtccaagcttttcaaaccccctatagacatctcattcctcaggggtttattttacattttacacaactctgaatttcacttgctggtattcacatcttctcaatggctttcttcaaacagcagatgctgaaatgacaggcgtaaaagaaaaccatattcaggacattccctttcttgagcaaaactgcaatttgcaaaatcatcggtgacaggtaatggtgactggtgattcattcctggtgatgtcttgggccaaattccagaatccaatgtatattcagaaggggcagggagaagatctgcatgtatgacttcacccagaagccctgg

SEQ ID NO: 8309 - DNA, 2300 bp, Homo sapien
gtctcaagaagggtgttcaaggacccctttctcactgagtaggaggtcagatcttttaagcttctcttcccaacattagaatcagtcatccccccaaaattggacatttatttcagtcacttttagggagagatcagtgttgagggcacttagtggtagagtgagagcaggggttggtgggtgagaaagtgaaactggacaagagaagttgggactcagagcttcccagtccccaaacagaagaggaactgggaaggtatttccagctgcggaagaggaaggtttggacactctctttacatggctagtgtggcttcttcctttgagaggaaagaattctctgcttgagaggaaacccactgcaggaacctgaagagaactaagcccacctaggtcagtaactggaaacaagtggctcttcctctgtcctgcatagctacacttagaaatttcatggaaaggtgtgacattttatcaagacatttggctgcattgctcctgctgtttaaccagaggattcagcagcaaacaaaataagacaaaacaaaacaaaaaaaccaggacggtttaatgagtgggacatgaattggaacaggcaggatgaactgtgggttcctgtggtggtctgacaaggatgtgacgaggacacctttccaggggcaaagtcaaggccatgtgctctcacaggaaattcccttcggttaagttcctgaagagtgtattgattttctgataccctgccttattcaggtaggacttaaagcagcttacaggaaaacaagatttaaaatgtaagaagttaaggatatagggaaaagaaaggtagagcagaatgataagagaaaggtggggtttgtgatcgtgggaatttccgtgctggcatctccgtgttggttctgttgttgcaggtactgggaggaggagatgaaccctgctcctgtggaggctatgaggtattgatgtcgtgtacacatccaaggggtggtctaattatttacaactaggctcctgaaaatcagccctgaatccagctttctaccttctcttttcaatatcatttaattaattgagtcacagaaacagcctttaattcatttaattcccttacattcttctaacttctgccatatatctcgtgatctgtgatttttccttttgcactgatttgatactatgtagtagcaactaaatatcgttacttataccatagcagctaatctttcttatcaacaaaaacaaataatgtccacattcctgaaaacaattaggctctatttctagccttgtgaacaaatgcaattttgtcacttacataatttgttattgatagagtaacttcagaattatttgtagtactgcttcctgagacatataaaatcatattaatgatttttaatagcaatcaataataacatttattaaatacccacggtgcttcgaatctttcagttggtcagtcagcatttatgttcttaatatcactcccaaagcgtcatataaacaacttcttttttttttttttgagagggagtctcactctgtcacccaggctgcagtgcaatggcacaatctcagctcactgcaacctccgcctcctgggttcaagcgattctcctgcctcagcctcccgagtaggtgggattataggcacctgccaccacaccgggctaatttttgtatttttagtagagacgggttttcaccatgttggccaggctcatctcaaactcctgacctcaggtgatccgcccgcctcagcctcccaaagtgctgggattacaggcgtgagccactgcacccagcccataaaaacaacttctaacctcaggaagcctacactccaatgggaaaccaagggtgaccccagaccaatttatgcgactgctttatttccttatccacaaagtggggagaatgacagtgcccatctcataaggctgttgggaacttttaacgacataatacttgtggagcgtgatggctggcatagagaaagcactggataactgcttgttttccttcttcttgttatgattggagagattccgcggaggtggtgcctgggagctggccacacctcccccagagggaatttccgagtttcacaggtttctctcccttctgagcaacggcaggtgagtcagggtcgcttgtgctcccctccagctctgggatgtatgctgtccagctggttacgagtctccatggcatccgaggaaaagtggagctggctgaagggaggtggaaaagaagggcaacaaattccagtttcttgtgaaactttgtaaacgtaaggctct

SEQ ID NO: 8310 - DNA, 2300 bp, Homo sapien
tccaaagagtgttgtgaagatccaaggggatagcacgtgtaaagcacattcttcttaccttttatctccctgagctgagtgtagaggctgcagtcattcattgaacaattgtttattgtctacttattgctaaccattgttgcgggttctgcggaaacagtaatgaacaaaagtctctgttctcatcaagttcacattctggtggggaagcttgaaaataagtaagtaaactaagcaggataacttcagatagtgataaaagctatacagaaaaggaaacaggcccataggatagaagtgatttggtgggaggcctgaagaggctttagggagcacagtggtctttgaaccaagacctggaggccaagaaggagctgggcctgcggagacctgaggaagagcattccaggcagagagaagagcaagggcacaaagtgctgaggtgggaaagcatttggcaagaaagaagatgcttgcaggaggagcactgtgaaccctggggagtgtgggatgaggagaggagcaggagtgagttccatgcatgttcccaaactctgtgctgaggtgttcttggagctgctgtggattcagaggggctctttgagatattttaaaggccaaaggcaacactcaacttttgttgggctccatgcaaactactaagtagtgcaggatagcttgaagactcaatattagattgccctacagttttttttttttttccttgagatggtgtctcactctgttgcccaggctggagtgcagtggtgtgatcttggctcactgcaacctccgcctcccaggtttaagagattctcctgcctcagcctcctgagtagctgagaatacaggcacatgccaccacgcccagctaatttttgtatttttagtagagatggggtttctctactactaccatgttggttgagctggtctcgaactcctgacctcaagtgattcacctgccttggcctttcaaagtgctgggattacaggtgtgagccaccacgcctagcctgccctacatgttttttgataaaaccatatttttctgaagctacattttcagtttttgtcatttgctgtgacataaaacacgtaccatgggaaaatcaatatagaataggaaatgagggcggcagcgtctaatccaattccaaggtctgagaagttgcgcagtgctcaacaagcacacacatcccgttagtgagaagttgtggctaagaatgagataagtttttttttctagtttatatgcaatattttttctagtggctactagttgttaggacagaaatacttcttacttgggtctagctacttaatacacagaacagtcaggtatttctttaggcctagggttactgtgaaaaaaagcattgagacattaagggcatgataaacagacaaggttagaaactcccgggctaggtgatgagctgtcatgaaatctttctcatttcaagcgcacaacttcatattgttgccttttcatagacccaggggtgtgtgtttctgtgcatttgtggataacctgaaaacgtcgtctagattttgtaactgggagggtccccaacctgcctgaccattaggatcacctgggggaactttgcaaaaatagttccctggcctctgcccaggggattctaattcagtgggtctgacatttgaatctgagttcaaagatctctgctccaactcgcattctttcaggcagccaggatggcccaagtggagccggcctgcccagatttgggggtcctagttgttatacgttgtgcctggggccaggctgtgtggctttttcggatccccaagactgggaaggggcgtggagcacgtgtccgttggaaccctgggggaggtcggtgctggaagcgctcatctccacctccagtctgggtgcgctgcgtgagtgacccgaaaggaagatgattcttgccgtaggaagcccctgccaggacagtcaccacctcccaggcccagtggactcggacccgagcgtcctccgggagggtttctggggcgtggcggctgagcgcggttcggggagacgcggccgggaggtggcagcagcggccctctggcagacacggtgcgtgccggggggcggggacgcgggcggctccgggcgggcgtggtccctcttgcgggcgcctgggctggtcgggcggatcccggagagggggagccgcggggacgcagcgacagactcggggtgctggcagcggcagcccacgcctcccagggattgcaggcctgggcgccggggttggaccagtctcccgggcatggcacgc

SEQ ID NO: 8311 - DNA, 2300 bp, Homo sapien
acttccctctctctctctccctgtctctctctccatagcacttgtcaccttctaacacattgcattaatttcctagggctatcataacaaattttcacaaactatgtggcttaaagcaacaaaaatgtgtctcggtcttggaggccagaagtctggaactcaggtgtgggcagggctggttctttctggaagctgtgggagaatctgtcccaggcctctttcctagtttccagtggctgctgaaaatccttggcatttcctgctttgtggaggtattgctcccatctctgccttcatcttctcatggttttcacctctgtgtgtctgtatgtgtcaaattcccctctttatcttataaggaaaccagttatgggagttagacttcttagcatttcttgttttgtggagacattgctctcatctctgcctccatctcacatggttttcgcctctctgtgtctgtatgtctgaaattcccctcttctttatcttataagaaaaccagttacgggatttagactcactctaattccagtatgatctcatcttgagatccttaatttaatgacatttccaaagacgttacttccaagtaagttcccattcacaggtaccagaggttaagacttggtcatatcttctagggccactattcaacccactacatatacctaataaatttacctatttatctgcttggaatctgtatttccacattagaaggaaatctccatgagggtagggcatcttgcctgttgcattcacttgactgctttacttggcacctagaatagtagcaggtacgtagtagtgctggataaatcttggactgatgactgagtgcatctcatttcttcctgctgcagcatcaggcatggctgtgcacctcttttacttccaaactcctcttctttggtttctgagacttcctcgctctccttgtttctcttttgccttctctggttgttccttcccagtctccatggttggagcatcttcttttactcaatccttcactgatgtgtccctgctcctcttttctactcactggatttccttgtcacagcaactcacctacttccatggtcagtcacttcctggatgcagattacccacatttcctggtttccatcctgtcttgcttctaagccccatttccagtttccctttttatctgaacaccacacaggcaccttatgatgaaggtacctaacacttgaacacattgtttttttcctccctaacacttgaacacattgtttttttcctccaaacctgtcttccctccttccagggttcagtactaccagcctcccagtcaccaaagccaggagcctgggatgctcttgactctcctgagtcccatctctcatcaggccctgtccattttttctcttaaagaccccttggatctgtccactgctttctttccccacgcctcagttctgccattgccagtctctccttgtctccctgcttatttaaaaataaaatggccctgttccttctaagaacataaccctcccctgacccaagaggctctgcattgcttccaggcaagactgatccttaacctccctgggccttaacctctccagacccctctactgagccctgctccttgcctcatgggatccagccacactgaccttgcagttctccacattcaccaatttcacaggctggaacagagcgggtggggaatcagaccaccccattagagcacttcctcgtgtttccgtctccacctgcctgtctgctttgtggtcccctcaaccctggaaaactgcactaaaagctgtttggattgagaacattaaaaaaagagaaaaaagtcttcacatttggaggagggagaatcatctccaagagagactttgggctccattttactctcaggttgtggcagtttcctggagaacttccattctgtctctgctctttggggttaattgttgggatcgatgccgcagcaattatgtaatgtttactgcagccaccacagagcccaggcttaagtgttgctaaatgtcactttcacgctccccagtgtatggtgtgtaattataactggttcactaacttctttgtgaagaaggcagatgcttttagcctgaaaaggagaatagaaatgcattttctctaaacatacaagagcactcatttccagagagatcctggactggagggacaggagcgtgacccaggctgttcatcatgaatggtagggcccgctgggagcatgctcctctcctaaaatggactcacaactcttcctctctgtcaggctggctggggct

SEQ ID NO: 8312 - DNA, 2300 bp, Homo sapien
tgaaccaataacattaaactgaggcaagttttttaaatctccataacaaagagaaaacttcttaaatgaatactacatataaatgcacctggcacttagtggttttgttttttttttggttattcagtttctaaataaatgttagcttttctctgtcttcattgtattgagtagctaggaagaaaaagatccaggccaagaaggaagaggactcagaggctgtgagacttgtaactagttttatatggcacttattgtttacaaggcagtttaatgtctattatgtaatttgattattaatcccattttaccaaatgaaggaaacagaggcacaaaggagttaagtgattttaccaaaatcaccctgctagtgtcagaactgagtttcccgatgctaaatcctaagttttttcctttatatcaaatgtatttgagtagagtctgcaaaaaaacgagaacagccaccaaataaagcaaaggaaatgagaaaagaaggccgaccaaatagtgtattactatgaatcggtgaaggagtagtgcacaaaagcttttagaggacagaaaggaaatgcaattataagaagatagtgttcctccgagcaggtccaggctggctctcagggaagcagggagagaatgggacttaccttcaccttgatacgatccactctaattcctttcctctcacaaagaaaggcacagagaagcaatgtggagagtgctctctgaactttgggaataaaaaactttctgacgtggctaatcagtttggcttatccaatgagataccatcacaggagtcaaaggcgaatctggggatgattctgggagggaacaacattggatggtaccgctgcatggcctgtctggctcctgagcgtgatgtgttctccctctcatctgctagatgggggccagactcagaaggtaggagagctgctctgctgggggccgaggttgcagtgaggggagaagtgtgttactgcctagggtgagaaatcacatcaataataaacacatcgcatatcccccttccaatttgcaaagcactaataccctatatttttttcacttagcctcacaaaatcatgctcattttacaaaaaaaagaaaaaggaaatggatgaaatgaaagagctactaccatttattgaatgttgaatatgtgctaatcactggacaaggaggcttgtgcctttgtgattagcacatacaaggatcatataaatgtaatcatctcaattcctctgtgaagtacgtctttttacctccagaaggacttaagattcagagagggtaagaggcttgcccaaagaccgcagctaccaggtgacagatcagaattcaaatgcaggacgacggcaagatgcttactagcagatcattttaaacgagcatgcctggcacgcagtaagcactccgtaagtagtgtcgtctgctaccactggtgttcttagaaaggctctggcccaaccctatcctagaatcatcactccattgcaggcttgacactggaaccaactctttgctctggaattaggtcaaatcattgctggcttcaggcccttctccattaaaaaacgtacccatggagataatgaatgcactgaatttctaccagtcattacgccttggtgtcaatcagaaggaatgtcccataggaaggctaggactgggcattcctctctacctatcacatgattcgatgagcacagggtgctgtggtttgatgtatagagtctgcctttcttaaaggagccctgattgtggcctggaggggcctatgtgacatgattcccgtgaggccagcctagcagagggcaggatggctatctctctactgtggctacagctgcctttggagctttctcaggaatcccgggtgtccactgattgaacaaatgtacacaaacacagcagagcctgctcctgccagaaacagactcaaagctacagcgaccagtcccagaaaagttcccccaggccagctcaactcccaccagcaggggtcacacctgagcagccagaagggtgaggggccctgatagtctggcctaccaaccagcaaacctttgtatgctgcgggtgaggtccatactcagtcagcacatggaaggggaactggaggagaacattaagctgagaggaggtcctggtgggctggggccaactccccaggagcagaggaagcagccagcagcctggatgggcagaggtgagaccagggtaagctacacctcaaattgtgcctctgcaggtggctaccaatgtcaccttaatgaggtgtctcagacaaccag

SEQ ID NO: 8313 - DNA, 2300 bp, Homo sapien
tgataacattcatttacataaatctgtaatatttaatgtggtgattttagatgttagaagcagaagtctgaaatcaaagacacttaaatacagcaaccattaaaaaaagacgtatataattcactgcatctagcacagggctaaacccagtggttgctccgcaaatatttgttgaaagatgttcaaaaaagccttatttatattatcaaactccacaaacaatataaatatgcaaaaatggggaaaccattgcaaaatcatccatatgaagaaatattacatagctataaaaatatctagaaaagctttttaatgatccagaggaataaatgcttatactgatgttaggcaaaatcagcaggattcaaattgctactataatatgtcaattataaaaatcatatgcacatacagaagacaaaatctatgagtatctctggaatctgtgggatttggggttatttttagttctttctacttttctgtacttttgaattgtttatacttggaatgagagaaatagcccaaagtaaacgttgtggaagatttacttgggggaagaaatacttttcaggggtccaagctaattacactgtactggtgtggcccacttggtctattatagaggaggaaagtggggaagagatggggcctgtccaataaggatggatgtcctgacagtagaggatggacttttaaaaactgctacagcggctgggtgcggtagctcacggctgtaatcctagcactttgggaggctgaggtgggcagatcacgaggtcaggagttcgagaccggcctgaccaacatggtgaaacaccgtctctactaaaaatacaaaaattagctgggcgtggtggcgcgcgcctgtaatcccagctactcaggaggctgaggcagcagaatcgcttgaaccgggagcagaggttgcagtgagcagagatggcgccactgcactgcagcctgggcgacagagcgaggctccatctcaaaaaaacaaaacagaaacaaaacaaaacaaaacaaaacaaaaaacctgctacaggagtggggaggccgacctttgaagaaaaacggagtacccggtaacattagtgctttaatgcctttgaacttatgcagacttcctctgttagagggtttcagtgttctaggctaatgggttaacctgacatctagaacacctttctcacattagttccttacatacccaagccttcaggtgctgagacatgattcttttcaccccgctttctccaccccctacttttgaaaacacgggtggaattttaattaaagcctattgtgttggtacctcagtaatattatacattaatatctttaagaattaaggtcacgtccccatgtaagaaaatattatttaatgacgcttctatatcataatacctatataaaagcctggctattttaataaagagaccacagatttcagaatttataaacaggaaaacattttcttcgggttatttctggaaatctcttccaaacatcggagttttcttctaacttaagtctcttcccacctccttcccaggggatctgctgaagggtgttgtatgtctctctgtgggagagcaaacttcacagttaggataaaacaaacaaacaaacaatatccaaacaacacccagcaacggcaacccccatccctctccaaagttctaatttcccgcacttaaagtcctgggctatccttgtgttgcaaggatcttagaatcgaaatggagggatttgacaactttacctaaccaaatctaaaattttgcttttattatttactagttatcaaaatatgcaaactgctgattaaggaaggctgggtagcaggagcgcctgcgaaggcgtagggtagaagtgtgaaaagaaatcccagctctcccagggagactgcgtgtgaaagagcccggctcccccaaaagctccaggccgcgttttgcaggcttccgcatctgcctccctgtctctcttacctccttgatgttcggcactatttgtggccggcgtggtggaaggacacagtgaggttctcacccccgccccccgctcctcgctcccatcccagttccatcaaaacgaacccgggccagcgcaaggatctccgagttgcgagtgtgctgaggctgggactgtcactcattctccgatcagcgcgtgaacgcagctcggctgccgctggcaggaaacaattctgcaaaaataatcatactcagcctggcaattgtctgcccctaggtctgtcgctcagccgccgtccacactcgctgcaggggggggggcac

SEQ ID NO: 8314 - DNA, 2300 bp, Homo sapien
tttactttgaaaggcaattaagacattgttccttgtgacagaaaaatacagatataggttacttccattaaattacatattacctatctgaggaattcaattaatgataaatggattccaaacagaagcactgttcaaaacttggaatttgggggtgctacagactaatttctccttcttattgctgccttcagtaaacacccacatcccttacaaatagcacacccacatcatttttttttcagttttgatgtgggatttttttttctttgcaattactatcttaattcttgaactatcaaactcaagaaaccagtcaccagttaaatcaacatattcttagtttaatcaattatcattgtaagacttagaggaaactcctttactaaacaagaatatgtcctgctattttctggtattccatttttaaaaaaaaaatcctagataaaggtatctggaaggaagttatcaggttcaacaatttagggaaagaaagagggcgttcataaagcattaacttaagaaaacagttaaagactaatggaagcttagctaggttagcagatctttaagacctttatagagggaatagtaactcaaaaacttacataaatcatagcccacacgtctacaatgtctggattatattccctgtttttaataactctgttggatttaaaacaaattatcagttattaatatttctaaatatgctagtatttattgaaagaaaataatctttctagggtttggttagagttgtgaaaggttttccacattcttatatagcctttattacattcagtgaaattctgtttaaaaacacacattctcagtcttcaaatgaaaatcaacaaaaatatatggctcactataactgtgctcacagtcaactttgtggaagcgcaccttaatttgcttagtgagagatattatatatactacttgatttcaatgttagcttttgtaaagtagctctttgttcttaaccgatggtatcttgttagaaacccagtcctatccattccttgactcttgcaagtttaactggcagaagactgcaaaattatcaagtaaacatgtgacttaaccattccagatcgttcaagcgaacaattcttcaaaacatccaaaatttatactagaataaactcaaatttactatgcaattgcacaacctttcattgtatttctaaagagcagaggacacagaaagaggagaggggcagcccatcggactcacttgacgtattaaggttagcttgccttatatgtaaattttcatatgcacccagccgagcacacaaactcagttaccactgccctggacatgctacatttgagtccaaaaaaaaaacaaaaaaaaaaaaaacaaaaaaaaaacctcagatatatatacatatgtatatatacttgttgttatgttttcattttcattctaaccctttgacttgaattctttgatttttttaaaaaaaaactatggtacaaaagacattttaatgggaaattatttctctttggaaaaccattcaacttctttcttttgttaagcaaccttgtatgtgtttcacgttctgccttcttcccatcctcaaggtaccgggccaggaaagaggtcgctttcattccagggaacactggttagaatgcctcccctgcctgggcatccaggaacatcccagtgggaattcctgggcctgcaacttccacgggatccaaatactgatgactgtacccatcacgatgatggaaaggaccgccaggcgatcccccaaaaggcccaccaaatatccgggctccattgtcacgctcccacccgggggcgaggatgtctcaaaaacaccccccttcccccgccccatgtggacaggtcgcgtcgcggcacccacgggcaccgcggaaaggggcataaccggggtggcccccgcccaggtggcagcggagacccagggccaggcggactaggcttggtccccacccctcctctccgggccctgccacggccccgccccgccgtcagtagagcccccggcccgcggtcggccggtcagcgcacgcgcgtaggtgtgcctgccaggatgccctccccggcgacgcgctcaggcccggattccgcggcgcgagagtgagcgctggcgggggcggtgggatgctccaagtcggcgtgaaagaggcgagagtgggcgagcacgggcggccggaccaggagcactcccggtgaccacctagtctccattttatttcctcggaaactgccgggcaggcgggggaccggccgcagggcggggtttctcttg

SEQ ID NO: 8315 - DNA, 2300 bp, Homo sapien
cctaaacctgtatcaagtgtgtgatgggggtgtgtgtgatatttaggatattcttcctaaggtagaatggtggtattgttgcagtccttcgtcgaattgttcatagtaactctctccttgcagcactggttggactatgaggaaaactactagagaccttttcttttctattcctcctctggaaaaatttgcttccttagcctaaaagtcacaggacagacggttagtaacggcttgacctaaaccaactgggaacagttgcctccgtattcatatttagctctgaagagcttcagaccttgtggtctgatccaagatattccagctgctgtcaggaaattcttttttatgttctttctaaatttaattgaagtctatttgtcttttttcgaggtaggctgtggaagaggcaaactagttgatgtgattagcagtgagccctgtcatggcctgtcaggagcctttctcttgatgctttccaccctctgggctgtgtgagggatgacacaaaaccacctgtcccaccccaaaagatagtctgctgtgcctcctcactgggcttccaggacattttctccaagcccattttactcagggattcattgattgtaaggaacaacacacatgcagaagagcttaaaagagaaagagggatgtgttggaagcacacagatgtatctaatggaagctaaacctggcagtgcgccacccttgcaaggggtatgtaagtgaagtcatcataacagatgaagcctcagacctcagtggctcaggacagcaggggttgatgtctcgtgctcagaaactcccacagctgggtgaggcaggctgtgctccacacagtcattcaggggtccaggatgtcaaatctctgctgtcttcccccagacgtccccagccaggcagctgataggagagatgagtggaagatcgagcaggtggttttaggggccagtcacaaaagtggcataaatgatttccacccataatcccctggccagaacccagccacgtggttatggcttactggtcgggagatgaggaaatgaagtctagctgtatgcccattggtaaagggaagtaggtttggaggacagttagccatctctgccataaccaggaacttgaagtccgtctggagctaggtgagccacttcctttgccctgccagaaaactgtgtgtcttctgtgcttgtttctgttcagatgaggagagggacagagatggtttttagtgagtaaagaaacgcacatcctctccctcctccatgactttgcagtcctctgtgtggacactgttttagcttgctggaacaccatgctgggcttcggtaaggcccttcatcgccccttgctcttggccaggggtcaaaggtcagctgagttgttagcatattctgtgcaggctcatctcagacagctaacaacaggcactgaaataatgtctgtaaaatatgtgagcaaagacagttctcccaggagactctgacctaaattttgagccaggctctgcaaatttgcctctttaactaggaaaagatgaaacaaaggacaggttccttcaattcacatctgttcagtcctgcctcagctctagataatgtgtgttccttaatgcccccaagggagagggggctttaccttctctcctttcggggtttctacactgtatcttctccccagtatagcagtcaacacaactcccagctcctaggctcagccgcacagctttaagggggttcagatgagtttgggatcaggcatatattaggaagcatgtgtgtgtgtgtgtgtgtgtgtgtgtgtgtgtgtgtgtgtgtgtgtcagagcgggggtgggggagctggagagagagagagagcgtgtttaggaaccgctggggaacactgcagttccccagtgaacactgtccatttcccctgtttagtgtttgaggcagcaaagctattacaggaataggaaggacagttggcctgacccaccccatagaggtctgtcctacccctattgagactggagaattgtcaccaccttcccacaccagaggcctcttccacagggccatgtatactgtctgttttataagccacatctcagaaatgttagggagtatggaaatgttggggccagtgccatggttgtatgttgagggagtgaaactctcttctcaggttcaggagaaggtattacaagaagaggaacccatacccagacagccctgctgttgtcctgcattgttgagggaggaattatgtcctatgtgtttgtagtaacagaatccacagctaagaaaagacaag

SEQ ID NO: 8316 - DNA, 2300 bp, Homo sapien
tccaattcatgtgtgcccgaaccctcatgtggtttctgggtcctgaatagatgcatatctgaagttggtatacttaggtacctgattttctctccagtacgaaagacaaatttctaatagacatttactcttggctgtatttcaaagccagggacgcattttcttatttgggcttaaaaccccaccctatgatactgaagttaggaaaaaggaaagagactcagccacctgcctgcagatgctctctgactgattcttggatgaacctgcctcttatctcttctagtccgattcatagtcctgtccaacaactacctgcagatccggggcatcaagaaaacagatgagggcacttatcgctgtgagggcagaatcctggcacggggggagatcaacttcaaggacattcaggtcattgtgaatggtgaggagagtccgttcttcctgatctctgcattgctacaaccttggttctccaaaatcattctctttaacttcctcttgggtctgtaaattaaatcctgtcctgactcaatcatccgtctgagctaaatcccctccccaccgtaacatctagatttctttttttttttttttttaatatacttgcctgttggatcttccttcaactacgagggattttagtgcagcaactgaatgtccttcaccgttctgcagcactaaaaactttccccctgcttacctattaatcctcattgtccttgatgttaccataattgtgaagttattccgctgcttaaatgttcaaagaaagtattaagtcaactcaggcctcagaatagtcagaatcatggtccataggcttgttaatcttaacttgcagtgtcaaataaacacacccatggaattgatctgacatttacaagatgtttacaggaaattataatgtcagtactaagaaaataagtaaatcagggttgaattgttttgactattgacacatattttttttgccaaactctccccatctcattcctttggtaaaaaacagttttgtacaaggttgtttatcacagtcccagagaaatggcactctttgttatagctgatgcattcgaattggtgttaaccatttaaccactgggagcagtaatgtccaactttttccagtacaaagagctcctttttaacatcaagtttcactgaacctggtagttattaagtttagtatgcattgactgagaaaatacataatgaagaatagtgactataaattgaataccatcttaacatgcataaaatgtattactatagcttctcaattaatgaaaaacaaaaatgcatgtttgtagaactgtctattcagtttgcagaagttatttagtacatacatgaatttcaattcctgacactaactctgtagctgcacacgacgtttgtcccacaggctgagaactcctgacctggagtggtgtctcttctccaggccattgggttcttccaaattttcacaaccaccccatgacacccttttttccttcagtgccacctaccatccaggccaggcagaatattgtgaatgccaccgccaacctcggccagtccgtcaccctggtgtgcgatgccgaaggcttcccagagcccaccatgagctggacaaagtaagaaactggctcataccttttatcatggactagaggagaatggggcatcacaaagtctgctccatgttagtgtctgcgtggaatggatgtgggcttcttaggaatattaaccccaggagaagaatggactcttttctataagattctcttgcttgtgcattgattattccttcaatttcagccttgtgggggcagagtcagagccagagggtgtggtcttgggagcccactttgaaacatttgtgggtacagttgcagcccttggatagtcagaggatggaatagaggaataagaggtgtatgtggacgttcaacttggtgccttaactttttgtgaagactgaggagtctttcccattgactcagtctgcattctatggaacctaattaaaaataaacgtcttatttctgtggtcgaaatcatgctactttgcatttctacatgctctagggatggggaacagatagagcaagaggaagacgatgagaagtacatcttcagcgacgatagttcccagctgaccatcaaaaaggtggataagaacgacgaggctgagtacatctgcattgctgagaacaaggctggcgagcaggatgcgaccatccacctcaaagtctttggtaggggcagtgggggcccaggtcactgctctgccacaattccccttcctctgc

SEQ ID NO: 8317 - DNA, 2300 bp, Homo sapien
gagaaacagatcctaagccagttagcaagagccttcgaagactgtcactgggtggagcagagctggagcaagccagaaagggactgagcaaggaaataagttgtttagcaccaccacatgccaggcactgtatatgcatatacatgtatgtgcatgtacttagaaatgtatgtataggggtgactcacgcctgtaatcccagcactttgggaggccgagatggatggatcatttgaggtcaggagttggagaccagcctggctaacatggcgaagccccgcctctactaaaaatacaaaaattagccaggcgtggtggcatgctcctgtaatcccagctattcaggaggctgaggctggagaatcgcttgaacccaggaggcggaggttgcaacgaaccaagatcacgccactgcactccagcctgggcgacatagagagactctgtctcaaaaaaaaaaaaaaaaaaaaaaaaaaagaaaaggaaaggaaaagaaatgtatgtatacctgtgtacagagacagatgtatgtatttgagcaatgatctgtgtcaggcactgtgtttagcacttcccatgcatcctttcattgaattctcataactaggcaaagtaacagtgtttttgcctcattttacagatgaagggactgaggcagggtgattaaatctgaagctcaaggtcacacagctagcaagggttgggctgagacttatacatttgaatctgttggctctggatgcccaccgtgccagccttgggttgagtcatagctgctcttccgtgggagcccctccctgcagctgccctagggtctaaccagcagtactgtctccacaggaaagatgagtccaaggagcccatcgtggaggttcgaacggaggaggagaggaccccaaaccatgatggagggaaacacacagagcccaacgagaccacgccactgacggagcccgagtacgtgggctgggaggggctggcacctgctccgtagagacccccacacccacctccccaccctacccccacctcccgtgcccctacccacagctcccggccaaacagttcaggccaggattccaaacccttggccacaagacctgcttggctgagaaatgcctgacctcaggcatttctggttctatttcggtggctgtgggtacccttagaaggctcctgtataagtagggatccctggatccctagcccctgttctcaagttatacacatattctggaaatggcttaaggtggcaaaatctcactgaaaggcttagcagagtctgcttaggatttcttgaaattctagggttttgtgttttccccctgaaaggataagggaagctggggacctggtaaagttctctgcccctcctctgttcagaaacctcggggacccacggagccccagaccagttgtggttgtaatgcctgcctagctgtcaaggatcttatgggcttaaagggaatggagtttcagggaaccacaaaatctgtgactggaagaacccacagctcctatgagccattctgagtactcgtgatctgccttattcgtgacttttcccatcggtgccctggggagccctgcaggacagctgggcccagttcctctgggacctgggaagcctagagcaggtggatgctgaacagaagcctgcccctccttgaatggagatccagggcagggatcaggaagccctaggcaggtctgcaaggacttcagggaaagggagctctatgcagagagctggagagacatcagcagggaagggctagcaggtcccttttgagaccgccacgttctctgtcgtctcctgtgtcctcttctgcccacctgggcgtgtgcttcctctcagcatccttctctctctgtgggcctgtgtccgtgcctgtgcctaactgcatgcccccacccccatggtccctgtcctgggcttcagccctcctcctcgcttctctgtcacgtctcagcttcattgtctattctcttctacttcctgtcctcccacaggctgcctgccgacactacggccactgtcgaggacatgctgccttctgtcaccaccgtcaccactaactctgacactatcaccgaaacctttgccactgctcagaacagccccaccagtgagaccaccaccctgacctccagtattgccccgccggccacggccacgcctgactcaaactctgtaccggctggccaggccaccccttccaaggggcccagcgcctctgccccctccccggccccagcttcagcccccaaggtcgcccccctcgttgacctgagcgaca

SEQ ID NO: 8318 - DNA, 2300 bp, Homo sapien
cctcacaggcctaagaggaaaatggggtgatactaatggtgataaccaaaacatcactggttcttgtctccatcaattcccacaggctggaaggtcactgtgaagtaccctatatctttctgaggatccctatggtgtgcctagcctgtgctcatcaacgtccttgctcctgccaggcacctacactgtctgctacttctcctgaggcacctcattcccttgggacagccactgtgaccatgtcctgctgggatccccaggtctcctgctgcagttgatgagccaaaagactcactctgctgatgctgtacccattcagctgccaagaggagcagaacatccgtggcccctttgtgttatactgcattagaggggtacccaagcaggatggtatgtgtaccaatgcatcatagagacttcagccaaacagctcttctgttctctacaggacacaggcatgcatcctatggggcctaggccacaagagagtcaacaggctgtacttggaatcaacactagagctagctggccatgcctggatccctctcccctctggcgaattccatctctaggggctccttgttccctgccaaacaggtttccataaagcactcatttgccaagaagttccgggtgtttctgaccgtgaacttaagctcaagtttcccctaaacctgctttttttccattggtaaccctgcacataatactctgagattttgtttagaaaaacagactgaaatttctttagggctgtgtgcatgtatttggggcatgaatgaatgtgcctattagctcattctgttctaaaccctatgattccccggatgtcacgtgccacctgttcctactgactaggtaccaggcactgaaaccaccattgcaaaattataactgagatggtgaaagggatctgacctaaccgactccatcttgcttctcatctccaagctgtctttgttcattcctaggcataggccaaactaactttggggggaacttagtttatagtgtagctttgaaacaaagacaataccagccctttcccaaacaaacccccttcttgcccaggaactagactgccttttcaggactaacaaattagccacaaaattagaaattatggtttaggagtcatgcagctagaggctgcaagattctaaacctcaaattgctcctggggataacatcaactattgtaaaacctaagatcagtgcttaagatatttcacagacactgcactcgatggatcagctggcaccacccagatgaataaactggctcatctggtcttatgacccccacctggcaactgactcagcacaagaggacagctttgactccctgtgagttcatctcctagcctaccaatcagcactcccgactcactgacccctacccaccaaattatccttaaaaactctgatccctgaaagctagggagactgatttgagtaataataaaactccggtctccctcacagccagctttgtgtgaattactctttctctattgcaattcccctgtcttgataaatcgactctgtttaggcagtgagcaaggtgaacctattgggcggttacagcactttaaccataaaccttatgagaaagtgccatttctccatttcacaggtgagaaaactgaggattaaaaaggttactcaaataactttcctaaggataaatgtgtgagtcttctaactcacacatttatcaatgaacaaaaccggattcacaagtacactggagactttacattttgggcaaggatattaagctaacgggagtgagacaacccttcttcagtagaaaaaaggcgagcagcaggcgctgctttagttaccagcactttgcttcctccgtctccccgcgccaggcatcgggcatcccaacctcgactttggccttcaacttggcgcgctccggagctagagctctgcggtagcgaatctgatcgcgtgtccatgcccgccccctgtcccgcctcctggcttttgaccccgtccttggtcccgccccgggccctggctcctggccccgcccttggtcccgccccgggcccctggctcctggccccgccccagcccaggcaggtcactgcgccatttcctgtccaaagctgggcgaatcaggtcggtgccgcggggtaccccggaatcccccctgggagctggtcctgcactggccttcagagccgagcagaggacgctgctttgggccccagagcatgggaaggtcttggctgcggtctgggacggctgcggtctgggacctgcatggagggcccgggacttgc

SEQ ID NO: 8319 - DNA, 2300 bp, Homo sapien
ctaaggataaatgtgtgagtcttctaactcacacatttatcaatgaacaaaaccggattcacaagtacactggagactttacattttgggcaaggatattaagctaacgggagtgagacaacccttcttcagtagaaaaaaggcgagcagcaggcgctgctttagttaccagcactttgcttcctccgtctccccgcgccaggcatcgggcatcccaacctcgactttggccttcaacttggcgcgctccggagctagagctctgcggtagcgaatctgatcgcgtgtccatgcccgccccctgtcccgcctcctggcttttgaccccgtccttggtcccgccccgggccctggctcctggccccgcccttggtcccgccccgggcccctggctcctggccccgccccagcccaggcaggtcactgcgccatttcctgtccaaagctgggcgaatcaggtcggtgccgcggggtaccccggaatcccccctgggagctggtcctgcactggccttcagagccgagcagaggacgctgctttgggccccagagcatgggaaggtcttggctgcggtctgggacggctgcggtctgggacctgcatggagggcccgggacttgcggacgcctgggagcggttgctgggcaacagtgcgtgcggcctggcctctttgcgcccggcgggcagcgcgcgtctggggcaggctccgcgcggggctcgggcacaggtccccgctgccgcagccctaccgagtgaagcactgagcgcggcgccgcttcgccatcacctggctctggccctctcaccctagcgtaggggggcactggccaggcagtgaggaccctgagatccatgccctgggagacagaggttgtctcctgtccatgcacccgcgcgcctgccttctaaccttcataccgttgggcagattaattcactggactaggcctctgttccgtgggagttgaaaagatttgacctggaagaaaccctagcgattattcagttaagccgcaaccccaccccctgttttatataggtaagggtgcttcacggtgaggactcgtcgcgtgcctggtgctttacatcagtccccagaatagtcctcgtagtttctctcttactgttcccatagtatgggtgaggactctgaggctcggagaggttgtgaatttagccagaatcacacagcttgtaactggtggagatgaggacactgagactcgattaaatcactcgtagtttgttcgtggcagattacgtgttagaagcgtgttacactactatgaaacctggccataaatgagaatcacctggaaagtgtttaaaatctatattcgtgtctgggcaatgtcccgggtttactgacttgaaatctcgggctacggctgaggaagctgtatatttaacaatcttcccgatgatttttatgatctgtggatgaaccactgagtactgctgggtacaccacggggccttctcgcacaaaaacaactgtaaaataatatctgaggtacctagagcagaagagacgctggtgagcatggtaacattatgttctaatcccttcagtcaatttgtaccctttcttcactcttcagaaacaagccaaaggcagattttaaacaagtatggacatttagatgcaaattgccccaagtttgttacctgtcacacatccacatttaagcttctgactagaccagcctgtcatgatcaaagtcaggtgttagtgtatttctctatccttggcaacctgtcatctgctctcttctcatctccatgccaggtccctaaatcgccggggttgatgttggctttggaagaactatttgcagagcgttttctgcactggaaggagggctggaagctttctggaagcattgccgcacgtaaatgagtgcctcttggcctaaaacagcagttggaatgaaagggatcaccctgctgttattcattgacataaacaaaactgtcataaaaataatcacttggctcttagttttagaaggctaataagcctgaccgttctgtttagtgctttattattattaatttcaccattatgctgcatcccttagggattccggttcacaatggatgctgataaagagaaagatttgcagaaatttcttaaaaatgtggatgaaatctgtaagtactagtaaatcataaattaatttctgctttagagaagtggagtagataaatgattgctctaagttcctgggtggcttgacaggtttataactcttaggaaaaaaatgtaattgaaattaaagagaagggtattgagaaa

SEQ ID NO: 8320 - DNA, 2300 bp, Homo sapien
acccctgtgagaaattcagaggtattttgttcgggattctggcaacatgccttgagccctgggtgtcccctcttctaggaatgatgctttcttcagtattcctgtgacagtctctgcaggcagacaatggcagcttctggttacttcctctccctggagagccacttcaggtataagtggatcaaggggaactgctgaaatgactcaggccattcacccttggtatttcctccaggagctgagataggtctcgctgaatgtcaaagatcgggcctcagtcaaacttccgcagagctgggtggctggtcaccttcccagtctccatgttcaccctcccagtagaaggtatgaaacatcctcttgacctcctggtctccctgatgacaatgtcctttatcaccttccaaacttctctggcagaggctttaaacttgggcaggcagggctactccagagacaatgggttctgttatgccctgtcttgctccagccaaagcaagctgggggcctccctctgacatatgtttgggggatacgtcctgctcctgatgcagtttccatcatctccaccctcttccagggagcatgactctctctcttccttttttgtattcataaaaggctactccctgatcctcccctggccaaccatttccatagaaactaagagacttgagtttgaatatcaactaccacttactagctatgtgtccattgattacttattgtcttgaagccagtttcctcatctgtgaatagaagatgttgacctcataacattgttgcaagataaacaggataatatatgtaaagcaatgcagtaactgaaatagtcactgatcctggaacaaagtgagtgttcaattagtagtggctatcactagtttctatgacaactgtctccaggcccaatctttgatccttaatctgcttgccagaattcatcctggaagttgcaggtaagttgttacagagggagcaagttctccagcttccacagggagtctctgtttgcctatcatgcctacactgttccctgggagtctggtgggcttgtggcatggacgaggggctctgcaggtttgggctgaaggcaaggcacttccttgtctggtaggtaggctcctcaaacctaacagtgatcactctgagggctccttgtggacttactcagctgtaggcaaatagtggctgactctgcactccgtggccacagttcctccaggtatgcctgtctctgggcaatggcccacttggtcagtgcccctggggagacctgtctgttcaagcacttgtcattttccctgctctgagggtctccaaggtgagagggcaatcccatggacccaggacccaggggaacctccaagctcagcactggtcaggctccagctagagcctcctctcatccctggcaacaaactgcccctagtaactgcgccaaggaggccacctcccccgtggccaccccgaggctggggtccatccctctgaggttggatagagcgcagcccaggaagggagtcccctgcagacaggagcccagcctcccccgcaactctgtccctgctgacccctccttggtaacctatagcacaccaaggctggctaacaaacaaacaaacaaaaccccaacaagaacaaaggaaacatgaaaccagtcagaccaacagattcagaccagaaaatccccattaaaattgtttgagccccatacttgctggataggggcaggggtccaggcctgaatccttcataaaccataaaaccttgaatgcactgaaggaatgcataaaccgatttcacttagcgctgggcctaaataaactggatccaacttctcaggctggacttcttccagcttcgggacaccttctcccagcatccctccctagggggaactggggaaaatcaaaggctgagacaggggaaatgcgagggcttcggagggacataccctcttccccaggcccaggtcgctccatccctgctggggcctcagggctcatgtctgggatttccccacctttgcggggcaggagcggctcctcttgggcggggaaggaggcagggccggctcgtctccccattcccctctcccggacccgaggagcaggaagcggcggctccttcggccacccaggcagcagccacagcggggagtgcgcggcgcggggacaggaagagaggggcaatggctgccgaccccaccgagctgcggctgggcagcctccccgtcttcacccgcgacgacttcgagggcgactggcgcctagtggccagcggcggcttcagccagg

SEQ ID NO: 8321 - DNA, 2300 bp, Homo sapien
cagtgcatctgtttgctgtgccgcttgtttaaagagtgaggcgtttgctaattgaaaactaaaagatccatccgtctcactcacagccagcatgaaatccactcagccatgtaagattggggtaaaaaaggcagcgcagagctacagtgtccttgggtgggtgcaccttatggagctcatcttcttcctgcttctgcctcctgatgaacagggctcccctccccaccccagagcagccagagatggcccatattaccattgtctaacatgtcctcatctatttttctcagtaaagctcagagatcgttatttttagtccccacttaaaaatggagaaactgagacttcgcgagatcaagcaatttaggcaagcccacacaacaggtaggtgaccaaggcgggacaccaatccaggtgctctggctagtctgacccatccctgaacctatgtagaggtgctgagttgggaggtaccaaatatctccttatgtggattaaacctaggaaagaatggtccaagggtatacaagggaaacactgggatgtcaaccatatctgtaatggctgatcccttaaaggcaattatggcaacattctaggactcctattggtgtaatatctccctatagagcctgcaggcaaatggaggccagtccagatcagcaagatccaggggcaggagctgggaagagtcatggtggggtgaggtggggagcccacagcttcctctgctcccgtgcctccagagatggctgcatttgagagaggtgctgttttgtgcctctggagagggggacggttcagtgctggactctgtgggatttgcaaggacactccatctctctgggactcagttctcccttctgaggtgaggcggaattggatgaatgttaaggtcctttccagccctcactttctataattgtgtgtgtcattggaggaaatgctgagatgaagttaatccttgtggcccagagaggctggattccagccatgcagggccgactccctgctctgcagagtcagtcctctgcccctgctcttccctctccctggagtgttgtgccaccttctccccttgggaactggtgttgctccttcaatgcccggttcctgtaaagtctcgcttttttgtgcttcacagcacctgtttaagcctcagttatttccctgggggtcccctctctggattgccagggtgcgggatcaggggcctggttttctttctgtgtgtgacttctgaatctgacacagaatctggcaaactgaggacagttggtaactaattgctgcagaagaaagaaaagaaagagaaagaaagaaaaagaaaggaaggaagaaagaaagaaagaaaggaaagaaagaaagagaaagaaagaaagaaagaaagaaagaaagaaagaaagaaagaaagaaagaaagaaaagaaaagaaaagaaagaaaaggagagaggaagaaaaggggagaagaacgaggttcctctgcagcccaaatgacagtgggcagggtagcagcggaacacccttcaccactctatctctttctccctctccccactccctgcctcacacacctcagtttggagtcaagggtgagctggaacccctgaggcctccttttgcatttccatgtcaggtcaactccaaacaggctttttcctttggatgagtccagcaatagaactgactacatagattccaagacctgaagtcagaaaacggatgcggacctcttccaacacctcctctccttgcctgacttgctggatgggtggtgcctcccgcaacccttggcttctgagtcctcaaaggagaagactggcgagcagacggtgaggacccagcctgcaatcacagcttattactctgggtgtgggtgggagcgcagtgggcggtcgagggttgcgttcccgcctcaaaacaagggatggcggaatcccccaacccctcctacccgttcaggccggggatcgccgaggaggtacagctcctttggtggggggcgggggcggggcctgtctcaggggcggggaccggggcacctccctcccgcgctccccgcgctcgggcgccgcagagctgtccagcttcagtgccgaaccggcagcctcacgcgcgcaccgcgccgcctccgccccgtccccgcgctccctcctgcccgcccgccccgcgcccggccccgccccgccccgccccgccgcggcccgtccactgctccccgcgggccagagccggccgagctgctgcccgccggggctctgaacggcgcggcggggccgggagccagggaccggccgagg

SEQ ID NO: 8322 - DNA, 2300 bp, Homo sapien
tgatgcccatgtccccaacacccttctcccatgatcagccctggaccccagtagcaggtgaacaaacgtatctggacagtttattgtgtgccagatgtgatacaagatgccaggtagatgagatgaataacagtagcaatagacactctatgtggagcacttaacctgagccaggcattgcatctagattattccattacctcctcccacagtcctggaaggggatgttgttatctccaccttacgaacgaagaaactgtacctcagagagtttaaggaattcgacccgcaggattcaaacccaggaagagtttgaattaaaatctgtgttcttacctctaagatatgtcactttccaacatataagtgcaggaattggcctcccaaaatctcagattgctgggcatcttgatggtagcacccttcctcagactgctgtccctctcaagctgtaggtcatctaggttgacaggtggttaacctgagaccatgaccctccagagtgtaagggacttcctgttccatgggtttctggagcctggggaacctcagcctcactgaggacatagccttcgtaaagaagggaacatctgtatgagaggcagggacagcttgcttccttgtcctgtttcctccctttttctcaaggcttaaaagatgtgcaaggtcagctcaagaagggtaaaaggacaacagcctgaggcagagacacaactaggagccaggagaactaggaggggtctgaggcttcatggcactcatgagccacagaccttgataggcccctgtttatcccacattcccccagtttatatgttccaaagggagttttagtagcaattttagtgcagtgttgtccttttgctttggggcttggtgtttgcctgttaacaaccttcttcccacccaccctctccccttttaatccataactgaattccatgctggaattaggagggtctgcctctttctgctatcaccaatgtctttgggtgctctgtctaggtttctcaccagctccagggcagcagacctgtgttgctcagtagtttgctgttccccagcaagacagtcactgccactctccaaactcaggtcagagatggacatggggatactaagctactcaacacagaaagagatcaatttttttattctctatgtagtgatttagcaatgaaactcctcttttcagagacacaaataagaccccaaagatgtactgatggccacggtttctaacatttttcagaactagttttcccttatgcaagaaggccatttattaatagtaacatttaattactttgtataaatagccgactccattaaggaaataagaaatggcagcagtgcctaccacattaattgttttggttggtttttgttgtttttcgtttttttttttctctctctctctctctctctcttccccccacaccccccgccaagctatagcttctgtagcttagtggatgttaattgcataattagaattaattgcattaattaattagttagaacatttaatattcccccaatggttcctctgaagtcatttgtgcttaagtctaactctaccaaggaataaaagatctccataaatattgtggtaaaaattttagttatatttcaatcactcagtatttatttgcattagttaggaaagcctcctattcttgattgcctatctcaacttctcagctctttcttagagcattcattagccaaataaccatgttgctacttgacagactttagattgcagcttcatggaagcctgaaatgtctcagggacaggccaaaccagagagcaagtgttacacaatcgctccagctaaatcggacagtcttctctttccaccatgtgatggttaatactgagtgtcaacttgattggattgagggacacaatgtattaatcctgggtgtgtctttgtgggtgttgccaaaagagattaacatttgagtcagtgcgctggggaaggcaaattcacccttaatctggtgggcacaatataatcagcttccagcaaatataaagcaggcacaaaaacctgaaaaaagaaagatgggcccagcctctcagcctacatctttctcctatgctgaatgcttccttccctcgaacatcagactctgggttcttcagttttgggactcagactggctttcagcttgcagacagcctactgtggaaccttgtgatcgtgtaagttaatacttaataattatatatatatatatgtctatatatataaccacgaatactaatatatactattagtgtgtgtgtatat

SEQ ID NO: 8323 - DNA, 2300 bp, Homo sapien
aaagctactgcagagttggggtgagggggatggaattggagcaagttaaaatgccacaaggctcactcttctttctataattatgtcattttttttcttgaacgaagacttcccagattgctataaacttttgattaatttccagagttctgaaaaaattgattctcaccattttttgccatttttctcattgcttttaggggggaggaaattttcagaggattttactcctaccattttcattgacattacgtgcaatatattttaattacccttctttgtgattgctttgtcacttctcaaaactcagttcaaatgtctcctccattgcaaagccctcttctttgtatcctcagggcagctattcctctattctcctatacctctgggtttatgtctttgttatttcacttttcataataacagttacttacatctgtttctatccctttttccagtctgtaagcacccagtctgtgacttgttcatcctccatgcccaggctagtttctgacacacggtagatattcaggtttgtagtctgaagagtattgtcctaggagacctcagagcctagccaagggcttctgagttccagccaccatttctctccttcttctataattcacagctgacctctatctcttcattgtcttatgtgtgctctggtgtgatgagagtaagttcagaattgacacactgagtgtatgatatggtttggatctgtgtcccaacccaaatctcatgtcaaattataatcctcaatgttaaaagtggactctgatgggaggtgatttgatcatgggagtggatccttcatgatcaagaaaccttcatgattcatcatccacttggtgctattctcgtgatagagttctcatgagatctggttgtttaaaagtgtgtggcacctcccccttctctctcttgctcttgctcctgccatgttagaggccttgctccccctttttctttcaccatgattggaagcttcctgaggcctccccagaagcagaagtcactgtgcttcctgtacagcctgtggaacagtgagaacttcttttctcttgaaattgtccagtcttaggtatttatttatagcagtgcaagaattgactaatacagtgtatgaggaaaatagggagcaaaaagttaaatcctgtgtgggtgacattcagcaacaacaacaacaacaacaacaacaataataatagcagctactgtttgctgaatacagtctgtgctagacaccaggctatgggctttataggcaatatctcaatgaattctgacatcaaccctatgaggcatgtactattatcctcattttacaggtgaggctgagtaagggaagtgggagaactgaggttggatgaaggcctgactctaaagcctatattcttaactgtcccttctgaggggtttttgagcagccagttggaggaaaggaagccccacctgtgtttgccttccccaggacctattctgcctccttgtctaaagagatgtgcctgctcccaggtgtgtttagccccgtgtgggctcacttgggtcaccttgtgctttgaaacaagatagcactgagggctcctgctgcaactggctcccagggcagacaggggtagaggccccacttccctggcattggggagacagatgtggccctcgggcaagaggtgacaaagatcttccatcatcaccccaacaattccaacatggtgacagccccagactgctagaaaagccaacccacatggaggcgagataaaatccagagggctcagaaacatttcaacaaatgctaatatcggtctctccaatacagctctgtcagcaggaagggagaattctgccagcatgcatgcatggggcacactttttggcacaagggaccttgttgctaagcaacagtagttggcctcccctcctccccataaccttttcctctgtttctgagtttccagttagcagatgggaggggctggggttgcctagcccagcccagcccttgtccccctttcctgcaacaaggggcctattcatgggtcctcagcagagttcattgtctctgtggcgcgtgtctgtgtgagtgttggagtagggatacagggaggggccatgtgcgaaccagggagacctcatcttccaaccaagcttgctgggctagctttaatcaatgctggcctgagaacaggagcggaacattgcctagtagaccctgaggctttacaacagtgccactgacccctatggtaaggttacgtctctgtgccatccctgctgtggcctctctctctttc

SEQ ID NO: 8324 - DNA, 2300 bp, Homo sapien
agaattaaaacagagggaacttcgttatcatgaagactgaaactggcaggtttgggaatttggtgattatctctcattctcctgatttctcagaaggtcagacagacagcttagttttggtttggcgaagtagagctttagcatgagtgactccattttggtttggtctgttgggcttagtgcaggaactcagtccaaagtgatggcctcctgtaaatgttaacattgtgaaacctttctaattcagtcagagactgggtgctcttcctccaatatttcctctgccatttgcatcttcctcaggggcagattaaacttcacagctcattacttgcacaagccccttctaaggctgacatctaattttgtattcattattttatattcttttctttaaagagtccttcccctccctgcaactgtataagatttaagttccactaaatctagatccatccctcatctacctacaaattagtaattatcatatttttctgtgattatatattcacatgttgtgggtccccagacctagcacaatgtctgctatgtgataattgcttaataaatatgcagtacaaagtttcagaattttcatctatcagtcattctttgtcattgggcatttattattagttgcagttagaattcaaagttgacaggtctaccaaaaagaaattgatttggttttccaaggaagggagtttctcaggatgttttggctgttttcagtgcttcctctctcaatcccagttttgtttcctttgctcatggcatgtgaattggcccttgcttcactgggataagcagattgtctcaaagacacttaacaattgtcagggatcttagagtcagtgcctacttggggtcaaccctcacaatatatctttttaaaaaaccaaaaaccttttaatcaaaacagtacatctggctcttggtatccacggatccaaccaaccacagatcaaaaatattctggaaaaaactaataaaaaataacaatacaacaacaaaaaataatgcaaatcaaaatacaatataacgactctatagcatttagattgatttgtattaggtcttataagtaatcaagagatgatttaaagtgtatggggaggatgtgtgctggttacttgtaaacattacatcattttatgtaagagacttgagcatccacggattttgctactggggcaggggaggtttctggaaccaatccccccataccaagggaggactgtgtatgtttactgcagaaaaatagagaaagcaagggcagagaagagaataaataccataaatccaccacccataggataatttgatgtctgtcctttacatacatacttacatactttttgttttctgaccaatggttatacacttaagtttttaaaaaggaatcatagtatacatagaatattgtgaacatctttctgtatgcaatgcattaaaataatgaaaccatttttaaaagcttttgacacatttatatatttataatatgacagaaagtactaagtatcttgttcacacaggactaatattatgtatatctaagtaatataaatatgtaatgtaggtaatgtaaatgtgtaatgtatcacgtagatgtaatatatgtacatagatgcaattataagcaaccttttatttataatgaggtgacgccacttctttacacaactctagagggcgccattcgtagattctggtgccacagcggcccaataaaagttgaggaaaaaagatcgagatgggctcgttggctctttcagttagataattttacaagtaagccttttgaagtttagaaaggttcagttagacctggttattaaaaacgtttaatttcctccagtgaaaaacgggcgggaagcaacgaactttgaaaacaactaaggaagaaaacgcgtctgcttacagtttgccaactacgggacaccgtggaaatcccatctcgggattggcgcggtgcctgctgggagttgtagtgcgcccctcgccttccgggcggcggtctgaggcccgcgagactccgtttcccggcaggcctcgcgtcaagacggccggcgggacgggagctgcggcgctggctacgagagtgacccagtcagcgttggttcccgtcttggccatggcctcgttcgtgacagaagttttggcacactccgggaggctggaaaaggaggatctggggacccggatcagccgcctgacccggcgggtggaggagatcaaggtgagagcggggcagctgtctgctgactggaaggggactccgggtccttgtgtgaagg

SEQ ID NO: 8325 - DNA, 2300 bp, Homo sapien
tcctcctgcctcatcctctggagtatctcaagctacaagcatgcaccatcacactcagctcaatcagatctgaaatactgcaatttttatatcaagcataagccccaatcccttcaataacactgtcttccagtcacactggctaatatgaacacatccacttgccagaggcccatagctccctggataccttgataaaaaactccaattatttaaaacccacctgtgggccctatgcagttcaggataacccttaaaattcttgcccagatgatgaatttccctgtgagaactgcatttgcatctctgcatctgtacactgagtcattgctgtctattcttttctttaacccttaaaacacagcccccaggtaaatattttcattttgtagaccagtaaaaaaggttcagccagtatttgaactcagatctgtcagattccaatgtcactattcttttcatggaaccacatcttataagacatactgattcagtaatgacttatcaggaaagctgtagaactgcttaacctatgaatgagctctggctattccataagtagagatagtcgagatgactttgtgaacgacaatgctactttcaagtcatcactagagattctgccctggctgttaaaatctaagtgctaatttgggaagatcatcttcaccatgcagtgaaacatccagcccatcaccaggactctggatagaaaaccaaccatccctccatgaattctactcatatcaggaccagcaaatatttaattttgagagctcactattggcattcctgggtaccacttttgtgccagcttatcaattccaagtcatctaaattcttcagatggtttctaacctctacttgtactcgaagttaatattcctactcattgattatgataatttcttgtcctgctaggatagcagggacaacccaggcttatcttcttttgaaaagaaagaggccagatttgtgccttgttggatccattcctggaatagattctattctcttgtctataaatggcaatcagataacacaacaaggagactgtggggtcatcataactagccaacaacttaatgggcaacgcagcaatcaaaggtgctgttttgttttgagacagagtctcactctgtcccagctggagtgcagtggtgcgatctctgctcactgcaacctccgcctcccaggttcaagcgattctcctgcctcagcctcccaagtactgggattacaggcgcccaccaccacacctggctaatttttgtatttttagtagagatggggtttcactgtgatggccagactggtcttgaactcctgacctcaagtgatccacccacctcagcctcccaaagtgatgggattacaggcgtgagccactgcgcccagccaagggtgctaaaaggaagacatggtaacatccttaaaatctcttaattctcacctatgcttgtgtccctttactatacacacacacacacatatctctcttaagccagttctactcagacttatagtaagtcaatgtgtcagtttattgttcgacaacttaaaaagaaggtagagaatttttttaaaggctcaggaaaaagtaatgtaatgattgattagctcagaacttcaacttatgagaaaaccttaaggaactgatgggtttttggtaattaaaggaaaggctaactatacagaaaattatatatatatatatatttctatatctccactagagtcaagtttaacatgaagaatgtgcaggagataaaaagtattaatttaaaaggtatgtaacctttaatctatcattgaaggaggttctacagactttttttttttcttggctcatgtgtaatgatctttaatgcgtattgaaaaattactattctcaagtaaggataatgtatatctcaggtcacttacagtctcaaagttttgtcagtatactttaaaacaatcctgcgaacagatctagattgaaggagactaaagaatcatgaactcgaggaggcgccggggcaggcgcagagctggcaagcacgtggtggggcccctgaggcgtgcatagggtcgcgcgcctgggagcttgtcgctggcgcggtccgggagggaggttcggcggcgggaggcagcatgtaggttgcagggctgaagaagcagttctacaaggccagccagctggtcagtgagaaggtcggaggggctgaggggaccaagctggacgatgacttcaaagagatggcgatgtcatcagcaaggcggtgacggaaatgctggcaaggaccatcaagtacctg

SEQ ID NO: 8326 - DNA, 2300 bp, Homo sapien
attattagtcaggatgctgttctctgtagatgcctacctgggaatactaagagtcacagccatgcataacctcccttgtcacatacactagtgtgcctcttctcttgcagtgctttggttttgctctaaacatcacacatggtttttcatccttcaaatgattagatgtattagctgcgagataatattgtgccaggctgtctttgtgatcaatgaagatgaactcagaaaatgaatttttgagttgacatagaccctagtgagcatttcttgttttagagatgggaaaacctgaggcctagggaagtttcatatttgctttggatggctaggccaatttgtagaagagatgagactggctacggtctttggtccttcactttttcagaattgcagccaagtaggttcttgaaatggggaaaagtgaggtctaagccctagattttagtaaaagagcactcagctgttgtttatctcccatttttctaaggtaccaagaggcactttcctacctggtatatgcctaccagagcaatgctgccctgctgatgaaggggccccgccggggggtcaaagaatccgtgattgctttataccgaagaaaatgccttctggtttgtactgtttgtaaagccttaaggtttttttgttgtttacctctgctccttgaagccaggaaaatatatggctttcaaaacagactatctccaacaggttgtagatttccccccaaaattctcatgaacagttttacattggaacaggttttttttcagttacttttagtgaatgtcattcttcttcaatgataactgatagaagttaagatgagaatcagtcatccctctgtgtgcccttcatgtatgcctgcattatagattttatcacattgctttcctactaggttgtaaattccttgagctcagatccttttctcactcagccatttcctctgtgcctgtcatgtaggaaccatgtaataaatgtgtgtggaaggaatgcagcattttttccatgttcacatttaagctggtagacttaaagttttagtgacttctgacactccatttttttaaaataaaggtaggaactgtaagaattggtcctgctgttctgataacatcattgtcacatactagtgaagactaactctctcctggcctgatttgcactgtataactacatggaaaggcagacctacatccccttgcctccccaggggtttatgtgatgtgtgtcctttggagaactgtaaaggggtggcctgccttcagagtgtgggcttgtgtgtgttttcaccaatacccagcaaatttgcccttcacagaagtcaggccaatatttctaccactgcctttaccttgttcataccgaatgggtgagattaagtcatgacatatactcaatagctttattttctgatttatactttgacatctgtattagttataggtgtggcagggccactttgaagctgaaaagggatcttgttggtttgatggatctgaattttattagagccatgtttttatattttaaatcaccaaatagattgacattttgaatatcctactcagcttctgaagtaatgcaattatagggatttagactctttccattattgagtcccaacccctagtgtgcatcagaatcatatagggagctttcagacagtcgtgaagctcaggcctctccctagcaattaaaccagaatccctgggaagggccctgggcatcagtgtgtcttctgcaggtgattctgatgctcagaggagatagacaaccagtgaacaggtctttggttgaaacaggtgttaagcatgaccttgacttacaagtttaggccaatgggtcataaactttacagcattagaatcactttgggagctttcataaaatcccagtgtcccggtcatctaaacactaattaaatcagcttatcagaagtgggaaccaggcatcagtagtttttaaagatccctaagtacatccaatgtgcagtaaagtttgggaaccacttgtttagactgttattaaagagatatttatctttttcagactcttccccacctaattctaccttttatctgtaggagctgaatgccaaagcagcttctctttttgaaacaaatgatgatcactccgtaactgagggcattaatgtgatgaatgaactgatcatcccctgcattcaccttatcattaataatgacatttccaaggatgatctggatgccattgaggtcatgagaaaccattggtgctcttaccttgggcaagatattgcaggtatatgctct

SEQ ID NO: 8327 - DNA, 2300 bp, Homo sapien
ggagtcatatttgtatagtcgctagtttccagactattttaaatgtactgtttatcctagtaaaactctaaagtatttgtgtgtttaagatatacacccaaagtacagaactaaattggaattctgaccttagacacttcccctctgagaactataatttaacttaattcttcagcagtgccatattgggagatatttttaggcatacatctttctttatcctactgaattagaacatagagcgtaggaatagcttgtcttgggcagggtgttgacattatatagaaggacagaggcagtgggtgcacataggaatgggtgtgtgaaactcagcttgcaatacatgctggccaaagagcacactgctctgctgccctttagcactctgttcagcctgctttcatacagtcttctgctgaacctttcttctctcctttctctctgtgttttgtgcccccttgtggtaggtgatgctgagccctgccatgcaaggggtcatcctggccatagctaaagcccgtcagacctttgaccgagatgggtctgaagcagggctgattaaggtatctctgtttttaaaattctaattcttacaatataggcatcataatattggggaaataattctataagaagggaaaaaatggggttaaggctgggtgtggtggtgtgtgcatgtagtcccagctactcaggaagctgaagtagaggctcacttgagctcaggagttggaggctgaaatgtactgtgattgcaccactgcactccagcctgggcaacataatgagatcccatctctttaaaaataaaaaggactgggcacagtggctcacacctgtaatttagcactttgggaggcccaggagggaggcttgcttgaagccaggagttcaaaaccagccgggtcaacatagtgagacccccatctctactaaggaattttttttttttttaattagctgggcatggtagcacatacctgtagtcccagctaatttggaggctgaggcaggaggatcacttgagcccaggtgttcaaggttgcagtgaaccatgattgtgccactgcattccagtctgggtgacagagtgagaccctgtctccaaaaaataaaaaaaaagtcttctgtgaagtgaaatatgagacttcctttcctgtccaactgatgaacaagctgttcacttctcttctcttgaccctaacccagccttggctagcagtaacattctctgtgacacctagcctagagggcttttcattgttgttgttaggagttgtctgttagtaacactgagttagattgtgcctttgtaattttgaggccataacaaagtaggctgtgtttttaaaaatacttgagtaaaattgcatttgtatagattctttaagtttaagtcattgacacacaaggatctgccttttataacaattaaaactaaatatttgtttttctgagaactttatgagaaaactgaatttcttaagagtacagtaggctgggcgcagtggctcatgcctgtaatcccagcactttgggaggccaaagtgggtggattgcttgagctcaggagtttgagaccagcctgggcaacatggcgaaacccaatctctatcaaaaatacaaaaattaactgggcatggtggtatatgcctgtagtcccagctacttgggaggctgaggtgggaggatcacctgagcccaggagttcagggctgcagtgagctgtgatcatgtcactgaactccagcctgggtgacaaagtgatactctgtctcaaaaaaaaaaaaaagtacagtatgtttttggtgccagaatgctaaaagagtttcatcccttatgaaatgcaagaaacttaaaaattccatagttgtttttgtaattcgatatgaattttttagaagtctttttagagtcaagagactgcctagctcctaggcatcaatttctgtgtgcagaagcccacagcacactattttctaaccattgattctgcccttaataggcattccatgaagaatactccaggctctatcagcttgccaaagagacccccacctctcacagtgatcctcgacttcagcatgtccttgtctactttttccaaaatgaagcacccaaaagggtagtagaacgaacccttctggaacagtttgcagataaaaatcttagctatgatgaaaggtgagaagagaatattcaggtgaatcccttggtctgggttgggctagatggactcctctgttggggaagttttgccctgtgccttttcattgctttctgaactttgtcccacacag

SEQ ID NO: 8328 - DNA, 2300 bp, Homo sapien
acatgcaatttcctaaaatgaatgtgtaaagacaaataagggttgctccagagacatggtaaataaagcattctagcagtgtagaaataggcaatgctgtaaataagctagactcagaaatcaatgtgggctgggcgtggtgactcatgtctgtaatccccaaattttgggaggccaaggcaggaggattgcttgagaccagaagtttgagaccatcctgggcaacacagtgagatcccatctccataaaaaagacacaaaaattagttgggcatggcacatgcatgaagtccctgctgcttcagaggctgaggcagttggactgcttgagcccaggaattcaaggctgcagtgagccatgatctcactactgtatttcagtctgggtgacagagtgagaccctgtctcaaaaaaaaaaaaaaaaaaaaagaaaaccagcatcaacctgaaatcaacctgttctacagtgacacccaggttgaggccataaacacagtcactcatgaggaaaggaaaaatggcagagccacatacataaaatgtcctactactcgcagacacaaacacagtcagcctgttgaatgtggaagattccaagttagtatcaccgcagccatgccaatctgccagttaatctgccaggggaagcggatccctgtatctccaggtggtggaagttgcaggagtcctagttcaggcctcagagagtaatctggcctctcctgggagctgcacctgacctgtacctgtttccttttgtcaaaaactgcgcccgcatgcagactagggaggcctgcaggtgaaacataacaatcccagcgacaacaatgccaggagtataggaaaggccaccgtccatgttaaattcacacttaaaagtgtagcttgagagtcagaccagaccagggcaagggtgtaggtgctactcttaaaagacgcgcttccacactcagcctctacgcagatttgggacacccagcagcctgtcaagtgggtttgccatcataacacatttgtatcttaaatgtgaaacatggttcagtaatcacaattcccacacagttgttgaaaatacaattcaggcctggcgcggtggctcacgcctataatcccagcattatggaaggccgagacgggcggatcacctgaggtcaggaattcgaggccagcctgggcaacatggtgaaaccctgggtgtggtacagcgtgcctgtaatcccagctactcaggagaatcgcttgaacccaggaggcggaagttgcagtgagccgagaccgtgcggctgcactccagcttgaggggacagagtgagactccgtctcaaaaaaaaagaaaaaaaaaaaaacaaaccgaaaccaaccaaacaaaaaacaattcaataggagcacctggtcttttaacatgaaatcgtaaatatctggctcaaacgtaacaaagtaacacaaaattttagtttgaacttctgaaaatcgaaaatggaaaaactgcaattttccttatcatgcccaggttaagagcatcagggttaagggcaccaagcgggacacccatgaacggaggctttggtccgtttggttagctttagacaagcgactgcattcatcctccttctctccttaaagatggtgaacacttcttcatgtcattggagttggaaatggctacaaagcctgatgggaaatcctttattccacggtcattcggcagtttcccacggcgggggaacagttttaactcgcccgtggggagggtggagccggaggtcagtcctacaaatgaggttttgagggcagagagcggagaagactcaggaacgcggctcccaggattcgcaaacccagttcccggacactggcagcgcggcccgcagcctccaccggctgtgaagctgaccaacagcgacaggcggggccgggatcacgtgaccgacgtctggtcagccgggcgtgcgcgggagcacgcagaactgttcggccccgggccgcgcgccttgcgtgcgcgcgcatgccgggggcggggcatgtgggccaagcctccggcgcgcgctgcgggcgggggcgggacggagcggggtggagggcgggggcggggcctagtcctgagaggctgggccggcggcggctgcggcgggagaccggtgacccgcggctgggcgcctcggccatgactgcggagctgcagcaggacgacgcggccggcgcggcagacggccacggctcggtgggctccgcggcggcgagcgggagctgggggcgggctccaggccctgaggggagcgtgcggggcctgcagggctgc

SEQ ID NO: 8329 - DNA, 2300 bp, Homo sapien
cattactaccatctaatccacatacctcattcgagtttcaattcttcccaaaatgttctttataacaaaaggatccaattcagaatcagatattgtgcttgtgtctctttagtctgataggttcctcagtctttccttaacttttataaccttggcacttttgtgtgtgtgtgtttttgtttttgagacagggtctacctctattgcccaggctggagtgcagtggcacaatcacagctcactgcagactctatctcctgagctcaagtgatcctcctgcctcagcctcccaagtagctgggactacaggagtgcaccaccacattaaactaatcttttatttttttgtgtggagacagggtatccttatgtagcttaggctggtctcaaattcctgggctcaagcagtcctcttacttcaacctcccaaagtactgggattacaggtatgagccattgcacctggcccaccttggcacttttgaagatgcctgctgttttgtttgtcccacagtatgccactgtctcatctggtgtttcctcctgaatagattcaagttatgaatttttggcaagactataccggaagagctatggaagctaggtgtgcttgttactattggggtgtcattctcctaggctgctaagtggacagagctagggaatatatgcatgtatgaacatgtgcaaacacacattacatttgtatttatttcttttcttttctttttttttttttttttttgaggcggagtctccctctgtctcccaggctggagtgcagtggcgcgatcttggttcatggcaacctccacctcctgattcaaacaattcccctgcctcagcctcccgagtagctgggattacaggcatgtgccaccacgcctgactaatttttgtagtttcagtagagatggggctcaccatgttggtcaggctggtctcaaactcctaacctcaagtgatccactggcctcggcctcccaaagtgctgggattacaggcttgagccaccacgcccagcttatttgcaattatttatatatttagcaaatgtactgaaaaccatgggttcacactgatacctccaaaaccaagtcaacaccaaatggttatcttagttttctctctttctgtgtataccactcccttcaccaacagtaagaaagcaattaggctacattttattggtagatgaaaattaggtgtagaacttcatggattctaaacaaagggactgagtgattaggagaataggaatcaaatatatactttccccccttcggttggctctgtgaaaatttatatcaaaatttgcctctataatctcatttttaataaaaaagcaggcagatgttggaaatggtatttgttttttctttctagagcatctgggggtgtctagaaatggaaaatagtgttattgtatagaattatgcatcatgttccttagtaatgaaaaatgaatgcgtattcaatcaaaaagtgaaaaaaaaacttttattaaatgatgttgaactttgttttcatcttcaataagcctagaagcatcctttctagaaggttactttctgaattgtgagcagtgaaaatttgagaagccctcctatttatcaaaagtcaatgtttcttttaattaaaagggcttaggaaaaacaaaaagcacttttccattgcattgtttgcagttgttcttcattagacaataccaggtttccattagccttgtgtaattcaagagcccaagaaccactgtcaaatgctgaagatgttactgcataagtctgatttagaacagctatttggatttcaattattaatgaaattagtgtcctgaatgtcagcaagagtactgccttaggtaaaggctgtaaaggaaatcatattagtgtggaatttcctctccttaggggctcctcttagattacattattcacttagctatctcctgtcaggaaaatggaaatgttggccacggtctgatcttggggcagaaccaaagggagaagttaagggatttcatgacggcatcaattccaaaacatttgcatggtgctggtattgcctttggtcccactgagtgtttacaaaatagcaccagtaaggatagcatcaactggcaaacggagaaggaggagaacagagtggagaggaaccctgttaggagaaattgagcggcattccatctggtaggcaagtttgcatttctcctttttgggatctgcccaggaatgttgtcaagtgtaatggctcccctgtgggcctgcatcctggtggctgcaggtgagtccttttaataa

SEQ ID NO: 8330 - DNA, 2300 bp, Homo sapien
ttgttggccaggcacagtggctcatgcctgtaatcccagcactctgggaggccgaggcgggcagattgcttgagcccaggaatttgagaccagcctgggcaacatggcaaaaccctgtctctactaaaaatacaaaaattagccaggcatgatagcatgcccctgtagtctcagctacttgggaggctgaggtggagggatcacctaagccagggagattgaggttgcagtgagctgtgatcatgctactgcactctagcctgggtgatggagtgagatcctgtttcaaaaaaaaaaaaaaaagaaaaaagaatctttgttgggcttgaagatgcatttaggaatctatagtgttctgcttgggccccattcaagacctcagcctggtggcctaggaggcagcctggttcttcttgccttgctttatcctgctgtcaaacctcaggtctgaggacattcattctggaattctggggaggtctggctctataaattctctaaaagtttggggccctctttctattcactgccctcatatccattcccctgagggaaatgcttggagctaattgtccatgtttttctggattgtgcagtgatgaagcacatgacttaagagaagagtagcccaggctccctgaacttgactgcacgttgcagaaccacaccccgctaacggccacaggaaaggaccccaatggtgaatggtataatgctttatgcagatttcataatgcacaggaataagaactgaaaggatgcagccctgaccaaggtagtttctttctttttttctttctttttaacttacctacaattcagaaaattcctccttactgcagggttcctagcctattccacacttagagtcaagtggaaaataaattaaaaaggaagaaaatgttttgttgttgatacttaacttgattggtacggggacatctacccaaatggtgagctagggtaggactccttcaaataaaaatgcacagtaattcttcttgcaggcaactttaggggtacacagctgaggcctgagggatagatacttgtctatttaacttgcaatgaagaaagaaacacttctttcaagaaagacgcttccatttaagaggaaggtattgaaaatgcttccgaggccaggtgtgattgctcatgcctctagtccctttgggggactaccaaaaatacaaaaattagccaggcatggctcgcatttgtagtcccagctcttcaagaggctgagatgggaggatcagctgagatgggggaggttggggctgcagtgagcagtgattgcgccactgcactctagcctgggtgacagagcgagactctgtctcaaaaaaaaaaaaaaaaagaaagaaagaaaagaaaagaaatgcttacgaaatgatatcaagcaaaaaaagagggcacaaaattatatgtatgtgatatttacttcattgtatacacattactgaagaaaattatggaagaatatataccaaaacgttaagagtggctgtctctgagtcataagtttacagatgattttaatttttcttcatatttttctacaaagtgcatgtattattattatttttactatatgtatttattatgtatggcaagaatgcatgaaataaatatgtatagtaaaagtttatttttattatatattttattatttttaatatatattttactatttaagtataactaattagatgaggacaaaagggcagacctgtggtgactccagttacccttcccgtaactacagaggtgcccagtcacctgcttggttatgtcaccctggggagtaaaagaatggtcttcctgctcctgcctgactcaccctatcctgccccagcccagtgccacagaaacatacttgccaagggacatcaatgaaagcagcagcgtggtgcacctcccaggggtcaggctgcacccttgtctcatgggcttctgcagcccctgtccccacctaagttactccttggggaaacatggccaagccccctggctgaatgggtggactgagctcccacagcatgacatcagctagggcgggctcccctctcagctgtcccctcccctttcctcccgcctgaaacatgatccagctgaaggactgattgcaggaaaacttggcagctccccaaccttggtggcccagggagtgtgaggctgcagcctcagaaggtgtgagcagtggccacgagaggcaggctggctgggacatgaggttggcagagggcaggcaagctggcccttggtgggcctcgtcctgagcactcggaggcactcct

SEQ ID NO: 8331 - DNA, 2300 bp, Homo sapien
ctttaacacttactaacaagggctgggcttttaatgggcagcgtttatgaagcaagggagattttcacatagagtgaatatggcacgggggtggggaggccagggccatagaggattgtgctttctctcccattgtttccagagattctctctttctctgatttgaggattaataggagattaggatcaggggttaattgtgtgcttctcctgctactgcactgaggagaggctggtaggtggatgtggacagcaaagcggaaacctccagcaggcactatctaggcagaagctcaacaagtgtagtgattctttcttctgtttccctggtgaggcaccaggagggtcttttctcctctccttacatccctccactcttgctctccttgcagcccagttctttcctaactttctttaaatccctttcctctaacagggtgtatagaccttagttagaaaaacaggtagtctctaaatgggattgctctttattgttaatgaaatgaatacccagggactgggcttcccctccgcttgccctgggtttgatgtggttgtatcccgtgctatcagaggagcccttccttcactcaagtgtgttcccctgcccagctctctccgcagactcctgctgggctgagctttccctgctcttaagagtcaggagtggctcttgctgggatggaatgacccgtctttggggctgcctcatgagcggctcttgtgaacccggatcagttccgatgtgtaaactctaccgcctggccttcagcgaacagatacagatttctgccaccttccatgaccctacagttcatgggactgggtctggggcagtgccagaggcacgcatggaggtgtgattctaggtgagtcctgcggaaaacctctggcccacccgtgagtcacggacagaacatgcagactcaggccttggtgacataagctccgcattgctaaaaccgcgtgacctcgagggctgactggcctgagaaccctggatggcgctctcggccacccccacctcccaccccaacctcctgggcttcggtcagaatccacagcccgtgcccgaagagcgcttcccgcctctggcaccctaccttcgctcagctccagggaaaaggggagagggcagctttctgcagtcagaggaagagtacattttctttggctgctctaccctctgaagtagggcggccagctgaaggaggacacacttttgaggggcccagaggttgtccaagcttccccctgccccctgaagactgtgcactgagctgggcgcagttctcgggaactgtttccacccagattgctggggggcgggggggtaggatgagggcagagccgagaggctgtccaaggtttgggagagagaaaagtttctcccaggactcgaccttggcctccagcaatcgcgacagctaaaaacgggtgtctcgcttcgacaatagatccccgcggaccttctggcacctggttcactagcgcccgcgaactctgcctcgggagacttattgaaatccggatgctcaagccgggaggcgcgcagtaaccaggaggatgagagggccgggtttgggctaggaaagcggccttttaaaacagatgtcagggggactgcagccccgagccatgagaaaaaagttaaaggcgagatgacacgcactgaattggggcaaacattggaagaggagacaaaactgcgtgcttgagcaccggggtgcggggagggggggacaaaacccgtatccagtgcaaattaaaatcttgggagtaggtgggggctgctgcgcgcccttcaccctcagttcccctattaaggattctgagtccccatgcactcctgtcctctggctccttccttcctctccgctcggccggtgagaggcggccgccggcgccccagcagcagctagatgtcaggcgaagcccggagcgcggagcgcggggaagggaggggaagggaggggaggggaaaggaggggtggggcggggagcgcgcgcgggctcggccagtgcggggtggtgggcgggctgagcccggggacggcgcgggaggggggagggaaggggggcagctgtgggcagggagccgggctcggccgccagcactaaagatggagaggcgccggggccttgcaggggagggggctcggcgttgacgtgggacgcggcggaggcgcagcagccggtggtgatttgctaacctcgcagcagagaggagttgagggcgatgagagcgggtactgcgaactgccgggcgatgctgtcgctgccgccgtgatacggagagc

SEQ ID NO: 8332 - DNA, 2300 bp, Homo sapien
gaacatgcagactcaggccttggtgacataagctccgcattgctaaaaccgcgtgacctcgagggctgactggcctgagaaccctggatggcgctctcggccacccccacctcccaccccaacctcctgggcttcggtcagaatccacagcccgtgcccgaagagcgcttcccgcctctggcaccctaccttcgctcagctccagggaaaaggggagagggcagctttctgcagtcagaggaagagtacattttctttggctgctctaccctctgaagtagggcggccagctgaaggaggacacacttttgaggggcccagaggttgtccaagcttccccctgccccctgaagactgtgcactgagctgggcgcagttctcgggaactgtttccacccagattgctggggggcgggggggtaggatgagggcagagccgagaggctgtccaaggtttgggagagagaaaagtttctcccaggactcgaccttggcctccagcaatcgcgacagctaaaaacgggtgtctcgcttcgacaatagatccccgcggaccttctggcacctggttcactagcgcccgcgaactctgcctcgggagacttattgaaatccggatgctcaagccgggaggcgcgcagtaaccaggaggatgagagggccgggtttgggctaggaaagcggccttttaaaacagatgtcagggggactgcagccccgagccatgagaaaaaagttaaaggcgagatgacacgcactgaattggggcaaacattggaagaggagacaaaactgcgtgcttgagcaccggggtgcggggagggggggacaaaacccgtatccagtgcaaattaaaatcttgggagtaggtgggggctgctgcgcgcccttcaccctcagttcccctattaaggattctgagtccccatgcactcctgtcctctggctccttccttcctctccgctcggccggtgagaggcggccgccggcgccccagcagcagctagatgtcaggcgaagcccggagcgcggagcgcggggaagggaggggaagggaggggaggggaaaggaggggtggggcggggagcgcgcgcgggctcggccagtgcggggtggtgggcgggctgagcccggggacggcgcgggaggggggagggaaggggggcagctgtgggcagggagccgggctcggccgccagcactaaagatggagaggcgccggggccttgcaggggagggggctcggcgttgacgtgggacgcggcggaggcgcagcagccggtggtgatttgctaacctcgcagcagagaggagttgagggcgatgagagcgggtactgcgaactgccgggcgatgctgtcgctgccgccgtgatacggagagcaacagttccccagcaacacccctccccgacacaggcacacaccccccgacaggcacgcacacccaccccacagtgcccggctcggctgcggtgagtgaggggccgggaagaggcgcaccgcccagcgagcgccgcgcgccggggcttcccggggctggagaggtctggggggcgcgcgctcgcttcggccactcggccgctgggcttgtgccttttttatttggcgtgttcccttcctgccgctgcagccgtcgccgccaccggttgggggtcggctagaagggggagccccggctgtcagcctgggcgcagctgcctccccagcccttcctcttcagggcacggtcggggtgagaggtggggggcgtagcggtgtgcgggggctgagggcgtgagcagaggggtcggggatccggaggctttgtaccgccaggggctggcggagcaacagagcccgtgggtgctcttatgtatgcggaccggtgcgcgggcgcaagataaggttgtggtttatttatttgtgtgtttattcgccggccggctgggaagctagaatcggaggagctgacgagtagatctgggggcggaggggagcaggactgggactgcttacgttttgtttctctttgagaaaacgtggtgggctttttcttgattggacttgatccccaccccccttttgcaggggagggagggaagctccagagggtctgcagcgctgcgggccctcctcggctctcggcgggaccggcggtgacaccggagctcgccgtgcgctcccggccgctctcggtgggtgccggtctctgcacctgatgcgttcgggatgcctttcccaccctggcgcgcccgccgctagctcgcacagcgcctcgcacactcccgcacgcgcttgaaatgcgcacggtcccgcc

SEQ ID NO: 8333 - DNA, 2300 bp, Homo sapien
aaaggaaaaaaaaagaaaaaatgaatttactgctgcaggtttttttctctctccatgtgtcactaagtgaagtttgtgccttctatagcaaagagaatattttttacatcctactaacagtagatttttttgtagtgaacattttttgtatttttatttataagtctcataagaaaaatagcaatgttcagttgtataccttgaatctgcagttagaagagaataaagttaattcagttgtctctcgcttgaagcgtcccacctttttattgaagtacttggttttgttttgttttttttttttgttttttttgccttttcttgtgtggggaacatggtagaggaattaagatttttgtgtggggactgggaaaaagaaagctctgtattacacatatttagacttatctatgtgtcacttttatgccacatttacaaggcacagatgcactgaataacatttttctaatactttttagttaaaaaatgttaaatacgttaatatcgtatgatccttggtacaatgtgctaggtaggcacttgttcacttattcagcaagaccaccatgtaccagttactgttgtcggcgctgggaattacagcaaaggacaaacagacaaaccctggccgccctggggctaccatgctagcgggccgctgagtcggaatccgtggctgtgttaggataacttgctcaggattgcacggctggtgagcagcagtcagaactccatccacctctcctgataccaggccaggttcctttactccagagttctcaaagcaggggtctcacgtcttctttagtctttagagagacattttcaactgactccttagtggctaagcaagcttcagaaatttctcaacaagaagcttccacacaatcaaaggtccctgcctgcgtctgtagcagccaagagctgttaagaaaggagattggagcaggtggccttgtgcaggggaggggatgggtgggaggtggccgtgcaagctctgcattgtcatggacggaataaaggatttccacaacactcaatgggtacgattccctccctgtctcatctccctgtgtctgggccaagccctcttctctggccctttccccgttcctcttatcggggatagaagcatcgccctatctttagctgtaaaaccaaagccactcaatcctagacgtggtgcttcagcacctctgcctgaggccgtcctcactgcctgtctctgaccaaaataacccctctcctcctcaagacccaggggacacagccatgattgtcgtgctgggtcactccggtagggtaaacccacaccgagcatcaggcctggcctccagcatcaccaggagtcgcagggagccatcaccccacgcgccaccgccacccacctggggagccaaacaaggcctggcctgccaggggtggcactgggagggttacctttcagccctgttctcctggggccaagacccgggtctgtctgaccctggggttgctgagcagaaaccgcctggagctacccctaccaccggacaatcttcccaggaggaggaacaggtgcagcctgggggcctccagcccctagaagttgcttctctgtctttgctttctcctctccctctttgccgtctgctgtgctttcttgacccctcctgcccctcatctttttcctctctcccaatcttttttctctcctttccactcctcccctctcttcctcatctgtggtcttttctcctttctttttgcttttgtttctctgtcccaccttattttccctctccacatatttctcatctgggaaaccagtccttaaccaaattctgtgttttgattttgagcagttgccaccattcccccaagccgtcctgatcctggcttttcttgggcccctgcctatttcctcacccccacactctactccaactccccgacacacacacacagacacacacacacagcctcctcgcccctcccccagctcccctcccctccctcaggcctcagctttctcttgacagatgggagggcagtgagcactccctctttaaaacaacatttaatcgccgttttctgttcttggacatcaaagctggggcttaggcgctgtgctggggtcgcggcggcgcgggcgctgggggagaggaggtgagtgaataggggctgggctgaatgggctttgtgtgaccgccagctctgccagctttacatgctctttgacccagatatgatctcatggagagaaaggggccctggccaggccagcctgagaatgctccctccgtggcctgactcaaccc

SEQ ID NO: 8334 - DNA, 2300 bp, Homo sapien
gagaacggtttggatgttcctcaaaaaattaaaaatagagctaccatatgacacagcaatcctattgccaggtatatacccaaaggaaaggaaatcagtatatccaagagctatcagcactcccatgtttattgtagcactgttcacaatagccaagatttggaagtactctaagtgtccattagcagatgaatggataaagacaatgtggtaatacacataatggagtactattcagtcataaagaagaattagatcctgtcatttgcaataacatggatggaactggaggtcataatgttgagtgaaataaaccaggcacagaaagacaaactttgcatgttctcacttatttatgggagctaaaaactaaaataactgaactcacagagatagagagtagaaggatggttacgagaggatgggaagggtagcgaggtgggtaggggggatgtggggatcattaatgggtataaaaaatagttagaggccaggcgcagtggctcacgcctgtaatcccagcactttgggaggccgaggtaggcggaacacctgaggagttcaagaccagcctggccaatatgatgaaaccccgtctctactaaaaatacaaaaattagctgggcgtgatggtgtgcacctgtagtcccagctgcttgggaggctgaggcaggagaatcgctggaacccaagaggtgaaggttgcagtgagctgagatcgcgtcactgcactccagcctgggtgacagagtgagactccacatcaaaaaaaaaaaaaaaaagttagaaagattgaataagacctaatatttgctagcacaacagggtgaatatagtaaaaaataatttatttgtaccttcaaaaataactagacaagtataattgggttgtttgtaacacacaaaaaataagtacttgaagtggtggataccccatttaccctgatgtgattattttgtattgcaggcctctatcagaatatctcatgtaacccataaatatatacacctactctgtacccacaaaaagtttttaaaaagaaaaataaatagcaaccgaaaaaaaaagagagggagaaaagaaaaaagaaaaaaaaatcaagtgcctggctgggtagaataaattctaaggccacaatgttactgaccatgggttttttggctctcagtgtatagaaattgacacaaggccaatagtcttcccaaacatgctttactggaacttacgccctggcataagggccacaacaaaagagagagcgaattctctggcttgctgactccttggaaaaaaccggtagggatttttttattaggcaaagcacaggaattgacgtcagaggcaggatgtgctgctgggcaaagcatacgagaagtggggtatgcaggtcagcattacttggttgcaatggttatcttgaggaatgggccaactggtggtctggccagtggcaacaaggctgtaaatcaattattcagcattccttcccaaggtgggacacccggcaacattgtttatctcctaaggccagttcctggaattaagtgaaaggatgactaatggacatgttgtcagtgaggtagtggtgtgggttttgtgaccagtgggaatgcacgaaagaatgctttagcggggagtgagctgaagccaagccccatccctactctgtctcaaagtgagttcagaaaaggggatttaaagaattctttttttttttttttttttttttgagacagagtcttgctctgtcgcccaggctggagtgcagtggcgccatcttggctcactgcaagctccgccccccgggttcatgccattctcctgcctcagcctcccaagtagctgggactgcaggtgcctaccaccaagcccagctaattttttgtattttttttttagtagagacggggtttcaccatgttagccaggatggtctcgatctcctgacctcgtgatctgcccgccttagcctcccaaagtgctgggattacaggcatgagcctccgcccccggccttaaataattcttaaaggaagtaaagttaactttgaaagaactatcaggatttggattgactgaaaggagtggggaagcttagggaggaggtgcttgccagacactgggtcatggcagtggtcggtgaagctgcagttgcctagggcagggatggagagagagtctgggcatgaggagagggtctcgggatgtttggctggactagattttacagaaagccttatccaggcttttaaaattactctttccagacttcatctgagactccttcttcagccaacat

SEQ ID NO: 8335 - DNA, 2300 bp, Homo sapien
gtgcacctgtagtcccagctgcttgggaggctgaggcaggagaatcgctggaacccaagaggtgaaggttgcagtgagctgagatcgcgtcactgcactccagcctgggtgacagagtgagactccacatcaaaaaaaaaaaaaaaaagttagaaagattgaataagacctaatatttgctagcacaacagggtgaatatagtaaaaaataatttatttgtaccttcaaaaataactagacaagtataattgggttgtttgtaacacacaaaaaataagtacttgaagtggtggataccccatttaccctgatgtgattattttgtattgcaggcctctatcagaatatctcatgtaacccataaatatatacacctactctgtacccacaaaaagtttttaaaaagaaaaataaatagcaaccgaaaaaaaaagagagggagaaaagaaaaaagaaaaaaaaatcaagtgcctggctgggtagaataaattctaaggccacaatgttactgaccatgggttttttggctctcagtgtatagaaattgacacaaggccaatagtcttcccaaacatgctttactggaacttacgccctggcataagggccacaacaaaagagagagcgaattctctggcttgctgactccttggaaaaaaccggtagggatttttttattaggcaaagcacaggaattgacgtcagaggcaggatgtgctgctgggcaaagcatacgagaagtggggtatgcaggtcagcattacttggttgcaatggttatcttgaggaatgggccaactggtggtctggccagtggcaacaaggctgtaaatcaattattcagcattccttcccaaggtgggacacccggcaacattgtttatctcctaaggccagttcctggaattaagtgaaaggatgactaatggacatgttgtcagtgaggtagtggtgtgggttttgtgaccagtgggaatgcacgaaagaatgctttagcggggagtgagctgaagccaagccccatccctactctgtctcaaagtgagttcagaaaaggggatttaaagaattctttttttttttttttttttttttgagacagagtcttgctctgtcgcccaggctggagtgcagtggcgccatcttggctcactgcaagctccgccccccgggttcatgccattctcctgcctcagcctcccaagtagctgggactgcaggtgcctaccaccaagcccagctaattttttgtattttttttttagtagagacggggtttcaccatgttagccaggatggtctcgatctcctgacctcgtgatctgcccgccttagcctcccaaagtgctgggattacaggcatgagcctccgcccccggccttaaataattcttaaaggaagtaaagttaactttgaaagaactatcaggatttggattgactgaaaggagtggggaagcttagggaggaggtgcttgccagacactgggtcatggcagtggtcggtgaagctgcagttgcctagggcagggatggagagagagtctgggcatgaggagagggtctcgggatgtttggctggactagattttacagaaagccttatccaggcttttaaaattactctttccagacttcatctgagactccttcttcagccaacattccttagccctgaatacatttcctatcctcatctttcccttcttttttttcctttcttttacatgtttaaatttaaaccattcttcgtgaccccttttcttgggagattcatggcaagaacgagaagaatgatggtgcttgttaggggatgtcctgtctctctgaactttggggtcctatgcattaaataattttcctgacgagctcaagtgctccctctggtctacaatccctggcggctggccttcatcccttgggcaagcattgcatacagctcatggccctccctctaccataccctccacccccgttcgcctaagctcccttctccgggaatttcatcatttcctagaacagccagaacatttgtggtctatttctctgttagtgtttaaccaaccatctgttctaaaagaagggctgaactgatggaaggaatgctgttagcctgagactcaggaagacaacttctgcagggtcactccctggcttctggaggaaagagaaggagggcagtgctccagtggtacagaagtgagacataatggaatcaggcttcacctccaaggacacctatctaagccattttaaccctcgggattacctagaaaaatattacaagtttggttctagg

SEQ ID NO: 8336 - DNA, 2300 bp, Homo sapien
tttttcttgtgctaaaggctgccaaagacgtatgtactgtctcctgttcttctacctctgcatttaaataccactcattttaaattagctggccatagtggtgcacacccgtattcccagctactggggaggctgaggagagaggatcacttgagcttgggagatcgaggctgcagtgagctgtggtcacattccagactggctggcagagtgacactctgtctcaaaaataataaaaaataataataaaaataaataaccctcatttttacaactatccaaaaaagttttaagaaagtcaaacactaagatacaattactcaagcttatacaatgaacagaggaaaatgagctctttccttaagaaattgtagaagctgcattacttaacctatggttcctggaacttggaatgcatagcttaggcttgtggtccctggactagtagtttgacaacacgtgggagcttttagaaatgcaggctgtcaggccccactagctacctacagaatcagaaccttcactgtaagatctgctaagggtggtatgcacattacagtagaagaagcactggtgtctggagcagggcttccctctaggtgtgccagggcacacacacaggtgggtgggaatcagttgcaggcatgctgtccaagctgttttccttggccctcttgacagcaggtggggcatggaccacctcctggttgcctctgtagagagtggctcctccttttttttttttaattttttattatactttaagttctagggtacatgtgcacaacgtgcaggtttgttacttatgtatacatgtgccatgttggtgtgctgcacccattaactcgtcatttacattaggtatatctcctaatgctatccatgccccctccccccaccccacgacaggccccggtgtgtgatgttccccaccctgtatccaagtgttctcattgttcaattcccacctatgagtgagaacgtgtggtgtttggttttctgtccttgagatagtttgctcagaatgatggtttccagcttcatccatgtccctacaaaggacatgaactcatcattttttatggctgcatagtattccatggtgtatatgtgccacattttcttaatccagtctatcattgttggacatttgggttggttccaagtctttgctattgtgaatagtgccacaataaacatatgtgtgcatgtgtctttatagcagcatgatttataatcctttgggtatatacccagtaatgggatggctgggtcaaatggtatttctagttctagatccctgaggaatcaccacactgacttccacaatggttgaactagtttacagtcccaccaacaatgtaaaagtgttcctatttctccacatcctctccagcacctgttgtttcctgactttttaatgatcaccattctaagtggtgtgagatggtgtctcattgtggttttgatttgcatttctctgatgaccagtgatgatgagcattttttcatgtgtctgttggctgcataaatgtcttcttttgagaagtgtctgttcatatcctttgcccactttttgatggggttgtttgattttttcttgtaaatttgtttaagttctttgtagattctggatattagccctttgtcagatgggtagattgtaaaatttctctcccattctgtaggttgcctgttcactctgatgctagtttcttttgctggcagaagctctttaatttaattagatctcatttgttaattttggcttttgttgctattgcttttggtgttttagacatgaagtccttgcccatgcctatggcctgaatggtattccctaggttttcttctagggtttttatggttttagatctaacatttaagtctttaatccatcttgaattaatttttgcataaggtgtaaggaagggatccagtttcaactttctacatatggctagccagttttcccagcaccatttattaaatagggaatcctttccctatttcttgtttttgtcaggtttgtcaaagatgagatggttgtagatgtgtggtattatttctgagggctctgttctgttccattgttctacatttctgttttggtaccagtaccatgctgttttggttactgtagccttgtagtacagtttgaagtcaggtagtgtgctcctcttaacctcagcatacctgacagaagaaagcttaggcccctgtcgaggtggcagttctctgaggtaaatgctctctgtgcaaagacctccatttctatttaaaaagatgtttgtatgttg

SEQ ID NO: 8337 - DNA, 2300 bp, Homo sapien
cacagatcacttaatcaaacttactctttcaatgatcgtattatatattttgaaggtataaagactaagacacacactggctttcacgcataattctgtttatacctcatcccatctgttaatatggataccttccttagtcaaacaaaattaagtgacttaacgtgccaaatgttggactgtttggaaacacatagtttatctttaagaacccaaataaaaattcaagtgtgctttgatttaagagagtttaaatgtagttattcagaagtttttaaaaaaaaaattcaaaaaagaacaagtaaatagttacattctattttcttctccagcttgacattttatagtttaagattttagaataactgtgggagtaacttgttagagtatcagttaaactaggctgtcactgtgttgttgttttatttgatgagatcccactaagactacagcatctcactgtgtgagagccaagagctgacagggagtgtgcaatctcttctgtaatgcttctttatatttgacaatggaagcggtcctggaccatatctcaagcagctaaaccacagtgttgtctcaatgctacctcaccctccaaagtctttttttttttttttttttttttttaaacagagtcttgctctgtcactcaggctggagtgcactggtgccatctcagctcactacaacttctgcctcctaagttcaagtgattctcctgcttcagcctcccgactagctgggattacaggtgcacgcaactacgcctggctaatttttgtatttttagtagagacagggtttcaccatgttagccaggctggtcttgaaccctggacctcaggtgatccatctgcctcagcctcccaaagtgttgggattacaggtgtgagccaccacacccaaccccaaattctttatctacaggatgttggaaaatgagggaaactagttatggagctccaggtatttaacatgtatgatatactttaattattacaagaagcctgtgagaaaggggtctttatctccatttttcagagcaggaaactgagtcactaagttactaacccatattgtcacagctagtgagtagccaagctcagctccagatccaggtctgcctgctcgtttcaagagctcatttcaagttctacctctgcagaaaaactccttcaagacatctgcctacagtgcaagcagcagcctgtgtaattagtgtggtcttttggtaaagatatttcagtcttgacatagaacaaagggaaggtataagttagaaacaagtttttagatcttcctttcccctctaaagaagtaaatgacacttatctcaaagaaagatcaagtcttcgtaagctgggaggagagactgatctttaagagaatcaaggccctcggcagtggagagaatttaaagaaagatcagaagctgacataagtgtgtcaaataggaagttgagggaaaaggaaaagatttctgttttcaaaactggtctaaagcgctcggagactgtgtcttgttttgtctaagcatgtgagttggtggccggagcataaatcaaagataaagttgtgtatacctctttttggagagcatagcaatagcagaacgctcagatgagaacgtgcttctgttttactgcatccaggggtccagcctcctttggtccctcagctgcctcatgttgccggagctgttaaggaagatttcataatttgcactgctcagtgacagaacatcctgatgaggagacagcaaaagttgacttaacagaaaagcacctcaagcacaaatctgttcctcaggaggttccactgcaataaatggagggagtttcagaaagaggacccaattaatgctcttgacttgtgtcctcttcagctctagggaccaagtgtggtaacatggaaagggcatgtctaggctttactgtgggagagaaatgggttcttatcccagctctgtcatttataaatgggtgttttgcgtgcccctcctcccaggggctccacgcctccattgtgactcattaacttaggtaagaatgaagggtctcattcaacccctcattcttacctaagggttgtgtgagaccccttctccaaagctttttgcatcttaagaaagataattcctaggaaaggtaaaggaatgattctgttatctccagcagtgtaatgcctagtatttttggcctcctggcaggcagggaagacactatttttaggtagagattgggcttagcagccttggtcagatgcaggtgcccagggcagctgtaccacgctcggctcag

SEQ ID NO: 8338 - DNA, 2300 bp, Homo sapien
ccttaggaacacatacttttatcatgttcaccactttattctaagtgcttaccgcaggcagtagcaggtacagagtaagttctcaataaatatctctataaacaatagaagtcctagcacactgacttgcacatagcactcaataaaaggtagctattactattctttcaatcattcttcctatgatctggtttctagaattctcactatattaatcaccctcttatggaagctatcttgtttactcaacattcttcttaacacgtagttataacaattcaatactatgtggtgtatggagattttgctttatttgaagataattattttaaggaagtctaaacagacaagcgtctgctgggaaaaagctagtctacctgcttatataaagagctggcacttacaaaacccattaactttctcaaaataccaccctttaaacattgggaaatgtatggttaagagaacaaaaataacagcaaataaggagtgatcagccaggtaagagaagaaccaggatagtgcagtattatgatgaaaaaaaaaaaaaaaaagtcactgcaaccagtacttatgtttattactgtacctaataaacagcccagcgtggtgattcctattcacttagtagcctccccatctagaatatactccgtgatctttcttgatggccagactgtgtaaaattcatacagtgtttactacagggatccccaaatattgttagttgaatgaacaaacacacatttcaaggagggcactacagtgagtagatgaacagttttctgataggagattgtacaagtaatgttttcaccagtgtattttaggacagcagattcagattaatgcgctgggactgaatgcaaatagtaaaattacaaatataaagtaaaaatttggaacctttgccaaagaaaggaataataaattgatttaataatttgaaagaactgtaaggtttaggttttgttcttatttttagtgcgactgagattggagtctgtttgtagacatatctgaaaaaagtgaagggggagatggaagatggtaaatgccaaggaaaagatggaaggataaatcagtgtaataaaaaggagcacttctttttcgccaacagaagtaaaggtaaaggttaagtgtctgagttaacgaatggattgttgacctctggggagggtgctcccatcagctcagctttgtgacgacctaagaatatcccttccacacctttcctgatccaatcgttctggctgcataaaaccacctaaatcaatcaactgttacacttcccttagtgctaggacatattcatataactcccacgtattaaatgaaaatacatccatctaaaaataaaacaacacgattgctgctacaccaagaaaggattttaaaaaggcctgttcacaagctaagtgagggccagaggaaaggtgttcgtttaaactgaaattcgagctgcgataacacctcctaatgcaatcaaacgctgttgcagcacacttcttaggagatcgggttcaacggcagggattgggtaaggtgagaatctggcttggcggctccggccccggccatctggttcccttgggctccggccgccaccatccactcgacggctctcggcccgaacgcttggtcgcaccgcctgccgaggtcctagatgaatcgcttcaggcctggaaacgaggaagccgtctccggagaccatcgccaacgctgacgcccgcggtctgaggtcgccatgggaagagcggtaggccaccctgctcctctgatcaccggaggacagggacacattgttcagggccatattcaaacactgcccgcagtacttgcgttacgtccctttgtgaaggcaggcccttcgcggctccccagatcagtccagcctgtgtcggacccgatgactaagcacacaggaacccataactgagcctgcggaagagccagaagccgccttgcctttaacgaggggtatcctggcgagcatgcgcagaccgtccgcgcacgtcgtcgcccgctgagagcaagcgcaacgggcgttttcgtttgtgacgccagggagcgtgaggacgtggggcttccgtgaatgcgcagtgggtgcgtcggccacgaccttttggccaggttagggagggggcgacgctgagatgggggcggcggcggcggaagcggatcgcactctctttgtgggcaaccttgaaacgaaagtgaccgaggagctccttttcgagcttttccaccaggtaagcggctgggttcggccctttgcctttcgttttccgtctcgccta

SEQ ID NO: 8339 - DNA, 2300 bp, Homo sapien
caggagttcgagaccagcctgaccaacatggtgaaaccccacctctactaaaaatacaaagaattagccaggcgtggtggcgtgcacctgtaatcccagctactcaggaggctaaggcaggagaatcacttgaacctgggaggcagaggttgcagtgagctgaaattgcaccactgcactccagcctaggcaacagggcaagactccatctcaaaaaaaaaaaaaaaaaaaaaaaaaaaaaaaaaaaaaaagaatctcaagctgctgtagaccgctttacggcttcatcggggtgaaaattataagtgtataatatcagataagcaaaacaaagcactccataaatatccaatctgaccataattttctgatctccaccctaaattgtaacactggatacatggacagtttcatcctcacatgatcaagaaccaaaatatataaaagtaattacaaagcagccaggagaagtattttcagaaaataaacctagctcttttcagagtacccaagcccagctctcttagtgatacagtttatgttttttcactaacccaaaatgaaactttaagctcagttttgaaattctaatttcaaaatccatgtgtcaatgttacccgttttcagggatatataaagtttgctatataaagtttactattcacaatgcttaagaaagaagtttcatctacaaataagaggttctttaaaactgaataataaatttaaaaacagcaggaaacaatgccccccgaacctcattgggcagttacctgatctaaattgaattttgataggccttccataaagtttgattccattaagtagattcattgcataaggaacagacacttcatgtttgaaattcacaaacgcaaactgctttggtttaccatccttatcttttggaattttcacctttattactggcccagcctacaaacaaaaaggtgtttagaatttaaataaagcaactaagggaaaatactcaaattttacaaataagatatgacaaagtttaaaaacaacagaaacgtaatcagaaacttcttttgaaaatgatgcacggatttccattttggctacagtaaacatcctagttatgactgaacattagatttatttggggaagggggcccataaggaactggaaacacaatcacttttgcaattcacagcactgtatggcttaacatagtgaccaatcgccattattttgccactccatgaaaatgaacatttatcaagaacaagagaatgattttctttaactaaaaacggacttttgtattgattaatcaaacaataccagttattaggggatagggatggggggaataggatactcagaatttttcacactttttaatacagcaacactaaaatgctgtttttctacggagtacttaaccattttattttacatattttaataatgctgcaatttgataagcaaactttaggggaaaacagacacaaataaattaaaatattaagttcccagtcagataaaccaaagacaaattatcctaaggggaagatgacaacaggaaggataagaaaaagcactgctcaacgaagaccctacacacacactgtgttcccaaggacccctggatctctaccacgggaaacctgatcgaggatccctccaccacctttagtcgtcactttcggcctaaacgaaccaagatcttccaggaaagcgacacccagcgagcgtttcgcaacccagacccgcctttcacccccaaacagccacccgtcgggtcccctgacggctacgaaaagaaaacggggtggccgctggccaggccctaggcgagacggaaaacgaaaggcaaagggccgaacccagccgcttacctggtggaaaagctcgaaaaggagctcctcggtcactttcgtttcaaggttgcccacaaagagagtgcgatccgcttccgccgccgccgcccccatctcagcgtcgccccctccctaacctggccaaaaggtcgtggccgacgcacccactgcgcattcacggaagccccacgtcctcacgctccctggcgtcacaaacgaaaacgcccgttgcgcttgctctcagcgggcgacgacgtgcgcggacggtctgcgcatgctcgccaggatacccctcgttaaaggcaaggcggcttctggctcttccgcaggctcagttatgggttcctgtgtgcttagtcatcgggtccgacacaggctggactgatctggggagccgcgaagggcctgccttcacaaagggacgtaacgcaagtactgcgggcagtgtttga

SEQ ID NO: 8340 - DNA, 2300 bp, Homo sapien
tctcctgcctcagcctcccgagtagctgggactacaggcatgcaccaccatgcccagtttatttttgtatttttagtagagacggggtttcagtatgttggccaggctgatctcgaactcctgacctcgtgatgtgcccgcctcagcctcccaaagttctgggattataggtgtgagtcaccgtgcctggcctcaactgactctactttctatgaattgagtttaaagctaagaaaaaactaaagaagaaatgcacaccatttttcataaagtaggccacaaatgagtaaaaaggtatagtaaaacaatgcgacatcaggcaatgcaggtaaaatatatacgcattgtgcacagtaagtctttatgtgtataatctgtgcataccttttgatggcccttcaaagagtttctctaggcccttgcaggtggtgggttgggtacacaaaatcagtagaaggtgaaatccagtaccctacactttccttaaagctcctattaggcaacaaagtttctctctcataaaaccaggtaggatggaccacaagctctgtaatgagtagcaatatggctttcagaaaaatacatagaggttataattcaaagccgagattgatatttgtgacaaagcggcactctgccacaaatctgttactgaatagccaagatttaagagactcacaaaatttgacactccagggcctaaaggtcctgatgctggccacctggactcctagaaatgatagacattatagcagtcattgcaggagattaaagacacctggatcaaagcccaagaagatggcagagcaggcagaactgttttagttcattttaagttagtttgctgcatagatttgttataggaggacgaaatttaactttgagaacttttaagaacagagtagcaagttgtcatcatgcagacacctaataggtgaactgaaatgcaggccgcatttcataagaaataagggataatccttggccaaattgtcagaggcatttgaagagtaaccctatcttgaataggggctgggtaaaataacaccgagacctactgggctgcattcctaggaggttaggtattctaagtgccaggaagggataggaagtcagcataagatacgggtcacaatagactttgctgacaaaacagggtgctgtaaagaagctggccaaatcccactaaaaccaagatgacaaagtgacctctagtcattttcactactcattatacagtaattacaatacattagcatgctaaacgacactcctaccagcgccatgacagttcacagatgccatggcaaccttaggaagttaccctatatgatctaaaagcggagaaccctcagttcccggtattgtccaccccttgtttagcatataatcaagaaataagtgtaagtatactcggtcgcccatgcccctgctctgcctatggagtaggcattcttttatttctttacttttaataaacttgctttcactttatggactcgccctgaattctttcttgcaggaggtccaagaacccactctttgggtctggatctggaccgctttcccataagaaaaagaaggaaggtaactaactttgactgaacacctgatacgtgctaaatgatttctcagacaagatcttatttaaatatttctaaatgatttgatgataatgttaatggccttctggcccccaaaagcacactgcctcttggtcccaaataaatgaggaaaatatccagtttgtggaatagaggggcaggtaagtaaaaaaagaaaaagaaatgcaaagaaggaaagatatacatgaaaaaaatgtcatacagagataatcagctcttttccaaccaaccaaagtaagagttcttttttaactgcgcggttacaactaaccaaaactcaggaaataactcctggaagcaaacaaacttagcagtgaaaaacaagcgcgtccagtaacaccagaaaaacacgtggcgggggtggggcatctggtcgcaaccgcaggtgagactctaagtcccatcattcccttcggcagccaagccaggctgttgagggcgagccggcgcaccgtacgctgggacgtgtggtttcagctcgtgcgcctccccgtgggtttgcgacgtttagcgactattgcgcctgcgccagcgccggctgcgagactggggccgtggctgctggtcccgggtgatgctaggcggctccctgggctccaggctgttgcggggtgtaggtgggagtcacggacggttcggggcccgaggtgtccgcgaaggtggcgcagccatggc

SEQ ID NO: 8341 - DNA, 2300 bp, Homo sapien
ttatataaatgcgtgttttttttaaaacaagtgtaaatgaaatcatacctatacatacatggttttgcaattgtttttttcacctgcaatatagatactttttttttttaagagatagggtctcaccctgtcacccaggttggagtgcagtggcatgtagctcactgtaacctcgaactcctgggttcaagtgatcttcctgcctcagcctcctgagaagctaggactgtaggggtgtgccaccaggcccacctaatttttttttttttttttttaattttgtagaaatgaggtcttgctatgttgcctggactggtcttgaactactggcctcaagtgatcctcccacctcggcctcccagagtgctgggattaccatgcttggcctagacacttttcaaaatgaactcataatcaagggttgacagacttttctggaaagagcaagttattaaattgtttaggctttgagtgcagtcatatgttcttgtcatatgttcttttttttttttaaacaatcttttacaaatgtaaaaatcattcttagctttctagctattaataaatagctgaagtgtggggccatagtttgctgacccttgatagatatctgtgtcatctatttgtaggattagagttttcagtggtgtgtgtatgttcgtatgttctattttgccttaatgaacagtgctggaatgaagggggaacacttaaagtatccttatctcttactttctctgatatgtatatttagtccttaaaacagcttaagctttccctctgaaagtaaggttattcctgttgtttcttggtgactgatggcgtttcccatccacagggtcctaacctgattataaaacaaccagatgagttgctggacagcatgtcagattggtgtaaggagcatcacgggaaggtaacattaccaaataacaggattgctgctttggggatcagtagcaagctttttgctcccacacctgaatccgataccattgttggatggtattttaaaaaggcttagagaagattgcatggcaagcctgggaaactgcttgcttgtttacttttcatctttgggacctctcgagatcatcttctcctgaatgtcctcttttttttctctcctacattcagtctgtcgcgaacgcattgtggattgtcaagtattactcaagtcagtcttttggataaggttagacatcaactttcagagaagggggattgctgctctcctgttaatagttgtttcttcccagaggttaatatccttggactttgaacaccgtcttttttgactgtggacatgctattaacagtcaggatcataactaagttggcttggattcttgaagaaaaaaaaatggtgcaaagatggcagttgcaatttgaacttgagctctaaaaatggtctatttgtggttatatttgcccattttaaaagtgaaatttcatttctggatgcctttgaaaactgactttacatgtgtttttggtggggggctggggattctctcttgcagtctggccttaccaaggcagtgaaggagagtacaattacattgcagcaggcagagtatgaatttctgtcctttgtacgacagcagactcctccagggctctgtccacttgcaggtaaaatccaatcctgtgtatatcttatagtcttccatatgtagtggttcaagagactgcagttccagaaagactagccgagcccatccatgtcttccacttaaccctgctttgggttacacatcttaacttttctgttcaagtttctctgtgtagtttatagcatgagtattgggaaaatgccctgaaacctgacatgagatctgggaaacacaaacttactcaataagaatttctcccatatttttatgatggaaaaatttcacatgcacagaggagtggatttagtaattgttaaccttgtgtcgtatttgttttacctattttttgttggacattttaaaggaaattgcaggcatcaggacacttcattcctaaatacttcatcaaacatctcctaagataaagacattttcttatgtaatacaatgtcattgcattgaagataattaaacattattcagtatcatatgatatctagtccacattagatgttccccaaaatatttgtttttgaaccaggattcagtcaaggctcgtgcatttcatttagttatatttctttagtctcttaatgtaaaactttccacctattatttttcccctgtgtcattgactttctaaagagaccaggcctgttctaccaggatttttaaaagggtgac

SEQ ID NO: 8342 - DNA, 2300 bp, Homo sapien
accagggaaattccaggagaaaggccttagaagaaaaagccctgaaatctactctcaaatctttgactgatccctgagctctgtgtatccaagggagactccacaaagtgtagcacagaacaactgctgaataagtagagatttaatctgttgctcactgaaggaggaaacagagtttgtaggttttgagttccagtaaaaaggaggaacgtggtgtaaaaagcccaggcttttcaagacccaccttaaagtaaataaaaccaactctccataaattcaaactgagaggtataaactgttttcatgaattggaaaactcaatattgttactagagcaattctccccaaatttacctacagattaagagcaataaattccagtaggctttttgtagatttgtcaaaagttaaacatttacttaccatatggccctgtcattccacccttaggtacttaccaaaaagaaattaaaacatttgtccatatagagaaccatatatgaatattcagagcagctctattcacaatagccccaatctttaaacaacccaaatatttatcaaatgaggaatagatattatgagatattgctcaataatgaaaaggaacaaactactgataaatgcaaccttgatgaatcttcaaaaacataatcataagtccaagaagccagacacaaaagagtacattctacattattccatttatatgaaactctagaaaaagaaatctcatctgtagtgccaaaaactaaatctgtgattatccggggccagaaacacgttaggcatgggcagcggggcatgcacaggaggaggacaaaattgacaaggaaatggaactttggggtggtggtaatattctacttattgattgtgatgggtacacaggtgtctacatttgccaacattcataaaacagtgcacttaaaatgcatgtattcttggctgggcgtggtggctcacgcctgtaatcccagcactttgggaggccaaggcaggcagatcacaaggtcagaaaatcgagaccatcctggccaacatggtgagactctgtctctactaaaatataaaaaattagccgggcatggtggcacatacctgttgtagtcccagctactcaggaggctgaggcaggggaatcacttgaacccgggaggtggaggttgcagtgagctgagatctcaccactgtactccagcctgggcaacagagcaagactccatctcaaaaaaaaaatcatgtattcttattgaatgtaaattatacctcagtaatgctgtaaaaacaaaactgaaacaattcccagttaatgccccagaaatatctataccagacagcaacagtaatgacaaaaaaaagaaccacaaattgaagagatacttaataggtagatgtagacaggctggactgccatgaaaaaaaaaaaaggactcccaagatgcaatgacttaaacaagaaaacaagatagggatttatgtctcatgtaactatctagttagggtgtgcaccttgaggtcatccaggaaggtaaacatcaagctctgctatcccctgccagtggtcttattctagggttggcaggcccacaaatgggcccatgcacagagtttaggaggcctgtgaacctgaatgggaaaaaaataacacctttattttcactagcttctaaataaagtttagtaatctcttcaattatgaattatgacaacaaatcacggtaatattagcaatgcctgtggcttagcgacttgaagtcacagattattttcatatcacagtactgttaataaagaatcttgaaatatcactcataattattattgctttgaaattactgtaaatataagacctggctgctaaattttgttatttagcatgttaattaaaaaatgctatttgactatataacaaattagtttatttaaaatgttgataactatacctcagtataattggcttttgttataattctatacattttattttatgtatttggaaaagaggtcataggactgattatcaaagggcccatgtcacaaagaatgtttaagaaccccctgttctggaatattgtcatcacctctgtggtctaagctaggctgctgccccctctcatttacacaagtaggaagaggaaagagaacctggaggaggtatggcacacatggcctctgcttacatatcagagaactcagtgtcctggccacagtcaaatacaatagaggccaggaaaggttgtgtatctcggctaacacatgtccagctacaagtttctattacagctgatgaaagagac

SEQ ID NO: 8343 - DNA, 2300 bp, Homo sapien
aataaagaaaaacttgagggacacactaaagttcaaaatgaaaacaataaactggagaaataaaatgttaactcaagaattcttgcagaatacagaataaaaggaaagtgtgatcaaaattatgaaagaaaagttaacagatattagatctcaggtctaatgggccattaaaagcgccaaacatgatgaagataaaaagatctgcataaaatttcataataccaaggatgaagagaaaaatgctacaaagattcacaattatactaactttgacatcagacatttcataaatgacattggatgcatgaagagaatgaaacagtatcctcaaggctaagaagaaaaatatttttcacctaattctatagcaagtaaatttatcatctatttaggaagaaaaaatatgtactcagtctaatactggtcccctctgaaagagctaccaaagactttacaagataagaaacaaattgagtagtgaggagtaggttttagaaacaatattggttaaagaaaccaaggtaacaaacaatattgcctaattgtgagtgaggcaatatgttcatatgaactgttgacacatgcaataacttggatggacatcgtggacgttacgctgagtgggagaaaaaagccaatctcaaaatttactcccatgcataaatagtagtagttggggtggtgatagtagtagttgctaattatttagtgcttaaactaagtgtcagaaactgtttttaaatgttgtacatgtattaattcatttaatcctatgagtacttagcacagtactaataatacttgtgatcttcaaaactaaatcttacaaattggcacagggtctgggcatccaggcttagaaagagagatgaagttagatttatgttacagagctgaagtaacagtcacatgacaaatatgaaggttccagagggaagggcatgaggcatgagagaaaggtctccaatatgtagtcagtaaaatattattcagcactaaagaaataagctatcaagccacaaaaagacagagaaactgaaatccgtatcgctaagagaaaagccaatctgggacagctacacactgtatgattgcagctatgtgacattctgtaaaagtcaaaaccatggagacagtaagaaaaccagtggtgaccaggggttagaggggaaagaaggattaataggcctaattattcatatacacccatatattccctttcatgttacaggcatttggcatagcagaagttacagcaacatttactgtattggtgaattaaataatgtttatgataatgacgagttaatgaaccatatcccctttccctaactcagagcaaatagtccttccccatttattagatatccttttcaaaccgataaaagatccagctgggaaaagtggctcatgcctgtaatcccagcactttgggtggccgaggaagacagaccacttgagcccaggagttcaagaccagcctgggcaacatggtaagaccccatctctacaaaatacaaattaaaaatattagccaggtgtggcagcatgcacctgtagcccctaggcccaaggcagaaggatggcttgggcccaggagttcgaggttgcagtgagctatgatcacgccactgcactccagcctgggcaacagagcaaaaccttgtccaaaaaaaaaaaaaaaagaaaaaaaaagaattctcaatcacccaccagttctctgcatggtgtccactgacaatttgttctcttgtttggagttgtcgtgagacttcagattttctgaggaaagcctatccatagagtcacttggggtatttttacactatgacttcaaggaccacagctgtttcagaactaagaggttttccattcccaagggtcaccagtaacatggagagagaaggaatctcaaagaatacccgagtaacacccagttaacagaggctgtggaattatctaattgtcagttaattgtactactgtttattgcctcttcaaatctccaccccaagataagccaatttacgaggaaaacagactgatgaaaataaatgtgttcacagacaaggaacaaaaacattttacacagccacaagagccagttaagaactcacaggtacttttccagccacccagataggagagatcattaaaacaggtgagtaagcaaaactatggagactgcctttctctatttctaatcttgccagtggtcagtggagggcagggaagaacaaagcaaaagaaattagaaagactgtgtctgctgaggggttctctcaagtcagagaaagata

SEQ ID NO: 8344 - DNA, 2300 bp, Homo sapien
tatattccaaaacaattgttatttattttgtggctcaaattgttgcaactttggtcatcaggagctctttcaggttagcttctgggccattttgacatgtacctccattttttaaaaggcatttcctagcaccccgagatgctccaggctcatttcatatcccctgacaaagtgatggaatcaaccagccacttctccaagaaattctggctccctttactggagaattaagaaaccaaggtctaggcactaggtgtcattgcttctagggcttctctatggacagagcttgaaaatatacatctgtgtgcatgaacccatgtatgcataaaaatgcatatttatccatcaaaaaactgagtgcatactgattattctaattccaactgaatatcacaaggttaattttaatatacccattacattttcttgtttatagtttctttctccgaaaatattttctatctgattctttacagaaaaagtttgtccacccctggttaatatcattcagatttcagatcactgttcatatatttgaatttaagaatatattgacagtttgctatgttccacttctttttttcctccttttccttctattgggctaatcaaacattttttattatttcatttaatcttcattgttgatttattatgtataccactttttaaaagaaatatttagtggttataccagggttacaatatttttcttaattaatcagagtctatccttcaagtaatattatcccaattcacacatggtataaagacttcaagatagtttttccaacttcctagttttcattctttgtgcttatgttgttatacatatacactataaacacacagtgttagagatcaaaatgaaaggaatcttggattcagccctgtttcaaagctcatcagatgacctgcacaaatcattcaaactttcttttgtactcttggttctttaagtcaagcatatctattgtgcctacctcataaacagactccaggttaacattagatttcaaaatctatgtgaccaaaccaaattaaaatctataaatctatatgtctcagagtagactgtgaacttgggtggttgctggcatcagtcctctaaggaacagccaaaccaaacccactgcaaatacttttttcttattataggctcctcagtgaaaaatttaacaatcctacacccagttttataatgttaaaacagcttttccaaaggtcatcaagtaaagacataaagaagtattgttaaggtgaatttggtagaacaggatcaaagatgttggaagaatttcaagatctgaaacaagtagaccagttgtgaaactggtcttgattccatctttttaaaaacataagactggaaagattgatgggcatgcttaaataagatggaaagatgatgggcatgccctcctgtgtagggcagcagtaatcaacccatggacggagccacagggccagcagctactgcttcctgtgggcactggtgcagctgtctgggtgcctgctctttccagcactgttttcatcagatcaagaatacaaatcccagatggattcaaacccatgactacaagctgtcactctgttagtctcagatgcaattaatattattgtcttccctatgttatatttgaagttcttttagttcaattcagcaaattgtattgaaacctactatgtatgagataatacgcacttgaatcctgccaactgggtcttgatgataacgctagatggaaactagaaagtttgactttctgttgatgattactctcaatcattcaaacttgtggctctttttctcatcagttatttattgtaactataatatttatcaaattgtattaactaaatacaattatttatcaaacactctttttctcatcagttatttattgtaactagaattagacttataaaacttcaggaatttgaaatcatataacctactatgcagagcacttcatttctccttcctacctctgcttgagctaataactacagtttgtgatccaggcccctccttaaggtggagctgacgtggctgacacttctgtcttagctgaaacaagcagaaggttgtgaatccatgctaaaggtaaacaaactgcaacttatatctgcaatttattttggtatagacaagaggtatgccagtagcacactggtggcttcagaagaaattctcaacacctagctcgccagagagtctatgtatgggattgaacaatctgtaaactaaaggtatgaaaaaatttgtaaaattgggaaggtgagggaaaggt

SEQ ID NO: 8345 - DNA, 2300 bp, Homo sapien
gaaaattggaaaaggagctgaatagatatttcttagagaagacattctaatggccaagaggtatatgaaaaaaatgtcaagcctcactaatcatcaggaaaatgcaaattaaaactacaatgagagattacctcatacctgttagtatggttattatcaaaaagacgaaagataagtgatggtgaggagagggagaaagggaatacttgtacacttttgatgggaatgtaaattagtacagccattttggataacagtatggagattactcaacaaatttaaaatggaaatactgtatgatccagcaatcccgctaatgggtatatatccaaaggaaaagaagtcagtatttaagaagatatctgcactcccatgttaattgcagcaatattcacagtagccaagacatggaaacaacgttaagtatgcatcaacagatgaactgataaagaaattgtgtcatatatacacataaacagttgggtgttgctcagccttaaaaaagaaggaaatcttgccatttgcaacaacatgggtgaacctggaggacattatgctgggtaaaatgggccaatcacagaacacggaaagataactattgcattatctcatttacatgtgaaatctaaaaatgtcaaattcatataaatagagtagaatcgtggttgctgagggtctggtcagggagaggggcaaataggggatgttggtcagaagactcaaggttttactttacacaggatgaataagttctagagatttattgtacagcattgtgtctatagttaataatactttattgcatacttgaaaattgcaaagagactagatcttaagcgttctcaccacacaaataaaaataaccatgttaggtgatggatatgttaattagcttgattgtagtaatcacttcacaatgtctgcatacatcaaaacatcacattatacactgtaaacacatacattttttatttgcgaactgtacctcaataaagttgaaaaacaattctggacactattataactgtcataacactgcagcacaaggcagaggagaagaacatgtcttataaggagtggggaagaattggcaggatccatatcttttttctttcaataaatttctttaaaaattatctaccgaatctctgtgccaatctccaatatgctgtgattacagttctgatatccatgctgttatatagacatggagggatatatggtggctagaggtgctggcttagatgcaaacaaacaaatgctatgtgtatataaatatacacatatctatgaagtatacacatgtatatatccatatttatatctagatagctatcatctatctatatctgtatatagagatctatatctagacactctcatgcagagcaatgcatactgagtgtggcccgtgtgttatggtggtagcagggccacctggcaggtagttgcagtgtgaccactgaaaatccttagtgtcatgagacctacatccacagaatttgctcttttggattctcttaccttgttacatattcaagttgcagtgagatttagacctgtggctgttcctcttatggcctgagattgaatttaaatcatcgctgtgggactgcttgatgtatgcaatggtttagagcaagagaaagtttacaaagaaagcactccaaaaattgagaggacccagctgaatcaattctcaggccttcaggaaccgtggactcagggcttctgtttttcttctttctgatttttcagttacttttcctgctactgtggaggtgactaatcctacgtgaaaaccatacaaaggcatgagcaagggaagagcactctgtctataaacacgtaaagccttaaccaaaggtgactcagtgctgcaattagatgtccagtctctaaaaacaaacttcagagcttcctcatggctttttccttctggctctgtggtgtgggttgggcaggaacagatcataataagggaggtttatgattccagctggcacgctgtggccacaaataggatgtcagcttttgatcaatgaagctcatagggaaactccaaccctaagataaatgcaaagactgctttaatcaaggagagtctctggacactataattcctgtgagaacacgagaagatggtggagaaaatactcatccataggtgtggtactttccaactcttactgccaagctaacgtcagggaagggaggggagaactatagaccatttggtgtttttcaaatggtgtgatgcaaccctttagaggatagtaaaatcgttttatttgggcata

SEQ ID NO: 8346 - DNA, 2300 bp, Homo sapien
ggctctgtgtcaggattcttgccatataggacctgcctttatagtttacatatcactttcagcatacatatggccttacttttttttttttgagacggagtttcactcttgtcgcccaggctggagtgcaatgatgcgatctcagctcactgcaacctccgcctcctgggttcaagtgatcctcctgcctgagcctcctgagtagctgggattacaggtgtgtgtcatcacgcctggctaatttttgtatttttattagagacggagtttcgccgtgttggccaggttgatctcgaactcctgacctcaggtgatccatctgcctcaacctcccaaagtgctgggattacaggcatcagtcagcgtgcccggctggccttaacttttttattccaattttggtggaactttgctctctatttggtccgacccaggtacctcactgccagaggtagtaagaacgggtaggactttgcagactgggcattatcctggcacccacgtggcaatggtttcctgtctcctgtagtgctgttctcctgttggagctttccccacttctgaaggactgcctgcagttcatgcatcggggcctgtaattacagagcagaatatccagggctgtgaagaccgggcagtctcgaaattagtttatgcataatggataataggaggctgtttttaagtgtaactcatttggtgggttggcagatcatgacttcctttttgatatgtattatttatttattttatagcaagatgaggacagaaggctggggaagtcatttggcgcagctcttctagactatagctcagacttagcaatttacattcagtaatctcttggtcatttagccacagataatttgtcatggtttgttttagctgttgtgatattgatatttattatgcaaattgtatttcctacatcttattgttctgcattctatgaatacttaaattattataaacctttacacttaatatggctcgtccttcaatttgatgcttgagcaacagagggtcagagcgcacacgatcttctagaggggaagaaaataagtaattaaaaagcagacaaacaagagagccggctgcctggctgaaaagaaagcaaagagaatttcggggagggagagtgagtccggagatgcaagtcgctttagcaggagaggctctcccagagacaggggaagctcggagcacctgttggtccccagcttccttaggaagggctgggggcgcagaggaggagtgagagggtttgagccccgaaggaggaacacggcagaccctgccttcaccacactccctctccccaactcccaccacccccgctcttcacctgaagccttgactaattttttccgttgttgtgtaatcttaaatatctaatattacaaatatttcacacatatattcaacacacacctatatattaaaaccagggaggagaccctcgacaagcggaggagcctgagcataccctcctcgatctacctttcccgagattctgccgcaaaaagaccgactggaaaatctcagaacccgactctacggctgccttctccaactatccccgagtctaccgctaggctgttgagcgggctctcccgctccgccggacgtgcaaagcacgcatgcacttctcccagattgttttgtcaatccggggacctgccttcttactctccactcccgcacagcccccgttcccaaagatctattccttcggtgcaaggtgagtgacggaaatttgcaacgtctggttcgctaggccagatgcactcggtgtgcgggacagaggaccctcttaagggagattctccagtcgtcggtctgatacagcgattgctataaacattcctaataaaggtgtacaagaagctagacccgccccctggagcccgagtccttgcacgccaggcgcccgggagaacactttttccttgatccggggaaagcaaaacccgaattttaacataaacatatttgcatacgcccctccccttggccccgcccctaggtggcgcgggcgcgccgccgaacgccagcgccagggggcggggtgggggagggagcgaggccctccgagagccgggttgggctcgcggcgctgtgattggtctgcccggactccgcctccagcgcatgtcattagcatctcattagctgtccgctcgggctccggaggcagccaacgccgccagtctgaggcaggtgcccgacatggcgagtgtagtgctgccgagcggatcccagtgtgcggcggcagcggcggcggcggcgcctcccgggct

SEQ ID NO: 8347 - DNA, 2300 bp, Homo sapien
ggaggcagaggttgcggcgagccaagatcatgccactgcaccccagcctgggcaacaagaatgaaactccatctcaaaaaaaaaaaaaaaaaaattagccaggcatcatggtgcatacctgtggtcccggctacttagggggctgaggtgagaggatcacttgagcccaggaggtggaaattgcagtaagcctagattgaaccactgcactgtaacctggatgacagagtgaaaccctgtctcaaaagaaaaagaaaaaagaaaaacccataggccagtcactaacttccctgagcctcagttttctgatctgaaagaaaatacaggggttgaactaaaaatcgaaacacctttccaattcttacattctatagcacttttcagagccgagtcagaagccttttctgagtgagcccgcccctaactgatgatgcccacaggtgccctctgcagttcacttcacagggtggaggaatctaccctaacttgttctacatttcctgtgtgtatttggttctttgattgttttattttgtccaggtataaaatatctttggaacaatgactgtgtttcttcacaacccccatataccatgttcagaacacaggaaacagtcagggaaggttgttagctctctgactaatgtctacccctcaggcagacatgaaaagggactcatttaaatttggtttccctgccagaattgtcaggcctcagtggccttgggaaatcaccaagaaggaaaatcaccatttatcctaaaaattctgcagtctgcacaggctgccatcatctccaaacctctgcccagccctcacacggcagcagcatgaattgccctgtcctagcccttcccaaggtcatagtcattcctagagaagaatgggcttctgcctcctgccagacagactagccgggattgccggacacattaacacccagaaattgtattccctaccacagccaagctgaagagaggttgaccaagaggtcagatgcagatgcgagatgcattgcattctgagagcagcaactgtctctgctgtgtaagcctgaaatgtctcttgacatctctgagcctcactctccatttctctagaatgaagatcataatgcttatccttgcattatggtatccttgcattatggtatctccttaaggatctcatggtattcttattaccatgagacctaaatataatcaactatatggtcccgcttttaaaaatgtgaatattttggccaggcacagtggctcacgcctgtaatcccagcactttgggaggccgaggcgggcagatcacaaggtcaggagatcgataccatgctggctaacatggtgaaaccccgtctctactaaaaatacaaaaaaaaattagccaggctggtagcaggtgcctgtagtcccagctactcaggaggctgaggcaggagaatggcgtgaacccgggaggcggagcttgcagtgagctgagatcatgccaccgcactccagcctggaagacagagcgagactccatctcaaaaaaaaacaaaaaacaaaaaacaaaaaaaaaccaacaacaacaaaaaaagtgaatattttacaccctttacatattgttttactggtgtccacaaggatctggcccaatatcatccttctttccctcccagaaacacctttccatgaagctactgtcaggtgagctacactgatgagcgagaagcactagtcctgatagatacagttggaactcacaatatattttccctctggaacaatggcatatatgaaatttgggtgttggggacagaaatgatcgtatttcgtattttaattatgtgtgagttaaatagatttttgaggagttccctgaaaacctccccctgcatttaacactttttctatgagaggaaaacactcctgattcataataactaagctacaagcaaatctttggaaacctgcccatctgtaagtagggttctacctgtgttaaatcaccttcagatgcagccgttctgtgccaacctggtgggctaatgacacatttgtggatctcagcgtgtctgtgatatcacaaacacaggtgtggtctcctgccttcccctgcagaggaaggaaggggtgaatggaaaaagagtggcaacttccttggctctcctatcctgcagtaggtgagccctctgcatgggatctttcggggctgagagctcttttctgttaaaggaatgtctgcaaaagacaagacaaatacatttgaacagtcccgaggagaggtaatttcagagtagacacctatttctccaccagaaa

SEQ ID NO: 8348 - DNA, 2300 bp, Homo sapien
gtagctgtctccaagaaagcacccaattaagtggtataaccactacgagtgattctcactcataatcgcccctcagattctcaaagaagagcctcatctatcagggctactgaaaggtaaggtactcagcccaggtgaggggttcgaaatctagagggctataatgcagaatacataaatagagaaggaactgtaaagctcactgttgttccttgctctccatcaagccagagaagatgcagagacagtacagggagcctgacaggctatagggggcagactgagttagtagagcaggggatcttcagcttgactcagcatgcagttggtacccatggggaaaggggaggccaacaattagtggggggctggcagcaaagaccctcaaaggcagaaaagcaacacagctgtggctgtgaatgagcagcctggcaaaccatgatctcagtagtgtcctgaagccaagaggaacaggctccactccctgggatgtgggtgggaaagggcccaagaggaggccagtatctcagtcagatgggactggagctcagggggctgtagtgctaattaggaaactaaggcagagtcccagcactaggaatggaaccactttagtggtgatcaagggaagggtgtttgccacaaacatactggatcctgaatctgtgggcagacatctgagtacagcacttcccctaccagtaaaagggaggtgctagtgccctcctagcccaattagggcaggctccgtagctgggtggggctgagcttgtaggaaaaggcctactaggcagtgccctgcagggctgggcaagccaggactgatggctgggccaggtgagaaagatttcctgctgtatttgcagactgaatatgtgtctggggctaggggctgagctgctgccagcaccatctgacctcaaggatccccctagtcaacaagcagcaagaacaggagactccagaggctccctcagctttggagatagctctgcaaacaaaactcagtttttaggggttaatcctcagccccaggaggaggcagtgggcctcctctgaagggcagagtcagcaagtgggctgagactaaaggaaaggcccaagactgcaggcctgagattagtttggcagcagctccaaagagcagcccttgaatcgcagggattgtctgagccctcaaaagcactggctgcctcccaccagcctagctaatggggctgagctgctggggccatgacctctgtctacccggctgatggtctgctgctctgaatctcactcccccagcacccagcaggaccaagggctctgtctagcttatgtgcatcgtgcccttgcatgttttcagcacctactatgcgcgcagcatcacacctccccatccacctgcctcctgttactctcaccagcacgctcagtcaacccttgggctaattagtgattaggtctacagtaagcatgcatggtggggtgcagagagtggggtggccagcgggtgatgagtgaggggagaagagaacaggagataggaggtcatggtctgaccttcttccaaagcccggaatccctgagtctgtctctggcagctgtgaaacagagggagcatgggatctgaaccgtgccgccatctgggaggtcacacacactcacagccaaacccccggaaggaaactcgggctgaaatacaccgtttgctgaagagcagggctgggcactggtttctctgcgttctgaatttctagaaagggtagggtctccgttgccaggcggcgtctgccacctcttcccaccgcggcccctccagccctccaccccttcccctgggagaccccctgtgaggaccctcagcaaacttctgcaaaacctgacgggccctgggtgcagggtggtgtggacgcagatctttcaggccgaggggggggcggcgggagggtgggcgtggaggtgcgagaggcgcgcagcctccgcctgcccagctgtctctgcggaccccgccgagggagggagagaagcgctaggaaaaggaagaggagaaggagctcgagcgggaggcaagcgagaggctcttttgctcctcccaaagcagggggcggctccactgtgcttctgatgacccggccgccgccgccgccctgcaaccgctccccgggacccctcaacgctgacactgatgacccgcggcgggggcgctgggcgcggggtgcgcaggccactggccgcgggctctcgggcccgctcctgccgccggcttctgctgcttccgcggtaatgacactcggcggagcggccgccatctcttc

SEQ ID NO: 8349 - DNA, 2300 bp, Homo sapien
ttactgtatttgttctattagatacaactgcagagagaggccaaagctcagagcaggccattggcacggcatctgatcctgcttaactgccctgcagcacagggtggagacacttgggccttgtcaggctaagggactggggtaggatgggtagcagtggaattgaagacaaagaaaacaaatgggcagaagatgggtgggtggaagttcagagggctatcctggcagtgttcactggagcagaagtgtgaggctttctgaatgcctgctgacaccagggtggggcagggctgtgtagtgtgagatgcaccaaattggacgagaagccaaggcaggcttgtgtatggggtaccctggggccctccgcctagtgaagccctatcttctcagcccagcgtcctcgtctcacaagccctcagagccccagcctgctttcctttctgggcctgtgctgcaaccccctcaacatggcccactgggtaaaaattcatgcttcaagactgatccccaagcctgttttgtattatatgagtaaagaattttttaaacacttatccccagataatgtgtatttatttataaagtatagccctgtctgcttgactaatatattaaaaaagtgacctttttgactcttggtccaagaaactattgtttgcacttttgtgtagttgtgtatagcatcctgcaaattctgtcagaagtctgtgatttcagtaacactaaaacttctctctcaaatggtacaagttttcagttttaagacaagttctgggaatctaatgtacaacatgttgactatagctaataattctgtattgtttacttgaagtttgctaagacaaatttgcttaagtgcccccccaccgaactactacataaattagtgaaggatgttttacttaatttgattttggtaatcattacacaatgtataattatatccagtcatcacattgtacaccttgaatatatataattttttgtcaaataataaagctgggaagaaaacgataaaactgacaatctaacatatatgatgaggtaaaaagatctggtatttcaagaaatttggatgacctcttgcaccccacttcgctagcctctactccctagagtcatgttctgactatgtgaagttgagcaacttccttaatcttgccacgcttcagttcttatctgtaaaatatgataatgaaacgatttgagaattgtgagggttaaatgagataattcaggtaaagctctaaaccccctgcaaagaataaagtcttttctttccccccaaaacttgagtgttagaattcattctctctggtttctctcttttactatgctaaaaaatgatccaggtccgtccttctcattggcaagattgttttacagtttccttcaagagataactgggggctacttgtaatagaacactagaagagttacacaggtcttagaaactacgtttttcatagtaattatgttggtttgcacttcctggcttcctttcttggacggtaggtacctggaagcctagtggagcagattccccccacttaaagatacttataaaaataacgaacatagttccgatgaccatgtgcccaacaccgctctgcgcacttcacacagtaatatcatctcagcctgtgaccgttccgagttaggtgccgggattctccctgttttgtgataacttgcccgaggtcgtacagctagccagctatggaaccagtattcaaactcggctacgctgcagcccgtggccctccactttcttgctcgtgctctggagtttaggcggccgatgggggcggggtcctttgggtcaggttgtggcctcatagaacagcgcttgctgcggttggatggatgggtgggtgggtgggtgagtgaatgaagagaagaaacctggtggcgtcgtcccagggctgtggagcgccccgaaggtgcgcacgtccctggctagcctgcgagcgcgtcccggtggccgcacctgccagccgcgcgattcttagcactctccgccacttccggccgtggccccgccctgtcgggtggctggcgtccgttacgcgttgaggcattttgtccccagcgccgacccgtctctctgcccccgccgctgccatggcggcagctccgccgctttccaaggccgagtatctgaagcgttacttgtccggggcagatgccggcgtcgaccggggatctgagtccggtcgcaagcgtcgcaaaaagcggccgaagcctggcggggccggcggcaaggggtgagttggtaccggccggggcggggcctgcga

SEQ ID NO: 8350 - DNA, 2300 bp, Homo sapien
ctacctgcccaggcccattcccagctccttgtctggggagccttggctctgagcctctagcatggttcagtccttgaaagtggcctgttgggtggagggtggaaggtcctgtgcaggacagggaggccaccaaaggggctgctgtctcctgcacatccagcctcctgcgactccccaatctggatgcattacattcaccaggctttgcaaacccagcctcccagtgctcatttgggaatgctcatgagttactccattcaagggtgagggagtagggagggagaggcaccatgcatgtgggtgattatctgcaagcctgtttgccgtgatgctggaagcctgtgccactacatcctggagtttggctctagtcacttctggctgcctggtggccactgctacagctggtccacagagaggagcacttgtctccccagggctgccatggcagctatcaggggaatagaagggagaaagagaatatcatggggagaacatgtgatggtgtgtgaatatccctgctggctctgatgctggtgggtacgaaaggtgtgggctgtgataggagagggcagagcccatgtttcctgacatagctctacacctaaataagggactgaaccctcccaactgtgggagctccttaaaccctctggggagcatactgtgtgctctccccatctccagcccctccctctgggttcccaagttgaagcctagacttctggctcaaatgaaatagatgtttatgatagaagtttgcctggcgtgactctcatttggaccatgtctgaaagcagtggcctcaccactatccccaaagcacacccatcacccactccattcccttgctgctctttctcatccacccactcccagtccaggtctgtcaaagggggtctggctgggctctgcttcagggatcctggctagacaacggctgtctgtcacacctggcaggagggcctgggttacgggcccttcctctgcacctgcactgttcactagcctgctcccccacaggacactgtgcatggaatgcaggctgtgtctggaagagctgtggccctggtggacctaagattcctgaggtgggctgcctcctttgttcctgctgttctagagtttgaatggcctctttttatgccggactctcttctggggactcccctcactcaggggcaccaatgctccctatagatcccctgggaactgaaactggggtgtggtggaggacgtggaaagggtaaacacagctccttgtctttggacttccctgtccggccccctttcctcccagctcagcctactgtccccgggttctcagcacctgcctgctccccaaccccatagcacagaccccacacatatgtaggctcatcatgcctgcaggctggtcttccctgacaccgtggattttgacaatgttggcaacagaactgggttgtggacccagcacctggagagaggaagtgctagaaaggtagaaataataaaaggtgtttttgttgttgttaggaaactggaaaagcataggtcaagggctatgatggggatgaggaggtaggagtgaaaatgagggctgtgtacttgaggctgggattggggaaggtagtgatgaggacagaatagggagtgggaagaacagaaagggacagagggattcagggattgtgagagaggggaagaggctgagccacccggaggggcgacctagcacgcaagcagtatgtggcccaacactggaaccaagcagcccggctccgggcgcaccttctcagggattcctcagggacaagtccagccccttgtcgtcaaggctcttgtagaccgacgtagggaccaatagaaccccgtgcggtggagctattgtgaaggagcaaaaaagtgccctggttctaagaggacgtcttaggggaagtgacggctgagttgaggtggatccggctggcgatgtaaggttcgagccatataaacccgggaaccgggagcccttgacgacattgttccccgagtgcccggagtctgcggctttttttggggtggtggcagctggcggaagtgacgggagaggggtggggccgcgagagcggcggaagtaggaagccgaggtctgaattgcgcgtggtggccatggcggccagcggggctgtggaaccagggcccccgggggctgccgtcgccccgtcgcccgccccggccccgccgcctgcccctgatcacctgttccggcccatcagcgccgaggacgaggagcagcagcccaccgagatcgagtcgctatgcatgaactgttactg

SEQ ID NO: 8351 - DNA, 2300 bp, Homo sapien
tacagccatccaaaataaaaactatatttcccagcctccttttcagctaagtgtagccatgtgactaagttgtggccaatgggatgtcagtacaagtggtaatggcaatatctgggatgtgtctttaaaaggaaggaacatgtccttctccttttcctccttcctgttccctgggaggtgaacttggtagctggaggtgaagcagctggaacttggatatgagcgtcttgttgatgataatagtgcaacaagataaaagcagcccgagctggcctacatttacatgagaaggaaataagactccattttgtttaagctattctcttgcatatatatatacacatatatatcagctaagtgtagccatgtgactaacttgtggccaatgggatgtcagtatgagtggtaagagcagtatcttgtatatatatatgtgtatatatacacacacacatatatatacatatatgtatgcaagaatataaaatatacatgtgtgtgtgtatatatatacacacatatatatgtcccttgcagccaagtctaattctaactaatacaaactaactctaaaaaatgaatatatattcaccaggggataggctatttcaagcagagggaagcctgtataaaggctcagggaatgccgtggttttatgtggcagcagatgagactggaaatgagtcaggatgagccacagtggaggatgaattaaatgggcaggagtgtggtagaaagacctgttggaggctatgaatgcaatcaaggtgacagacaactggtgcaatgatggtagtggaaatggaggagaggggattgattcaagatgcatttaggaccaagaatcgggagcttgtgaacgtgtgtatgagtactgtagacggagtgggtgtgtcatcagagaagatctgagcatttgggcttgctctcctcagaggccctgcgagtggagttcagcttttcctcatggggcaaatctcactttcgctccagttcctggggctcagagtccctggcccagatgcctcttgccatctcatcttcaccctgcctggcttcccttgcttgttccaggattgtttcataaagagggatgtggttggtctttaaccctatgaatgctggctgaggatgcctgcggaacctgtagtgaagctttcaggggctgctcgggttctggctggtaggtgaacactgtccatcttgccggctgggacacagtgactctgggtagttgtgtaagagaggggcccttggcagacaaacaggttcttctctgttggtgggccagccagcaggtcagtgggaaggttaaaggtcatggggtttgggagaaactgggtgaggagttcagccccatcccccgtaaagctcctgggaagcacttctctactggggcagcccctgataccagggcactcattaaccctctgggtgccagggaaagggcaggaggtgagtgctgggaggcagctgaggtcaacttcttttgaacttccacgtggtatttactcagagcaattggtgccagaggctcagggccctggagtataaagcagaatgtctgctctctgtgcccagacgtgagcaggtgagcagctggggcagagggatgggggtcacagtcctaagggagggcattgcaggtggcctcaggggagagcctggggtggcccctaagacgtcctcttggaacattttggcagagttgcctcttcgccctcattatggctcagtttttccaccatgaaatgggagggagggagacaggtgggcaggggagaggtggtagaagtggcctagagaactgttcctggggtctgggacctttgcgaaggggttagagcaccacgctccctgctatgtgactgaggtagcaagagcacgccctcttcccatgtctgaggaagacaccctagcctccttgactcacctaggtcagtcctcttgagccccaacagctctgtgctccccagcccaaggaaggggtaacaggatttcgggcagttgcccctgcagaggccccctgggcaagtcccctgcgccatgtcccttcgtctccttcttcccctaaccaggcctccctccacctgtcttctcagagcaggtaatggcaagcatggctgccgtgctcacctgggctctggctcttctttcaggtgggtctccgaccctgacttcaacgtgggggtgtgggtggaggctggccagagggccctgtccaccctgggggaggagagcccaggccctgattacctagtccctctccacagcgttttcggccacccaggcacggaaa

SEQ ID NO: 8352 - DNA, 2300 bp, Homo sapien
cctcaggctggtcccacccatcaccctgcctctggcccacctggcgcccctcagagggctgagtctcactctgccactctcactagaggagggagcactctgctaccctccctgctttgctccaaatcaggaacacagtatgattattatacagtatgattattataataacagcaactatttttcagagcttactctgtgccaggagctctataggcagccctctgtatccttggtttctgtgtccatggattcaaccaaccttggattgaaaataattttttaggccgggcgtggtggctcacgcctgtaatctcagcactttgggaggttgaggcgggcggatcacgaggtcaggagatcgagaccatcctggctaacacggcgaaaccccatctctactaaaaatacaaaaaaaaaaaaaaaaattagccgggcgtggtggcgggcgcctatggtcccagctacttgggaggctgaggcaggagaatggcgtgaacccgggaggcagagcttgcagtgagccgagatcgtgccactgcactccagcctgggtgacagagcaagactccatctcaaaaaaaaaaaaaaaaaaaaaaatatatatatatatatatatatatttttttttttaaattgcatctgtgggccgggtgcagtggctcatgcctgtaagcccagcattttaggaggcagagattggaggatcacttaaggccaggagttggagaccagcctgagcaacatagcgacaccccatctccattaaaaacaatgttttaaaaaaattgcatctgggcagggcgcagtggctcacgcctataagcccagcactttgggaggcccacatgggaggattgcttgaggccaggagttggagaccagcctgagcaacatggtgaaaccccgtctctgctgtaaatacacaaattagctgggcgtggtggtgggtgcctgtaatcccagctactcaggaggctgaggcaggagaatcacttgaacctggggggcagagattgcagtgagctaagatcgtgccactgcactccagcctgggtgacagagtaagactccatctcaaaaaaaaaaaaaattgcacctgtactaaacatatacagacttttttggtgattacctcctaaacaatacagtataacaaccattcacacagcatttccgtcgtattaggtattataagtaatctagagatttaaagtatgtgggaggctgtgcttaggttatatgcaaatactatgccattttatatcaaggacttgaacatccatggattttggtatctgcagagggtcctggaatcaatttcccatggagactgagagatgaccgtactacccacttcgcaagcaatgtcttctttaatgtactgaaccatcccattgttcagaggagaaactgaagctcagggctttgaataactagaccaaggaggcacagcatgggagtgggacatgaagcactctacaattaaccctttcaggacaaggccctgtctcccacacccatctgcccaaaggctctccagggccccctcctcttgggtgtaccttgacaagagacctagattttagctcactatgctgtctgcagtcctggatggtcccactccagtgtctggtgctctgagatggagtcagcattagtggcggatgtggagactggggggacctgtcttcactggggtagacagaggagatgtggactttgccccccatgagcccggcacaaacccagagccgccagcagggcctcgaggcatcagtcccgggctcatgggctccctgaggtgtttctcctactgttttccgttcccctcctcccttccatgctgaggttggtggggtgggggtgggggtgcccacgcacggaacagccaccacttctaactatcgcctgagccctgatctgctgtcagcttccacgtagtctcagggtcacaaaagtccaagaggcctcttgggaatgtgtcaccttccagcgtggagtcacactgaggaaggaggaggggagggcagccaggggggtggcgatagggagagagtttaaatgtctggctggctctgagcttcagtcagttcccactgcagcgcaggtgagctctcctgaggacctctctgtcagctcccctgattgtagggaggatccagtgtggcaagaaactcctccagcccagcaagcagctcaggatgttcctgaaggccgtggtcctgaccctggccctggtggctgtcgccggtgagtagaagctgtctttggatggcactcctgggctgctgctctga

SEQ ID NO: 8353 - DNA, 2300 bp, Homo sapien
gaaagggcatccccaataccaaatcctccagtgaccacttcttcaccttctaccccaccaccaaagtctgcaggagacttgagacaggtttgttctgggcgtgtgactgatgcctctataggggtctcagtgctctaagccgtctggtatttgcctggggtgtgtgaagacctggattaaggttcccagccttactactaatgggctgtgcacttggagcccttagagccttaggtttctaacctataaaatggacttaacgtctacttcacagggttctatttgcattttaacagaaaacaaagtcttaagtcaaaggaatgaatctctctctctctctctctctctcttttttagaccaagtctagctctgtcactggagtgcaatggtgcgatctctgctcactgcaacctccacctccggggttcaagcaattctcgtgcctcagcctcctgagtagctgggactacaggcgtgcatcaccatgctcggctaattttttgtatttttagtagagactgggtttcgccatgttgcccaggctggtctcgaactcctggcctcagatatccgtccgtcccagcctcccaaagtgctgggattacaggcatgagccactgtgcccagccaggaatggatcgctaatagaggaattccaagtctcacccaccgataaagaattctgagggcagagccgggccactttctcaggcctctgatttcatactgtggtgttagttacttctgagaggacagcttgctgccagagctctattttttatgttagaggctccttctgcctgcagactctgctgtctgggaagggcacagcgttaggagggagagggaggtgtgagtccctccatggacccgctgctttgtacttctctatctcatttccttttcagcaccactctgggcaatcagtattccagccccattttatcctcagaaaattgaggctctgagatgttatctctgtgacctgggtcctattacgtgccaaaggcatcatttaagcctaagatgtcctggctccaaggtgtcagcatctggaagacaggcgccctcatcctgccatccctgctgcggcttcactgtgggcccaggggacatctcagccccgagaagggtcagcggcccctcctggaccaccgactccccgcagaactcctctgtgccctctcctcaccagaccttgttcctcccagttgctcccacagccagggggcagtgagggctgctcttcccccagccccactgaggaacccaggaaggtgaacgagagaatcagtcctggtgggggctggggagggccccagacatgagaccagctcctcccccaggggatgttatcagtgggtccagagggcaaaatagggagcctggtggagggaggggcaaaggcctcgggctctgagcggccttggcccttctccaccaacccctgccctacactaagggggaggcagcggggggcacacagggtgggggcgggtggggggctgctgggtgagcagcactcgcctgcctggattgaaacccagagatggaggtgctgggaggggctgtgagagctcagccctgtaaccaggccttgccggagccactgatgcctggtcttctgtgcctttactccaaacaccccccagcccaagccacccacttgttctcaagtctgaagaagcccctcacccctctactccaggctgtgttcagggcttggggctggtggagggaggggcctgaaattccagtgtgaaaggctgagatgggcccgaggcccctggcctatgtccaagccatttcccctctcaccagcctctccctggggagccagtcagctaggaaggaatgagggctccccaggcccacccccagttcctgagctcatctgggctgcagggctggcgggacagcagcgtggactcagtctcctagggatttcccaactctcccgcccgcttgctgcatctggacaccctgcctcaggccctcatctccactggtcagcaggtgacctttgcccagcgccctgggtcctcagtgcctgctgccctggagatgatataaaacaggtcagaaccctcctgcctgtctgctcagttcatccctagaggcagctgctccaggtaatgccctctggggaggggaaagaggaggggaggaggatgaagaggggcaagaggagctccctgcccagcccagccagcaagcctggagaagcacttgctagagctaaggaagcctcggagctggacgggtgccccccacccctcatcataacctgaagaacatg

SEQ ID NO: 8354 - DNA, 2300 bp, Homo sapien
aatacattaccagaaactgggattctagaaaacagaatagttactgtttactaagtgctaggtacctttctaacagttttgcatatatgttcaaagttcatgcttaaaacgatacaaatttattatcttacagttatggaggacagaagtccaaaatgggtcatactgggctaaaatcatggtggcagcagagctgtgctcctggaggctgcagggaaaaatcctttgccttctccagcttctagggaagggttgctcatgtccctcagctcatggcccccttccagcagtcacgagtctgatctccactgccatcctcacatctctttctctgactctgaggccactgcctccctcttgtataattaaggacccctgtgatgacaatgggcccacctggagaatccaggccaaccaccccatctccaggtccttaatcacactagcaaaatctttttttgccatggaaggtagcaaagccacaggttccagggatgaggctgtggacatctttggggagcgttattctgcttgccacacagtaacccctgccataactcagggcgatggcatattctatcattatcttcaatcagaaactgatgtgtggggaggtgatgtatcataactcatccagggtcaggcagctggatttgaacctgcctgacccttagatttgaggttttctggctccagaatcttctctgaagtgaaaggcatgaggccgaccactccctgatctggtaaacagagatgtcagcctggtttctagtgttagggagtttcctggagtgatggtacagggtacatttctgccctgcatcccaagtccagagactgggttctaggtccagcctttcttctaactccctgagagatgacagcctctgggcaaagtccctctgtgctcttcagtctcttcatctgtgagatggtggcatggggagaggctggagtgatgtcacagttcctctcagcctgcatcacaggctctaggactcaggtcctatcagtaacctgctgggggaggtctgggccttccaggagaaacctgacaagatggtgctgcaaacaccaacggacacacagcactttacattcacaggctgtctcaggggcctccaacaaccctgaccattcttgccccattttgcagatagaaaaccgaggctcagagagattatataacttgcccacgatcttcctccagcaagatggaggccaagtgaaatgagaaagcaggtctcctgccacttcctttgcccagaggtcttctccccacaccagggcttcccaagggctgagatccagtcacacctgtgcgtgatcaaatataagtgtgaacaatgcaaagggagacgtcttcaatctaaggggcttcaattctgtaatgtaattctgagattatgcccttttttgttaaagcctttcctttttgaagtgatggtcactgtagatggtgagggttttttggaggcggacaatatctttacatgacaaaattaaaagttggcagctccgaattgatctctggagtgttttgaaatgcaagaggtctccgaaacctcagtctgggagccacggagggctctcccctctccccaggtttaccagtttgggaggcttggagagaggcctggaggacctgctggggactaaagaagagcactggtgggaggacagggcgggggaagggggaggggagtgaagtagtctccctggaatgctggtggtgggggaggcagtctccttggtggaggagtcccagcgtccctcccctcccctcctctgccaacacaatggacaatggcaactgcccacacactcccatggaggggaaggggatgagtgcagggaaccccgaccccacccgggagacctgcaagcctgcagacactcccctcccgcccccactgaacccttgacccctgccctgcagcccccgcagcttgctgtttgcccactctatttgcccagccccagggacagagctgatccttgaactcttaagttccacattgccaggaccagtgagcagcaacagggccggggctgggcttatcagcctcccagcccagaccctggctgcagacataaataggccctgcaagagctggctgcttagagactgcgagaaggaggtgcgtcctgctgcctgccccggtcactctggctccccagctcaaggttcaggccttgccccaggccgggcctctgggtacctgaggtcttctcccgctctgtgcccttctcctcacctggctgcaatgagtgggggagcacggggcttctgcatgctg

SEQ ID NO: 8355 - DNA, 2300 bp, Homo sapien
atacactgtggtggatggcttatgtatatttttctaacatgaggcttatcaaagtaaaaaaaaatagtttccactgatatatgttgtatggctgaaacttaagattgtactgtcaccttaggaagcttctttgtgtatctcttttgttatttttaaggttaaggattcagccttcaagcccaccccccaaccaccccaacaaccatctcttcaggcagcccagtaatagtcctccccccatgagcagtgccatgatccagcctcacggtgagtggagaggttcagaccaaacagttcattttatgccacatgggaaaaaatgatggtctcagttttgagcaccataaaccatttgaaaggcagaataacatagtattcaggggtatggactctagagccaagctgctttggtttgcatcctggttccatcagtttcttagctgtaaacccttgggtaagttaacttgacttcttgaattagtccatttcacactgctctaaagaactgactgagactgggtaattgataaaggaaagaggtttaattgactcacagttccacatggctggggaggcctcagaaaacttacaaccatggcagaaggagaagcaaggctcatcttccatggtggcaggagagagattgcacaggggaaagcgccagaaacttatcagacaaccagatctcaagaattccctcattatcatgagaacagcatggaggaaactgccccgtgatccagtcgcctcccaccaggtccctcccttgacacatggggactacacttcaagatgtgggtacacacagagccaaaccatattacttctcaaatgtcaactgaggataattatggtacagtatgtagatatacgtaaaacacttggaacagtctctggcacaaaatagttctcaataaaggtttactattattaatatttttaacaaaacctccagccctaccaaataaaaagcagctaccagaaccttccttatagacatgcctccgtttggctgtctactatacacgtgggcccctctcttgtgggtgtacagatgggagtgaagataagtataatgtgactgtgagtcttcagaggtcagccgtcttaggatctcttgagtaacactccacgagctacgtccctagtcagtctccctaggatccttgagaagagtctgaattggcctctaggctcttcctacttaaagtggggtcccccagccaccaatattgggagaaaaagtaagatctcaggtcgtattccagacctgttagagtctgttttttttttttttgagatggagtctccccctgtcacccaggctggagtgcagtggtatgatctcggctcactgcaacctccacctccgggttcaaatgattctcctgcctcagcctcccaagtagctgggattacaggcgcccgccaccacacccagctaatttttgtatttttagtagagacagggtttcgccatggtggccaggctggtctcgaactcctgacctcatgatccgcccacctcggcctcccaagtgctgggattacaggtgtgagccaccacgcccggcctagagtctgcatttttaaccagatgccaggccatttgtgtgcatgtgaaagttcaagaagcactgcctagatccgagttaccccatgtaatccatggaccagcttttaagggaacttgttggaaacacaaattcttaggggcccatcctgacctactgaatcagagtttgaaacagaattatatagataggacccaggaatcttctgtttaacaagttctccagacttgtcctatgctcagtgcagtttgagaagcactgttctagctggtatgtcgtctgagtattctcattagctctcattacttctggctggctggtggcctgggcacttggtcactctgaggttcctttctctccaggggctgcatcttcttcccagtttcaaggcttaccttcccgcagtgcaatctttcagcagcaacctgagaactgttcctctcctcccaacgtggcactaacctgcttgggtatgcagcagcctgctcagtcacagcaggtcaccatccaagtccaagagcctgttgacatgctcagcaacatgccaggcacagctgcaggctccagtgggcgcggcatctccatcagccccagtgctggtcagatgcagatgcagcaccgtaccaacctgatggccaccctcagctatgggcaccgtcccttgtccaagcagctgagtgctgacagtgcagaggctcacaggtaagaccgcctaacgtcacccag

SEQ ID NO: 8356 - DNA, 2300 bp, Homo sapien
ggccaacgtgggaggattgcttgagccctgaagttctagaccagcctaggcaacgtggcaaaccctttctcccccaaaagattaaaaattagcatagtcccagctactcctgaggctgagatgggaggatcacttgaacctgggaggtagaggttgtagtaagctaagatcacacccctgcactccatcctggcaacagaacgagactctgtcttaaaagaaaaagaaagtatagctttctaatgcactttctttactttgtgttatgtacagccctccccaggatcaaacttccttcccctgtgaagggactaaatttttctcctgtctctagttcattggaaaggaatttctgggcttgggtttctgtgggaaccaccagagaaggtgctactttttttttttttttttgagaccaagtcttgctctgtcacccaggctggagtgcagtggcacaatctcagctcactgcatcgtccgcctcctgggttctagagattctcctgcctcagcatcctgggtagctgggactacaggcgtgcaccaccatgccagctaatttttgtatttttagtagagacagggtttcaccatgttgaccaggctatgtctcgaacttctgacctcaggtgatccgcccgtctcggcctcccaaagtgctaggattacaggcgtgagccaccttgcgcgcctggcactctgcgcatgatttaggatgctgggtcttgattaaacctgctgtacattgttaccacctggcattctctccaggtggtatggaacggcactctcagaggaaggaaatgtacctctatatgtttctgtactataaagattctataaagagccaatttcctttctgccttcctgatgaccaagcttccaatggcgtgtgctttgtacacagatttcacattggacacttgtactcatacaaaggccatccttgatgttttccattcattcatacagaacaggatgtgaatctatttagtgcaccagatacttaggtaaatgagttaattgctcatcaaggacactgttctcttgcggctctttctgcccatgagagcttggaggcagatctgcatctgctgaaatcactgcatgaggcgggtctggctgcatcccatctgtattaactactttcccttcaggagtgtgagcagctgcagaagatgtacggggggcagattgatgaaagaaccctggagaagacccagcagcagcatatgttataccagcaggagcagcaccatcaaattctccagcaacaaattcaagtaggccctcactctttgctttctccaacttgtttggagtttgctttcaggctgatttgcctgtgcattttggaggagaccactcagtgcaaagtggatttgaggtctgtttatggttgacatgtttgagtaaaggtaatcagaccttctggtgaacaacaaaagcataaatctgagacacagatagttctttctgtttcttcccttcctgagaatagctctgagtaatcttcaagctcacaataatttttttcctttccccatatatgttttaggactctatctgtcctcctcagccatctccacctcttcaggctgcatgtgaaaatcagccagccctccttacccatcagctccagaggtatgagtcattttgtgttgtgcctaagccattgtctcgatagcctggtacccttggcttgactcactgggagatatggactgacttgagcattcatcttgcaagaatctatttgaaaaggagagaaaccactgtaaatttcaggagccttcttgaaatcccaacttcctgtgccacttcatttccttagccccatgagcaaagtaatctgatatctaatacaggagccagacataggcccacaatgaactctgccattttggctgagttcttttcaaacaagatgtagataggttttaaatacactgtggtggatggcttatgtatatttttctaacatgaggcttatcaaagtaaaaaaaaatagtttccactgatatatgttgtatggctgaaacttaagattgtactgtcaccttaggaagcttctttgtgtatctcttttgttatttttaaggttaaggattcagccttcaagcccaccccccaaccaccccaacaaccatctcttcaggcagcccagtaatagtcctccccccatgagcagtgccatgatccagcctcacggtgagtggagaggttcagaccaaacagttcattttatgccacatgggaaaaaatgatggtctcagttttgagcaccataaaccatttga

SEQ ID NO: 8357 - DNA, 2300 bp, Homo sapien
ctagagcgtattttatttctgtcttttggggaggacactgaaaagcagccttgggaaggttgaaaagcaatcagattccaaggaaactaggtttatatatgtggtgttatgaaatcttgcagccagcttgcactggcaagcttgacacattttttttactgaggctggttacccatttggcatcaacataatcagcagaggcaagtgaactctgagcagagtgggacataattagtgccacgttggaaccctaaaagaaggaagataagctttcataaatgactatgagtaacttggtaaaaatggtctgtcaggagtagcaagaatgacaattctcaaataaaactctgatggcacagaaagacaggctttttctaatgaaagtctctcaggacttacagtgttcgtacacactaaagagcactttgaggccaggcacggtggttcacgcctgcaatcccagcactttgggaggccgaggcgggtggatcacaaggtcaggagttcgagaccagcctggccaatatggtgaaaccccatctctactaaaaatacaaaaattagccgggtgtggcggtgggcgtctgtagtcccagctactcgggaagctaaggcaggagaattgcttgaacccgggaggcagacgttgcagtgagccgagatcatgccactgcactccagcctgggcaacagagtgagactccgtctcaataaataaataaataaagagcactttgagtgattactggagacctgccttctcctcccctatacgtttcctgtgatttctcataacttcaagctctacactggtatctaatacaccctttattccttcttttctccttgtctccttcttcccttcctccacagcctgacacttaatgtttcagcccttgtctgagtctgttgtttagctgaagtcctttaggtatccttgttgaatgctaggtgttcctcaggaggtcttcttatgaggggaacatgaagatcgtcacatttccagagtcaggctttatcacagaccctatattctgttgacatttgttactcaaggaggtccacactggaccacagctctgtctgtgtgatatccaccctgcctagagtcattgtcaaggccttgcctgctggaaatctatctgctgtctgttttcatgtgaacctttttggtgttttgagggttgcctgtggccaagcctatttgaattggaagaaaatgatgttttatgagtggcaaattgcataagatggggcatttgtgcaaacccagcatgtcttgatgggatcactatacaaatatgcagcaaaagagattaaagccagtcttcaggggaaatgagaaactttccaaggctataaaacatggaatacgggtggcctgcatgggttcttgaattcctttcattttctggaggaaatgattaaagaacagtatatatagctatccttctggggtagaagagatgaagttcaacatggaaacagaagagtggtctaatcaaccttttcatttctggaaatgtgtaatttaaggttaaaaatgttttaaaaagtgtaactaaaaaatttttttaaactaacacaagatagattttatccaggtgggaaaccaagtccctccttgaagagtatagtgtgggagtatcagcctaatgcgaggccatcctgaatttgagtgtgattgcaaataaaaataaaatcaagcacaattgatacttatcagtgcttctcaaatgagcaactgcatcagaaccgttcctctgaggttactgtgctggactgacctgggtatcagtctcttcacaacctgagcttctgaaaaagtcatgaaatacctggacctgggattttctgtgatgggagagaattatttttgtgcagaaagactgtattgctacttgaagaacatggctttctgaggggatcagaaacatgtccatttcagaaaacattgaaagcataggaatcaaattttaggagaaaatagtacttacttgcttctacttcaacctgaagtagaaacagaaatgacaagttataaggaaatgcttctcaacacagccttcatgatccctgttcctggattgtggcccgccaaattcatttgttttttgtgttgctgaaccaaatacatgttcgtgctcatttcattagctcactgctgggtcaagcctcaggtagagtctgaaacaaaagccatcattagcaaagacagggtaaaaggctttcacctgctgccagaactctctggatacctctgcacggtcattagattcctcctggtcccgcgctgtctg

SEQ ID NO: 8358 - DNA, 2300 bp, Homo sapien
tttggaaggatcatggtcagctttatgggacgtggggtgacttactgtgtctactgtaactgtttttgccaaggtcgctaacaagttcttgttgataaattcagtggacatttttaaccttttatctttttggacgtcccaactgtattaatcactgttgacttcttttttccttgaaatattttctgttcttggtgtctgtggcaccacattccctgtgttttcccccacctctccttttcacatttcctttctgcttgttccttgaggttggcaaaacccagagttttatcctaggccctattcccatgtcctttgatgtactctctctggatgagtttgtccactcctgtaatttcagttactctctgattctccagcccagaatgctcctctgagttctacacatacgtgtacatgactgcctatgggatagatttagttggttattccacaagtattcacaactttaattcagcatgtcccaaatgaacttaccatgactctgtaaaacctgctcctcctcttgggtgacagtgaatggcactgtcattctccgggttacacaagctagggatgtgaattttatctttaactcttgtctttcttatttgccatatcaagtcagttgtccagtgcctgtgaatgaaacatcctctccactttcctttccttaactcaggtcactgtcatccattgtgtagatgaacaccacggcatcctaactgacttctttgcttccagtcatgtcccctgatccctgccaccagcccttttcacactgcagctagagtaagctggcttttgcaaatataaatctttataacatcatgcccctgcttaaaatcctttagtgattcaccactgttcttcctcaaacttcttagtgtgttattcaagaccatttgtcactggccacagcgttcctctcctgcctcatctacagccacttcctgcctcaccctgttcactccacccttgtagaactgtgggaagggatccaggaaccctgggagctttccgacaaaattattccaggagtgttttgttttgttttgttttgtaattagccattttgtaaaatactcttttataataattgaagtgtgatttttgttctagtgactggggcatggtgatgatgtgggcacccaggctatgggtagctagcaaggatgcagatgggaaagtcacagtgatacaagcattgtggtggttctcatttcactcacatgttttggcgagtaacaactattttaaagcagtgaattgatactacacaattgtatcttatgtaccaaaatgtaatttcagtaattcactatgctttcctggagttaagacatttaaactccggaaatcacattaatatgaaacaacaggtcaagtcctagacatttcaggtaaacaatcttctactgtattttcgggtcctcaaacacctacaggccttctcttttcttctgcctggaaacctgtaactcctgtccctctttgcctgaccagctcctgtgcatccttcaggttcctgctaggtgctacctcctccaggatgccttccttaattcccaaacacccccattagaagacttgatcatgctattttgtaattgtttacttgtctctatcctctactagactgtaaaatgagggcaaggtctatgtctgtaaattcacattttatcctgtaacagtaagcatttggctatttgttagattaataaatgaatgaatgaagataaataagaggaagaaattctaattagtattacctaagcaaggtaaaaatggaaaaataggtatatgaaaatcctgtataacccaggagtctagaaaagttctgtaaataagaaagttaacagaaagtcctgccccaagcccagttactagagtaagaggcatgacagaataagctgccaccttgagcttttccttcctgtctctcttcaggcagtgccagcagttacccctgtggacgaggagagctcagacggggagccagaccaggaagctgtgcagaggtaatgtgacatctggcagtgcttgcagaagcccctgggcaggctcccctgcaaccagcgaaaggtcacctctgcccaaggaggtggtagagtgcagcttcaacatttgtgtggtctctttgctcaagccagatggcatgttccaccccacatggaagtaacagaagactacccagaaaatgtcatttctgtaagcaccattggaagtcccctaagtgacagcaataaccataagaactttttctttcctccctccttcttccttgtcccctgccttca

SEQ ID NO: 8359 - DNA, 2300 bp, Homo sapien
tgacttggttgcttccaaattttgacaattatgaataaagctactgtaacatctttgtgcaggtttttgtgtggacataaatttttaattcatttggttaaacactaaggagcacaattcctggatcatatggtaagagcatggatagttttgtaggaaactgccaaactgtcttccaaagtggctatgctattttgcattcctgccagcaatgagtgagagcttctgctgcgccacatccttgtcagcatttggtggtgtcagcattttggattttggccactctaataggtatatagtgatatttcattgttgttttaatttttaattctctaatgatgtatgaggatgagcatcttttcttatgcttatttgccatctatatatctttgttgaggtgtctcttcaggtctattggtcgtttttaacttcaggttgttttattttcttattgttgagtcactcattacattttaaaacactttttctcattgcttctgagacgccatattctccagttttcctcctgtcctctggaagcaccttctccatcttctctaccagacttatttttctctgctcatcctttagatcttttcatctttacaacatctttctggagccatgttatttactgctgtagcttcactgatcactgtggtgatcagtcctcagttaactttttgtcccagacctctcgatctagggcgacatatccaagtatttgctaaccattatcttcactttcatgtattgaagtcagatcaatggagacatattcagaaatgaacttgacttccccctccctagatttgctctattctgtatttgctgccttagtgaatagcatcaccatctgaccaaggccagcacaagccttgatgtttcctctctcaccagtgccacagctgatcagttaccaaatcctgtcaattcaaccctccattcatgtaggcacttctaagaccatactatcatcttcccttgcctcaattaaacaatagccaattatatggattcctggctccagtcttgtccccctctaatctattgtcaactttgctacatgactaatctttccagaacacaaacatataaataaataaaacataccacacacacacatacacgtacattttctctctctttctctctctcttacttaaacacacaaatctgattatatcattttctagcctgaaacttttcagtggtttaccattgcctctaaggtaaagtttactccataaggtggcaaagcattggcttacaaacatttttggctatgataagaaaaaagtacattttatactgtgacccagaacacgcatatatagatacaaatgaacaaaagctttgtttgcttgatttagagatggggtcttgctattttgtccagactgaactcgaactcctgggttcaagtgaccctcctgcctcagtctcccaagtagctgagactagaggcgtataccaccatgactgaaaacaaaagacttttttttgagacggagtctcgctctgtcacccaggctggagtgcagtgatgtgatcatagcttcctgcaatctccagttcctgggctcaggcagtcctcccacctcagcctcccaagtagctgggactacaggcaagcaccaagcaccatcatgcccgtctaatttttaaacatttttttatagagatggactctctctctgttgaccaagctggtcttgaattcctaaccttaagcgatcctccctccttgacctccatgagccactgcgcccagccagcaaacaatttttttaaaaaagcaaaacttaccttactatgtacagtgcatttcaatatattttattctattccattttaaaaaatgctgatttcgacttactaaattgatctcctatctgctatttcagaaacaatgacatagaaatacctttataacctgactcctgcctagctcttcagccccagctcccactctcccaccagtcaccctaattttcttctcgttccctgaacaagttctgttttctggagcatttcccactgccgagaatacatcttccctatcccaccccactccacccactcctgtattctagaattcagaataaaaaaaattagattggatagaaataagaatctagataatttctattcactcttcatgtctctaaactttctcttatcgtggtgcttaccaagctttatattgtaactacttctttcattgtatgtcttccacaccagactgaacttagtgaaagtacagacgaaacatgtctttttcacaactgtcaataacc

SEQ ID NO: 8360 - DNA, 2300 bp, Homo sapien
caggtcacatttagctcaagggcctattgcccaaccttaattttagcaagcttatataaaaggggaaagtacagtatggaataacactgttctactatttctgtcttaaaaacgacttcctcaaacctaatgttgggcaagataacatctccattacttatgctccaatacagaagatgtgcacaggagacttgacacaatactgtgaataataaaatctatctgcaattagctacacattgttagagtttgtaagtcagatcaagccacttgggatttgtttgttttttaaccactttcttagatatcccttttaaaatcttaagtgccttttaatgcacagttctgtcatgaagccaagaaataataaaataaggggaatatcaattctgtctaatgctgtcagattactaaaacattaatgatgaagcatcatattaaagtgatgtatcttataaaagtaacattagatcccatcaaattataactgattcatctcttcctaccttgcccaaaccaagctgaaagacaaagtagctttcaggttcaagattttctctaacttgtccaatttattcagacactgccaggaccagctccaaagtgattacctggtttttaatgaatgcatttcttacagactattaatgtgcttcctgatgccagcatcgctggaagggaataactagcccaatgagatcattagtcattgacaccagattatagtaacattaggaaatgacgacgggttgcttagctgcagttttccaaatgctgctaggataaagagaactgacagtaatcacctccacagagaatcacagactaaatctatccattaaacagtgttccttcatcttctcagcaaaggagctcagctacagaagttaaccttcttggcaaacattctttatctataggaactagattataatatcactattctatctccctcaaagttcttccactctagtgggtggggcgatagcacggaaaccttcctcttctctgaggtttatgtcacttgactgtatgactatctaaattaatgtcttgactaatttctaggtcatctttcaatgtataaaaagtaatctgaggccaggtgcagtggctcacgcctgtaatcccaacactttgggaggccaaggcaggtgcatcacctgaggtcaggagttcaagaccagcctgacaaatatggtgaaaccccatctctactaaaactacaaaaattagccaggcatggcggtgtgcacctatattcccagctacttgggaggttgaggcaggagaatcacttgaacccaggaggtggaggttgcagtgagctgagatcgccccactgcactccagcctgggcaacacagcaagattccatctcaaaaaaaaaaaatttaaaataaagtaatttgagctgggcacagtggctcacgtctatagtcccagctacttgggaggctgagacaagagaatcacaagcccaggaattggaggctgcagtgagccatgatcacaccactgaactccagcccgggcaacagagcaagaccctgcctccaggcctcaaacgattctcccacctcggcctcccaaagtgctaaaattacaggcatgaaccactgtacctggcctaggtcattatttcttgcttgaatgattacaatagtcttctaacaattaatgagtctccaatgaatacaatactctccctaccttcagtccaccttctacattgtcacatgaattaacaaaagcaaacttgattctatctgtccacctaaaaaaagaaaaatcagaagttccccattatctgcagaaacaaatccacactcctcagcatcaagtacaaagctccttcattgtctgggctccactgatttatcctttcccattgcctgccacttcttcacactgacattgcgctttggtcttaagaaaccatttgcagttccctgaacttgtatgctttttcaaacctgtctttttatctcacccaaaattcctttccccacttttaaagtttgccatttgaacattgtagtaaaatctagaaaacttctagaccaagcttgtccaacccagcctgtgggctacatgcgtcccaggacggctttgaatgtggcccaacacaaattcataaactttcttaaaacattatcacacttttttgcaattttttttttttagctcatcagctattgttagtgttagtgtatttttatatgtggcccaacacaattcttccagtgtggccagggaagccaaacaattggacacccttaagggacagcccttaagta

SEQ ID NO: 8361 - DNA, 2300 bp, Homo sapien
ttcatgctttcattatatagttaatactatttggaaacctgtgtgtaggtctggtcaatagacttccatcttaattgctgtatgctaagtgcctcctatgttctgtatacttcatataattcttgctagccttcaacagctttttacaaagtaactattgttttacctaatttctattgagaaaaatgagcttcacttaggtaacttgtccaaagttctttaccttgtaagtggtagagctgagatttataagtaggtctatatgactccagggctcttgttctttccacgataccaggtattaggcatcaaaattggacagtagaattctaatcacagctgtacataaccagaaagtatgagtatggatgagtgttagcatgtaaccagacaacttgtctgttatggatgatttgggctgaaagagtagaaggaatgctaaggaaaatgagcattggagatgttgagagctcgcaaactcatgatgaatgtgtatataatttaagtaatgcacttgctgtgcatatgtagagccttaagataaaatttccaatgctcccttccctcattaggtttttctttctaaagtccttctatattgagattatatagctgccactaaagactgtagctggtagtagccaggacctggaactttttggcaagagggtgttatctggaggatccaagtatactgagatcaacataatcatgaattcttctcccactgtaaagtttgaggaggtaagaatctccttgacttagcaaatttgggcttataaatgctaggtccaactagactttactggcctcaatcccttagcattatcctgcaaaatactgatgtatactttttggataatacctttgatctactttcagccaccattgtagggaattgttagtatgagaggttgacattttggttaaataatcacttggaaactgtgactcagcattagtcactggctttctgctgggttacattctcttgtctcttgccttaattgtggtaagcctcagccatttgattacacaactaccaaagaggatgaccttagtgataacccattcacattttcagatagtaaaaatattagggacaaaatctttcatatgtattagcgagtggtatgggttcgcctctggagaaatgttagcacattttccaggtttgcccgatgatattaaaagatgaatagctatcttagtgaaaatagctgtttacacttttagttagtagtttttaaaagtggaaatgtaacaatatgctttttggacacagtcatgttattttatttttatttttatttttattttttttgagacggagttttgctcttgtgcaggctggagtgccgtggcatgatctgggctcactgcaatttctgcctccctggttcaagcgattctcctacctcagcctcgctggtagctgggattacaggcacatgccaccaggcctggctaatttttgtattttttgtggagatggggttttgccatgttggccaggctggtctcgaactcctgacctctggtgatctgcccaccttggcctcccaaagtgctgggattacaggtgtgagccaccacgcctggctgtggatatagtcattttagtatttgagattaaatattaaacctcatttggcgaactttaaaaccatcagtgatttgagttaattctacctgttttaccttatttttcaccagtgtgtgtttcctcactgcctcattatattgccacatttaatctttcattaaaacaaacaaacaaacacaactcttggctgggtgtggtggctcacacctgtaatcccggtactttggaaggctgaggtgggaggattccttgagttctagaccagcctggtcaacatagggagattctctctctcctgaaaaaaaaaaaaaaaaaaaaaaattaaccaagcatggtggcacacatctgtagtcccagctactcaataggcaaagtgagaggattgcttgagcctgggaggttgaggctgcagtgaacatgatcaaaccactgcattccagcctggaggacagagcgagaccctgtcttacaaaacaaaacaacaactcttggaatttctcttttcccctcccttcttcttccccttcttccttctatttatccttctgtttcatctacaaatatttgagtgtcactgtgttctaggcactgtgccagacattgggattcgttggtaagcaagagagagaggcatggcctctgtccttatgagcttgcagtttatcctagtgttacttatctagtctgccctgcc

SEQ ID NO: 8362 - DNA, 2300 bp, Homo sapien
cttccacagtgaaagatttttttatttgctttactagccagctaaggtttctgttgagacacccagggagatggtaaaactgcagctgtagctgggcacggtggctcacgcctgtaatcccagcactttgggaggctgaggcggggggatcacgaggtcaggagttcgagaccagtctggccaacatatcgaaaccccgtctctactaaaaatacaaaattagccgggcatggtggtgtgcgcctgtagtctcagctactcgggaggctgaggcaggagaatggcttgaacctgggaggtggaggttgtggtgagctgagattgcaccactgcactccagcctgggtgacagagtgagactctgtctaaaaaaaaaaacaaaaacccaaaaactgcagctgtgaagcccagcaccaaagttatagtccctgctagaggcagctgagagccatgaagtgataggagaggcaggtcacaccccatcatttatctgggatggaatgagctcagctgatgaaagggcttaaccaatgcaagaagccaaggcccacttcattcttatctttagttgctaataagggagccaattagtgttaattgtgttggcagtttggaacagctaccagggaatagatccaagaccattgtgggatgacccctctgtcccatcttaagtcccagccattactcatggttggatagggaattggagcaccaggaggtgttctttggtcagcgagtaaacacgagttatccttccacacatttacagtgccctgggtgtcagtttttaatactgtgcatgcagtgacctcacaatacagttctaccattgagagagacatagatatggatggatcaggactagtccaaaggaatacattttaacattggaatattcacaatcttccctcctttccacccagcctgccaaagactattttgttgacagtctgatttcctacctgcaaccctcacctaaagcagctaagttaatctatttaataaagggaaggggagagaggaggaggaagcctgggagctatgaaggatgcaggtaataggcaagggaagaaaaagagatatgaaattgctggagttattaacttgatgaccctcaatgtcctcggagagtcactaggaaggatggaatttttattatttacttatttattttgcttaaccgactgttgtttaaacacgacgtggttcattggacaatgcgcaccactgcttcatcagggttatacaagcaacagaaatagtatgtaggcactctgacagacatccctgtagaattgttcagagatgggggtggtaggaaggaaaatgacgtaccttctttggctgtcacccacccaatgactggaatgcctgtttggactggcttgtccgcccttgaacacgcaaatcctagtttccccattctcctatattcggtgacaattaggttgactgtgcagggtgagctggattttgtaagaggaaggaattttaccgaagaattcccctgcgttgttaccaacttggttacagttgcttcaagagtgtagctattcctgcatttgtggcctcaagggctaaagtgggacaacgctggtatttttggtgatgaggaaacactttttttttgttaagggaggttgggtgatcgttgaactgggacagaggtcacagcagaggtcacattggcgattcgagcggcggtggggggttggctttgggtcgggcatcctgcgccccccactcgggaaaggtggcggagacttcgaggttgggggcccatcgaaggttcccaccgccagctcccggaggggggcacccgggagccagcgcctcaggaaccggggcccacgcgggaaggtcgagcccgccggtgaggtcacggttgccatggctccgggcagtgacgcgcgtcggcacgtgacccgcggttgccatggagccgggcgccggtcggcgaaagcgccccgcctccccgagtgacgtccgcggccccccctttcccgcccccccttgccccctcccccgagccggctccccgcggccccggaggtttcactgcacaacaagatggcggcggcggcggcgagcggagctggcggggctgccggggccgggactgggggagccgggcccgcgggccgcctgctgcctccgcccgcgccggggtccccagccgcccccgctgccgtgtcccctgcggccggccagccgcgtcccccagccccggcctcccgcggacccatgcccgcccgtatcggctactacgagatcgaccgcaccatcggcaagggcaa

SEQ ID NO: 8363 - DNA, 2300 bp, Homo sapien
aaatggtgccaggaaaactggctagccatatgtagaaagctgaaactggatcccttccttacaccttatacaaaaattaattcaagatggagtaaagacttaaatgttagacctaaaaccataaaaaccctagaagaaaacataggcaataccattcaggacataggcatgggcaaagacttcctgactaaaacaccacaagcaatggcaacaaaagccagaatagacaaatgggatataattaaactaaagagcttctgcatggcaaaagaaactaccatcagagcgaacaggcaacctacagaatgggagaaaatttttgcaatctacccatctgacaaagggctaatatccagaatctacaaagaacttaaacaaatttacaagaaaaaaaacaaacaaccccatcaaaaagtgggcaaaggatatgaacagacacttctcaaaagaagacatttatgcaaccaacagacacatgaaaaaatgctcatcatcactggtcatcagagaaatgcaaatcaaaaccacaatgagataccatctcatgccagttagaatggcgatcattaaaaagtcaggaaacaacagatgctggagaggatgtggagaaagaggaacacttttacactgttggagggagtgtaaattaattcaaccattgtgaaagacagtgtggcgattcctcaaggatctagaactagaaataccatttgacccagccatcccattactgggtatatacccaaaggattataaatcatgctgctataaagatacatgcacacgtatgtttattgtggcactattcacaatagcaaagacttggaaccaacccaaatgtccatcaatgatagactggattaagaaaatgtggcacatatacaccacgaaatactatgcagctgtaaaaaggatgagttcatatcctttgcagggacatggacgaaactggaaaccatcattctcagcaaactatcacaaggacagaaaaccaaacaccgcatgttctcataggtgggaattgaacactgagaacacttggacaaagggcggggaacatcacacacgggggcctgtcggggactgcggggctgggggagggatagcattaggagaaatacggaatgtaaatgacgagttgatgggtgcagcaaaccaacatggcacacgtatacctatgtaacaaacctgcacgttgtgcacatgtaccctagaacttgaataaaaaaaaaaaaaaaaaagaaaaattacttgacatatcttgacattttaggctcccaggattttacagtattcttaacaggttttgtcagcaaaatcaacccccacccccgcatcagtttaagagccctggaaggctctgcctattcaccagcatagagctgagatccttaaagggccagttcagggcactgctccagcaaccgttgcgctgctataagcttgagcacatctcttgcccctcctctctacttttatagatcctgcatttatttagcatataatcttttcaatattgactttgtatatgtatgtcttcccctaaactggatgtatcttttaaggaaaagcctggggttcgtcatccccctatgtatcacctttacaggcggtcacccaaaatctccacattcatcatagaaacagaaattccactaataaatgtcaggtactgcctccttaaccttggtccgctatttccctcccactttcagcagtctggtttattccatgggtggaagaggaagccaagttggctgagtgtgaagggaatggcgtcagtgtgacttcacgccacatcgtcccgaatgccagctccacactgcggtggcacgaacgcaggattgagagatgcagctggagtaaagagagaagcccatgtccctcagacgccacacaaaatgggggtaaccgcgagaacaaagcagggtacccaacggggtgtggcgggacacctgggcgcacgccgccagcgcccgggagagcgaaggcggggagagaggaaccacgctgaggcgtggcaggatgggggcgggacttccggaagccatttggctgagtggcaggggaaccggaagtggaggagctgctgctggtgctggggccggaggagggacgcgccggagcgggaccgacgggaccgagcgagcgaccgacgcgccacccgccgacgcctcagccgcttggggcccgcacggaccctctacttcagtgagtgcatccagggtcgcagggaaccggtggcttagaggcgggggtcggaaggggctgcgaggtgttattgtgagaggcccgcgacc

SEQ ID NO: 8364 - DNA, 2300 bp, Homo sapien
ggcctgtaatcccagctactcgggagactgaggcaggagaattgcttgaacccaggaggcagaggttgcaatgagctgagattgtgccactgcactccaacctgggcaacagagcgagaccctgtctccaccccccggcagataaaaaagcaatatataaatatatatacattgtagaacatttgtaaatctttttaaatataaaaaataaaatttaagaaccactcacaatccattattttttattttttggtactactctatatttttagaattaaaggaaaatgatatacaatatgtgttatttttaaaattgtaattcaaagataactactgctaaattttatttttaaaatttgccctgctttctggagacattgctaaatgtttagtacaatttttttctatttttctatgcatgtctatatgcatttggaatatatacggttttatttacttatttatttttgagacagagtcttgctctgttgcagcccaggctggagtgcaggagcatgatctcagctcactgcaacctccgcctggtagagttaagcgattctcctgcttcagcctccccagtagctgggattacaggcacgcgtcaccacgccccactaattttgtatttttatagtagagatggggttcaccatgttggccatggctggtctcgaactcctgacctcaagtgatctacctgtcttggcctcccaaagtgttgggattacacgtgtgagccacggcacctggctctatatactgtttatttagtgtcatatcctgaattctctgcttacgtgtcctgtgaagtcttaagcatcatttttgatgccttcatgatagtgcatttaaccaatccctcattatggatatccaagtcatttcctttttgctttatattataaatatcacagtgataagcgtagctgcccaggtatttttatctgtgcttcctatttccttaggatagagtccagaagtggaattactggatcaaagggtataaagctctctaagtttcttgaaacagtgccaaaatattttgtagaaaagttttcaccaatttacactgaaggtcagtatctttcaatgagttttgtaactgtctctgagagaagaggggaaacagcccggcaagcttggaaagctcggaaggccgtccctgcagttgtgtggcccctctagagggaggtgggaaaggcatggggattcctcctgcagtgctgcctccgtttcccctccgccggtagggccaccgtcctgtttcctaatccttcgagtttttcattttttaagatccccggagaaaaagtggcccagggttggacgatgttagttgtaaaggtggtggtgggggtgggggaatccttatgtttgagcaaatgtaagagttgttcagcaagaacccaacacttggagattgttaacagaaacatctgcctattccaacgtgagtttcagagatggtgaaaatcacgggagagagttgggtaggagttggagaaggcattgcaagctttccccttcagctagacagctgcagcccctttaagggcaaatgcgggacctggtcctttaaatctgtgtcagtttcccctgacgtcagcgggcgggccagcagccctgctgtttatcgcccagcggcgcagctcacttttcagtgttcgtgcgtcgggacggcgcgtccgcccgcccttaaagggcccgcacctcggaaaactcgcagcccagcacggcgtcgggtagctaccacctatcacgcccctcactctgcgactcgccttcctccgcggccagcccccgccgccggctcttcctccctcccctttcccggcgtctccaggctcccggcaaccagccgccctccttctcacggccctggcccggggctccagggtctcaggtcgtactcagcccctcgcgagctgggaccccttcccgtagccagcatcccctccctccccgccccctcccggccgccccctcccctgcggggaccctgggagcctcttcggggctcttgggaggggacatttcctaatctcaggccggggttaaagttctggtcctggtgagatgctggaagctgcggccgcagccgcaacccgtcccggaggtgtcctgtctcctgtcgccgccgccgccgccaccaccgctgccactgccgccctgccggggccatgttcgctctgggcttgcccttcttggtgctcttggtggcctcggtcgagagccatctgggggttctggggcccaagaacgtctcgcagaaagacgccgagtttgagcgcacctac

SEQ ID NO: 8365 - DNA, 2300 bp, Homo sapien
tttgtcattgaaacactgctataagattgagtctcagtttccctgtctctataacagagggagtaaaatttgtccagttaatctcactaagttatgagggctagcacaaaattagcagataaaattagcaggaaagtaccaggcccctactcagtgctcaataaatatttactgaatgattaaatggggccctaagggactgtgataggaggggaaagaaggtgcctctctttctttttttgagatggactcttgctctgtcacccaggctgtaatgcagtggcaagatctctactcactgcaatctccgcctcccgggttcaaatgattctcctgcctcagcctcctgagttgctgggattacaggcacctgccgccatgcccagctaatttttgtatttttagtagagacgggggtttcaccatgttggccaggctggtcttgaactcttgacctcaggtgatccgcccaccttggcctcccagagtgtgggattacaggcatgagccaccgtgcccagccagagggtgcctctctctctctctcttttttttttttttttccgagatggagtcttgctctgttgcccaggctggagtgcagtggcgcaatctcggcttactgcaagctccacctcccaggttcacgccattctcctgcctcagcctaccgagtagctgggactacaggtgcccgccaccacgcccggctaattttttgtatttttagtagagaaggagtttcaccgtgttagccaggatggtctcaatctcctgacctcgtgatccacctgccccggctcccaaagtgctgagattacaggcgtgagccaccgcgcccggccagggtgcctctcttacatggattatttattcagcaaatatttatggagcacctcctatatgccaggtggtatgctaaggcagcagtccttggtgggggcggggtcctgtctagaggaacaggaggcagttaagagctgtggtgagcaaggaacaggtcactgtggaaatacaggacagagaaagcttcctagaggacacagtccctgagctgtggtttgagggttaagtcaaggtggaatttttgagaggccaggcacggtggctcacgcctataatcccagaactttgggaggctgaggcagggaaattgcttgaagccaggaattcaagaccagcctgagcaacatagcgagacccaatctctataaaaaataaaaaaatgagccaggcgtggtggcacacatctgtagtcccagctactcaggaggctgaggtggaaggatggagcctaggagttggaggctgcagtgagctatgatcgtgccactgcactccagcatgggtaacagagtgagcccgtctcaaaaaaaaaaaaaaaaaaaaaaaagtagaagagaaagttctagcccagggagcaacatgagcaaaaataggagtgtgtcagagtttggtgtattagaggaactgccagttgttcatactggctaggcagggccttacatttgaggggagaagggtgagagattgagctgggtggaggaggacatgaaggcctttgggtgccatgatgggaggtggtggaaggttttgacctgtccaccttcctgtttcctccttgaagctgaggcatacgtcagtgggatgctcttttgcctgggtatatttctctccttttacctgctgaccgtcctcctggcctgctgggagaactggaggtaaagtggaactgctgggcctcccctggtctgggtggtttgggcaggtgtgtggggcagatcacctggcaggatctgagccagcctagggtaatctacaccatccatagcagatgatggtggggctgttagagtctgtggcccatgagcctctctagaaaccatcccctcccctcaaccttcttcccaagcagggagatcccatgttgctccccagcctgtgaggaaccctgggacaaagggtggaggacagggtcatagcgatgagagtggagcagagaggtagaaggaaagtcagccccatacagagtgatccttgtcctgtcccatctgggtggcctgtgggttctgtccatgcaggcagaagaagaagaccctgctggtggccattgaccgagcctgcccagaaagcggtacctccagggggcctgggtggggcgggcacagtgtgctttgtgttttggggggtggtggtggatggttccctagggggttggaggaggaagggctgggggtttctggatgttcagatgggggtaacactccacagatgggaatgaggctgggatatgatgtcca

SEQ ID NO: 8366 - DNA, 2300 bp, Homo sapien
acacgtgcctgcggtgctgtgtattcccacctgctagctgtggtggcacttgctgttttttgccaaaggggcccggatggcggggcgtgggctgagttgggcgtgacgacagacccactccctgtccctgctcctgctacaggtggtgaatgtcacagggaatcaggacatctgctactacaacttcctctgcgcccacccactgggcaatctcaggtgggggtcatgctgggaggccccttgtccaggccaagggtgaaatggggcagggcctggggctttgcaatgcccacgtgggctagggaagaggcctgggtgtgagtcccaagcagtctgccttgtgttgccccttctagcgccttcaacaacatcctcagcaacctggggtacatcctgctggggctgcttttcctgctcatcatcctgcaacgggagatcaaccacaaccgggccctgctgcgcaatgacctctgtgccctggtaagggagcacctgcctgcctgccgcagcctcagctccagcacagacctcaagccttggctccaggacacccttttgggcaggcctggccctgccttccccagctctcccctccccagttctgtctggcccaccctatccagcccagcctgccccaccctgccctgccctcccttgccagcctgcccaggccagcccacccctgcacacccacactcgacacataccccaccccttttcctcttccactcctcttagggtccctcttttgggtcccttcttcccttcctgcctcacttcctccctcccttcccttctctctctccccaacaggaatgtgggatccccaaacactttgggcttttctacgccatgggcacagccctgatgatggaggggctgctcagtgcttgctatcatgtgtgccccaactataccaatttccagtttggtgagtggggcgtccttcttttctggctcaacctacagcagggacctgcctgagtccttcactatccccaagtcacccacagggatcgctaagacacccctgtaggaaactccaaggctggcgtgcctgggtgtgcacacatcctagcctatggaacatgggcacctagatgctgcttcattcatctgtcaagctattcctatgtaaaggcatgtgccgcagtgaagaaaacagtataattaagaaggggtccctggccgggtgcagtggctcacgcctgtaatcccagcactttgggaggccgaggcagatggatcacgaggtcaggagctccagaccatcctggctaacatggtgaaaccccgtctctactaaaaatacaaaaaattagccgggcacagtggcaggcgcctgtagtcccagctgctcgggaggctgaggcaggagaatggcatgaatccgggaggcagagtttgcaatgagccaagatcacgccctgcgctctagcctgggcaacagagcgagactccgtctcaaaaaaaaaaaaaagaagggggccctggctgggcactgtggctcatgcctgtaatcctagcactttgggaggctgaggcggggggatcgcccaaggtggggagtttgagatcagccgggccaacatggtgaaaccccatctctactaaaaatgcaaagattagctgggtgtggtggtgcatgcctgtaatctcagctactcagggggctgaggcaggagaattgcttgagcccaggaagcggaggttgcagtgagccgagatcccaccattgcacgccagcctgggcgacagagtgagactccgtctccaaaaaaataaaagggagtccctgatctcagggtgctcacagactaagacacagaccaagttgtccctgttttcaggagatgtcagactctgggtgacagccagtggggtggcagtgtggtgtggcaggtacaactaaggaactgaagttcaagtgccaccctgccaccagctcacaccatggccgtggtggggcaccagggctctctcttcctctgggattgttggggccaggagttctctgctggggcttggtggccatttctgcagctcccttccgtgtccctcatcctagacacatcgttcatgtacatgatcgccggactctgcatgctgaagctctaccagaagcggcacccggacatcaacgccagcgcctacagtgcctacgcctgcctggccattgtcatcttcttctctgtgctgggcgtggtgagggcctgacctgctctgctcagcctgtatgataggaaaggtgcacgtgcgttcagacacgtagtgcacaccctccgccacctcctgcatga

SEQ ID NO: 8367 - DNA, 2300 bp, Homo sapien
tcccacctggtccaccccagatgctgaggatgggggagctcaggcggggcctctgctttggggatgggaatgtgtttttctcccaaacttgtttttatagctctgcttgaagggctgggagatgaggtgggtctggatcttttctcagagcgtctccatgctatggttgcatttccgttttctatgaatgaatttgcattcaataaacaaccagactcagttcttggggcccttgtttgcactccctctgggtggagctgttgaggatgaggggagaggcggaggtcttccatttccccattcttcaagccatggccctactgggaactgcaattccttgattctcccgtttttcctgtccctccagcaacagcattaattcagtaaacatttaccggggcactgtgctggacagaggccagttcctggaaaagcctttcccacgccatcccactgcagacatccctccttacctccccaggaacagcagtctctgcccacctggccccgcccaccagactgaggctcacttcacctctgacctgagcggcccccagctcaccaagccacaggcccaagcagtgctccctgatgcggcgtttataatccgctcagcgtgcaggccgaggcaggagggtgatgaaagctgggcaggctccaagaggagggagttttgatatgtccctgaaagattcatttagacttcagtcggctaaggaggacatgatttgggggccaaggaatctgttgaattcagaacacaaccagaggtctgcagggtcagggatggaggagtgggctttcccctcgccagggcccactcctcttcctgcttttcctgcaggcgccactgggaggtgctatggctgtgcctcccctgggctctggagcatgtccagttgcagtgggcagaactgcggaggcgggcccctcctctgccaggcctggcagccccctcctagggccttgtttggctaggggtggtgccgggtgtggcagtgtgtgtgtagtggagagtgttaggtcttccctaccagatgcccttgcaggggagtgccacagcagtcagtccagggatcccactgttagtctcaccttttttaacctcttatctctccccaagatccctgaagccaggtacgagcaagatgagagtgggttatctctggagtgacagaggctggtctgttttccaggctggtagggactgttcctaaagggaggaagggatgataccagcctcctgagcctccttctcctgcgttagtgtctcaggccctgccaggccttatagaccctcttattgacactgcccactggatggggaccggagttggactcagcttctgccgaaccctcaaatcccagccccaactaaagcatataactcaagacctacctgcactgaaagctcttctcaacctgagcagggtggtccaattgaaagggtgggtctgaccacctctcctgcacccatgcgggttggcagaggtgtgcaggatctgccacttaccattcaccatgtggccttgaggaagacgcactcggggcctcagtttcctcatctataaaatggggatgtaattacaccctcacactgtagctgtgagtattcaatgagagcactgcaaagggcctggtgtggagtaggtcctcaggaaaggttggatcccatgtcccatcagagctaaaagccccaggaggagagggtggctggtttgtccccacaaacccctgggattcccggctccccagccccttgcccctctctccagccagactctattgaactccccctcttctcaaactcggggccagagaacagtgaagtaggagcagccgtaagtccgggcagggtcctgtccataaaaggcttttcccgggccggctccccgccggcagcgtgccccgccccggcccgctccatctccaaagcatgcagagaatgtctcggcagccccggtagactgctccaacttggtgtctttccccaaatatggagcctgtgtggagtcactgggggagccgggggtggggagcggagccggcttcctctagcagggagggggccgaggagcgagccagtgggggaggctgacatcaccacggcggcagccctttaaacccctcacccagccagcgccccatcctgtctgtccgaacccagacacaagtcttcactccttcctgcgagccctgaggaagccttgtgagtgcattggctggggcttggagggaagttgggctggagctggacaggagcagtgggtgcatttcaggcaggctctcctgaggtccca

SEQ ID NO: 8368 - DNA, 2300 bp, Homo sapien
ttcagtcggctaaggaggacatgatttgggggccaaggaatctgttgaattcagaacacaaccagaggtctgcagggtcagggatggaggagtgggctttcccctcgccagggcccactcctcttcctgcttttcctgcaggcgccactgggaggtgctatggctgtgcctcccctgggctctggagcatgtccagttgcagtgggcagaactgcggaggcgggcccctcctctgccaggcctggcagccccctcctagggccttgtttggctaggggtggtgccgggtgtggcagtgtgtgtgtagtggagagtgttaggtcttccctaccagatgcccttgcaggggagtgccacagcagtcagtccagggatcccactgttagtctcaccttttttaacctcttatctctccccaagatccctgaagccaggtacgagcaagatgagagtgggttatctctggagtgacagaggctggtctgttttccaggctggtagggactgttcctaaagggaggaagggatgataccagcctcctgagcctccttctcctgcgttagtgtctcaggccctgccaggccttatagaccctcttattgacactgcccactggatggggaccggagttggactcagcttctgccgaaccctcaaatcccagccccaactaaagcatataactcaagacctacctgcactgaaagctcttctcaacctgagcagggtggtccaattgaaagggtgggtctgaccacctctcctgcacccatgcgggttggcagaggtgtgcaggatctgccacttaccattcaccatgtggccttgaggaagacgcactcggggcctcagtttcctcatctataaaatggggatgtaattacaccctcacactgtagctgtgagtattcaatgagagcactgcaaagggcctggtgtggagtaggtcctcaggaaaggttggatcccatgtcccatcagagctaaaagccccaggaggagagggtggctggtttgtccccacaaacccctgggattcccggctccccagccccttgcccctctctccagccagactctattgaactccccctcttctcaaactcggggccagagaacagtgaagtaggagcagccgtaagtccgggcagggtcctgtccataaaaggcttttcccgggccggctccccgccggcagcgtgccccgccccggcccgctccatctccaaagcatgcagagaatgtctcggcagccccggtagactgctccaacttggtgtctttccccaaatatggagcctgtgtggagtcactgggggagccgggggtggggagcggagccggcttcctctagcagggagggggccgaggagcgagccagtgggggaggctgacatcaccacggcggcagccctttaaacccctcacccagccagcgccccatcctgtctgtccgaacccagacacaagtcttcactccttcctgcgagccctgaggaagccttgtgagtgcattggctggggcttggagggaagttgggctggagctggacaggagcagtgggtgcatttcaggcaggctctcctgaggtcccaggcgccagctccagctccctggctagggaaacccaccctctcagtcagcatgggggcccaagctccaggcagggtgggctggatcactagcgtcctggatctctctcagactgggcagccccgggctcattgaaatgccccggatgacttggctagtgcagaggaattgatggaaaccaccggggtgagagggaggctccccatctcagccagccacatccacaaggtgtgtgtaagggtgcaggcgccggccggttaggccaaggctctactgtctgttgcccctccaggagaacttccaaggaggtgaggagtgtgtgaacgcacctgtgttggagcacggtgtcccactctggcgggtccccagggcctgagcagcagcgatagccctgtgacaatgtgaagggccacagaactcttgtattccagtcaggggcaaagagtggagacggaaggcctgtccttctgacaagcagccccttccactgtctgacagtgggaggtcacccccactgtagcagaggggtggggggcgggtactgccaaggaggagctttggagtgataggcggggcaggcctgggacccttggtctttcccaaagggtggttccctttcgaagttgctattccaaaggtagcagtgaggatggcacacatttatgtagccaggccactcctgtttgtccgtggagtggagaggag

SEQ ID NO: 8369 - DNA, 2300 bp, Homo sapien
ctcattgaaatgccccggatgacttggctagtgcagaggaattgatggaaaccaccggggtgagagggaggctccccatctcagccagccacatccacaaggtgtgtgtaagggtgcaggcgccggccggttaggccaaggctctactgtctgttgcccctccaggagaacttccaaggaggtgaggagtgtgtgaacgcacctgtgttggagcacggtgtcccactctggcgggtccccagggcctgagcagcagcgatagccctgtgacaatgtgaagggccacagaactcttgtattccagtcaggggcaaagagtggagacggaaggcctgtccttctgacaagcagccccttccactgtctgacagtgggaggtcacccccactgtagcagaggggtggggggcgggtactgccaaggaggagctttggagtgataggcggggcaggcctgggacccttggtctttcccaaagggtggttccctttcgaagttgctattccaaaggtagcagtgaggatggcacacatttatgtagccaggccactcctgtttgtccgtggagtggagaggagccaccctcctgccctctcagaggtccaggtgtgctcactcctatttgggaagagagaaggggcacagcagccctgcaggggcccctggctctgctcgtgtttctgggcttctgctggtagggggtgccaccttcccgtttgaccctggactttctttctccactgcccactttcacccactgggcagctcaggggaggggtcctggcaggagccacagggcaggagggtccatgcctgtccatgctgtcctgggagtgtcttgagatgcccctgggggggccgccctgtaatcatcctcctctccccctccccactggctcgaaggcaggactcgggaggcttcatcagaggactctaaaggatttctggggattctccacttttcgaccctgacccaggaggaggaaggggaaggatggtggtgctgggtgggagtggggatggtgtgtgcttcatccccctctgaccgaaatcctaatcttgtctctagatctgggggctgcagcgttgtgtacctgtcacccttagccttgctgctttgacctgtattgtctgttctgaccctcctgagactggaagctgggggtaggggacacactctccttccatcctgttcctcaggagcccagcaggggtgcagaaggggaaggcagacatgagggcaggtggagtgggggtagaagcagggccagagacagaaggtggatgcctgtctgggatggtggtgcaaaggctgagacagaggctggggtggatggaagccaggatgcagggctaccaaaatcacctggtcccagctgacttgggggtttggaccacagttctttgtgcaggagtccttgggtggttggggagcgggggtgggacacacagggtgaagggagggattggctgtttgtagctgaacagcagaacagagcactctgcctttggggtctctggcatcactggcagggagaggggtggctgggccaggagcccacctcatccccagtgctcagagaactgggtcctcagaagtggtcctgcccccactttacacataaggaaacagacgcaaggaggagagggatgcccaatgacgggcacttcgatgagtccgtgtgaactctgttccgtgtgagctgctgcgcgctcagggaatgattgtgagaagcgggtggaggctggagtgggcagcaaagaactgacattttgaggtcagtttttcactccttggtcaagggcaggctctctccctggtcattaccaggagcctggctccgggcagcaaagaactgacatttcgaggagctctgctaagggccaggcagtatgtgagggagttcacagacaccgtcccattttcacagccctctgaggttggtaacataacccccacttcacagatgaggaactccagcccagaaagcctgtcagccctgagaaaggaagggcagggcatcgggctgggcagctggcctgggaccagtggggtgtgatagtgttggctctgcttcccgcgggtggggtgccagtggggaggggtctcaccagagagggagccgggggagtgcgctcctgcgtccatcctcagaccagcgtgtccctcccaacctctgacccctctgaggccaggggatgggttcggcttcctttggtacctcttttggaagtctcttcagacaaacactggagagaaggcacagcaccctagggtgacatcagtggacaggtcagtt

SEQ ID NO: 8370 - DNA, 2300 bp, Homo sapien
cctcctgagactggaagctgggggtaggggacacactctccttccatcctgttcctcaggagcccagcaggggtgcagaaggggaaggcagacatgagggcaggtggagtgggggtagaagcagggccagagacagaaggtggatgcctgtctgggatggtggtgcaaaggctgagacagaggctggggtggatggaagccaggatgcagggctaccaaaatcacctggtcccagctgacttgggggtttggaccacagttctttgtgcaggagtccttgggtggttggggagcgggggtgggacacacagggtgaagggagggattggctgtttgtagctgaacagcagaacagagcactctgcctttggggtctctggcatcactggcagggagaggggtggctgggccaggagcccacctcatccccagtgctcagagaactgggtcctcagaagtggtcctgcccccactttacacataaggaaacagacgcaaggaggagagggatgcccaatgacgggcacttcgatgagtccgtgtgaactctgttccgtgtgagctgctgcgcgctcagggaatgattgtgagaagcgggtggaggctggagtgggcagcaaagaactgacattttgaggtcagtttttcactccttggtcaagggcaggctctctccctggtcattaccaggagcctggctccgggcagcaaagaactgacatttcgaggagctctgctaagggccaggcagtatgtgagggagttcacagacaccgtcccattttcacagccctctgaggttggtaacataacccccacttcacagatgaggaactccagcccagaaagcctgtcagccctgagaaaggaagggcagggcatcgggctgggcagctggcctgggaccagtggggtgtgatagtgttggctctgcttcccgcgggtggggtgccagtggggaggggtctcaccagagagggagccgggggagtgcgctcctgcgtccatcctcagaccagcgtgtccctcccaacctctgacccctctgaggccaggggatgggttcggcttcctttggtacctcttttggaagtctcttcagacaaacactggagagaaggcacagcaccctagggtgacatcagtggacaggtcagtttcctgttcctgttcccagccacccctgtctgtctgcccagggacctacctgcctggcccactcctgctgccacccctctccatgagtgggactcctgagcagtgccaggcccaggccctcagggtggcagttgctggatggggccaggcttcccattccctggcaggcagactcttggctctggaagatccctgggggactctgacttcttggttactcaggctactccgtaagggtagccttacgagagcgtaagggcatgaggggaagtcgatgggtagaccaggtgtctctgatttctctgaggaaatgcagcttctttgccaagaactcttgggctttggtggcttcgtcgcccttgcctggggtgggcgagttttagtctcttcagctgcagaccagaagctgagctgacctgaaaagagctggagttctggagttcgggcttccaggccagggcctgcttctgggtgagagtgggaggtaatggttgcttgaggcagaggcagtaaaccctcacacccgcagctggacaaaggcaccagctggctgtattctgtgggggcaatgtggcttctggaaggtctctccagtggctctgtagctggtcttggcaaagaatgttctagaccaagggttgtcaaactacagctcatgggccaaatccagcctgctgtctgcttttgtaagtaaagttttattggaacaaagccatgttcatttgttacatattgtctatggctgctttcacactgcaacagcagagaccatgtgtcctgcaaagcctaaaatatgttctgtcttatcctttacaaaaacagtttactgacccctgctctagacctccaaagacctggtatcctctttcctggtgttcaagttcagagaggtgtctggagtaggggctgagcctggcctggatgggcagtgctgtgacaagtgtctaggatggccgggtatcctgcacagagctagaaggctgcctggcacgggtgaaagcagagctgctccctgaccctctgcccctccctcctccaccctggcctgctttagctttccccagacatggccaacaagggtccttcctatggcatgagccgcgaagtgcagtccaaaatcgagaagaagtatgacgaggagc

SEQ ID NO: 8371 - DNA, 2300 bp, Homo sapien
tattccccatcccagaccctcactttatcctttcttggctatctgcttcccctaatccttcccgcaagctccttagaacaagccacctcccaccccatgcggagacccaagctccctgggggccacatacttcataaaccagttgggatctccacggtagtgcccatcattcttggtcactgccaagctgcccaaagccatcagggtcctctgcactgctgccatgtctttgcctgtgagaagacaggagagaggagatgaacatcaagaacgtataaacaagactccaagccagggcctgcccccgtctctcacaaaaaaatggccaaaccagggccaagagttgtccccaattcaagggaggcctctcagtgggccctgtgagcgtggcgtgttattctcggcatatcccatccctgctgtgtgcgggcaagcacacccctagttgtggcatattctggtcattccctctccctgtcccagcaccctgtcctcctgcccacctcctcccccagcctcttcctctctaccttcaaagaggtcaacagtctggaacatgtcagtcttgatgaccccatagtcctcagccgccttcaggaactgagccacctgctccatctgcttgaagaccatggagggtgggttctcgggcaccttcaccggcttggagccatcagggtacaggctgttcaccagcttgctcagaatctaccaggcatagggcataggacgcagcttagcagtcagctcagggattggcccaggactcacagggtggcacaccccagccccccagcgccctagcccagggtgccactcaccacgccattcttcagccagacctggaagcccaagcgcccacggtctgggcggcccacatcagggccacactgcactatgatccactccaccagccgctcctccagctcctcgtcatacttcttctcgattttggactgcacttcgcggctcatgccataggaaggacccttgttggccatgtctggggaaagctaaagcaggccagggtggaggagggaggggcagagggtcagggagcagctctgctttcacccgtgccaggcagccttctagctctgtgcaggatacccggccatcctagacacttgtcacagcactgcccatccaggccaggctcagcccctactccagacacctctctgaacttgaacaccaggaaagaggataccaggtctttggaggtctagagcaggggtcagtaaactgtttttgtaaaggataagacagaacatattttaggctttgcaggacacatggtctctgctgttgcagtgtgaaagcagccatagacaatatgtaacaaatgaacatggctttgttccaataaaactttacttacaaaagcagacagcaggctggatttggcccatgagctgtagtttgacaacccttggtctagaacattctttgccaagaccagctacagagccactggagagaccttccagaagccacattgcccccacagaatacagccagctggtgcctttgtccagctgcgggtgtgagggtttactgcctctgcctcaagcaaccattacctcccactctcacccagaagcaggccctggcctggaagcccgaactccagaactccagctcttttcaggtcagctcagcttctggtctgcagctgaagagactaaaactcgcccaccccaggcaagggcgacgaagccaccaaagcccaagagttcttggcaaagaagctgcatttcctcagagaaatcagagacacctggtctacccatcgacttcccctcatgcccttacgctctcgtaaggctacccttacggagtagcctgagtaaccaagaagtcagagtcccccagggatcttccagagccaagagtctgcctgccagggaatgggaagcctggccccatccagcaactgccaccctgagggcctgggcctggcactgctcaggagtcccactcatggagaggggtggcagcaggagtgggccaggcaggtaggtccctgggcagacagacaggggtggctgggaacaggaacaggaaactgacctgtccactgatgtcaccctagggtgctgtgccttctctccagtgtttgtctgaagagacttccaaaagaggtaccaaaggaagccgaacccatcccctggcctcagaggggtcagaggttgggagggacacgctggtctgaggatggacgcaggagcgcactcccccggctccctctctggtgagacccctccccactggcaccccacccgcgggaagcagagcca

SEQ ID NO: 8372 - DNA, 2300 bp, Homo sapien
agctacttcgaggctgaggcaagacaatcgcttgaacccaggaggtggaggctgcagtgagccgagatcatgccactgcactccagtctgggtgacaagtaagactttatctcaaaaaaaaaaaaaagcaaaatgtacaaagagcatgtagggaaaaataagtctcccacatatggctccccacctcccagttccccggctaggagaccagcattagtgaggagctgctgtggccttcattgcctaggtatccgggtactggatggacctctcacagacagcatggaggcagtggcgttcaacaagcactatcagatcaatgacatctacagctgcaggtgaggcagagctgcagatgagagggcaagagcctggagcacctgggacaaatccgccaacaaaatcccaaccagtgggctgacttaggccggagcaggggtctcctcattgggttcagctaataagtccattgccttcatttctctagattcccagccactgggcactcaaccttaagcccccgtcacccccgtaatcagattgccacatgagaagccctggcctgtgcacatttatttgttttctaaactcctaaggcctctgcaagaaagcgggctttcttctccatccacaggccagctgaatgcccaacaccaatcccccaccccacgccaatgcactgcaccttcagggcatggctgtgctggactggacaagaaggaaatggggttgggggcccacatggcattgatggcacctgttcctcccccgacatacctcccttaaatccatgacatcatccacagggtacacttcccgatagagacagaatagagaactcctcaacctgagaaccaagagcttccacagaagttcatgggcgctctgccttctaccctacgagttgggccaggtgcggtggctcacgcctgtaatcccagcactttgggaggctgaggcatgtggattgcttgaggtcaggagttcaagacctgcctgaccaacatggtgaaaccccatctctactaaaaatacaaaaattagccaggcttggtggtgggcacctgtaatcccagctactccagaggctgaggcaggagaatcgcttgaacctgggaggtggaggtggcagtgagccaaaatcgcgccattgcacttcagcctgggcaacagaggaagacgccgtttcaggagaaaaaaaaaaaaaaaaaaaggtctacatgtctctgatccctagatcaggagatgagtgacctctgtccctctctgccactatgggctatggggacattcacaaggaaaagaagagccttagcacacttctgttttccactttggagaggggatggacctttgaaccctgtgccttttaatcacggaagcctttaagtggaacccttgggaggagttaagagctgcaggtcaaagggcagccagctgagactgggaggcgctgggtgggtagccgcagcctggctctggctgtcccctctaggtatttatttctcaacagctggggaccagatgacgatgggaagacagtggatggcccccatcagcttggaaaggtaactggcctgcacaaagactctgagaaacgggatgccctcttcatacagtcccgggagaactgctgcaagttgacccatcttcccactccacctccacgctcagtctcctttcaggaagagaacacctaacgtcggggcaggaagcctaggggacgtttgttcctagagagggaaatggaacagtgctttgagattgtttccctttcatcttatcctcagctcccatgcctggccccaccctgtcctctgataagcagagggtgtccatcagtcatcattcaactcacagctgccccacatcctgggtcaactcacagctccctcacatgcggggtccatcttccaatctttcccccatgcccagtgccctttgaacttttttccctttgtttctagaaggggtggagagggtgactgatgtggtaggcggaggtctttctgtgggttcctcaactgacaccctgatgttttggctcctcaggctgccttacaacatggggtgattgctggtcgccagggctttgggagcatctttgtggtagccagtggcaacggaggccaacacaacgacaactgcaactacgatggctacgccaactccatctacaccgtcaccataggtagtcacccaatgtttctgtgctcctgtgtgtgtgtcaccgaagggttagggcatcacacgtcttgtcctagcttctgtgtgtgtctaaatgtgtgagcacaataatc

SEQ ID NO: 8373 - DNA, 2300 bp, Homo sapien
tcggtcatagactggagcagaactggtacggtgaggccaaatcagtataacacccaaaaaacccacttcctgtgctatcgtgccaccctcttttcattttgttccccagaggcctagcaaaaaacagttaccaaaatgcctcttgaaagagtaggtaataacgtcctagaagtccaggtggtagctaacttcttgatttgtatatcccagaaggataccagggaaagtgaaaggagggaggcggcgggggcgaaacggggaaagccagagagtgcaaacaaaacagaacaggcaccaaggacaagcgggcaaccaggagagaacgaatgatgagagaacctcactaagcagctactcctgtactgagctcaggaggctggcttcaaggtgaggactcagactccagactgggactccaattgcctgggtttgacagaaccagggaattggtctcaggagccctcaaaaaaaaaaaaaaagagccaagttagaactgggggacagacaaatggggtggcaggacatgtgtgtacctatggtggctgggctcctttaaaagcctttgctctccactgggtccaccctggggcagggcttagtactcagatacacacccaagcggctctacctcaaagcattccagaaaaatgggaattttactgaaaggcttcctggaaaggagaacttatgccacctctcctttacctctaaaaatcttcatactacatttcttcctctcgttttctcttaggtttccaggcatattccctctcaatccctccctgcccccgggagcctcaattctcccaagatatttaggtgtcttccccagtctgcatactctactaagtaaacaaactaacaaacaaaacccttgttagccagacagtggccccgctaggcagactccttcagactcagtagatcccaccacagatgtcaggaagaaagagaagcaggagctccttctgtctactagtggcaaagcagcatttttatcccccaggcttctgggaaaggaaccttaaatgccttctgaaagcaggtctcaacctctcccaacggctaggcctccctttacagctcttaattgacaaggaagaagagaatgggcagcctggagtccaagatcctgctcccaagctactgtcctcgctgttccacacccggctcctagaagccagcttgggtaccgggtcagtttcccgattctccctccgtcggcctcgatcgctccgtgcaatgtgcccctctcctcattagcacccacattatccaggaattctgggccctggggccccatctccttggtcccccacgccaggacctcaggcaccctctgtgcagctccctcatcctcagacgccggcttcccccacttctggggccccctgaccacccaggtccagccccacacctagttcccaactcaccggccccgccgcagctgccgccgcctccctgcggaaactcgcggcttcccgggagccggaggagcagtgacagcagcatcacttccgcccgcggcgcagccaatcagcgcggcgcctgcggcccggcgacccccgcgggccacagcaaccggcgcccggggtccggctcccgcgggcggcctacgcaggcaggggccgtgcgggcgctgggggctgaacccgcgggctccgcctccccgagtcctcggggcatcttccacatggtccctcttcagaaggctctccttcatggcgtcctctgtaaagggcatttcggttccgacctttaaaagccactcgttgctcttctccttctgaccgccatggccccgactgtccctgtaatcttcccagaggggatcctgcccacccaggtcgccttccttctcgcagtcggctctcccttcttccccgcgccccgggagagtccacttgtatctcaggggtctcccgcagcatccccgtgccccggcggcgccagctgtcgccgccagagggcgccgtcgggggcggcgcggcgccaccgcggcctctcctctcgcggccggagcctcgccccctccgctcgtgccgccggaagtgggaggtgccgcgcgcgggccggcgctcgacccctccccccgtggctcggccgccccctccccccgctccgcccgctcaggtgcgtcccgtccctcccccactttcctcccgggggcgcggcgcgggaggtgtgtgcggggcgagcgtgggtgggggttgcggggcgagggccgggcatgggggtcgggtggggggcgtggagggtgctgtgagaaccgaggcgggggtcccggcctagaagtggga

SEQ ID NO: 8374 - DNA, 2300 bp, Homo sapien
gaatgtccacacaacagagctgtcgcagtaaagaaacacaaaaacctgggctccgggagaaaatacttaagagtactaaaagagacattgtatgcaaagtcctagtgtcctagtgggcagcaatcctcaggagtcactgtatttacataaatatctaggagtctgtgcaaagatcttattttcacttttggcagaaatgtagtcatttcaaacaatacatcttagtctgccaggatcttccaagtggtcccaggcctaccttgtctgctatcatttttaataaaagacgtacttttcggcctagtatcaatcagatctcatgtttttaaatcactttatggctgttacattcaaagcattctccattaatttaagggaagtttttggaggtgtctgcctgtaagtcaacaagtaatgcaatactgggcaatccagggtgcatattttactgtcagcgtgctccccacagatgggaaaggcctgatacccactaactgagcaaagaacagactcttcagagtgactagtggtgcaaaaaagaatcctgggttctctagcgtgaaaaagtcaaggtaaaaaacatggtaacacaagtaagggaactgggacggacgccttttttaaaaatcaaaaggtcatcttttatgccgcagagcaaacttatgaccttatgaggagaaaagaaaatcaaaatacttgggaggtggggatgaacatcgggttagtttgcattcttgcttttattttaacagcatcacacgtattcccccccggaacactgaagagcgcatagggcagataggtagatggggctgtgtcaacacctcagtcacagcccacagaccctctgtgcctcagtttccctcattatacaaagctcctgggagaaaatgggcccaaaccgccattgctgctccctcaggtgcaaacatcccgtctccaacatagcccagggctggggggtcctctgcgcccggtgaacgaaaccccaggacaagggccatgcatgcaactccgtggctagagagcccgtggcgcgggtaggaacagctggctggagggtcgagtgtaccaaaaagaactccgcaacccggggcgaccaccagcgaagcaggggcgccggagccacgggtcctcgggcgagaacaggggacagacgggaaggggacaatggggggaagcggcgctgggtggccttggccaccccccacaggggactgctaggctggccgctggctcggaccagacccccctccaccccttcccctcggtccccccaccccgctgccagccacccccccgtcccacttctaggccgggacccccgcctcggttctcacagcaccctccacgccccccacccgacccccatgcccggccctcgccccgcaacccccacccacgctcgccccgcacacacctcccgcgccgcgcccccgggaggaaagtgggggagggacgggacgcacctgagcgggcggagcggggggagggggcggccgagccacggggggaggggtcgagcgccggcccgcgcgcggcacctcccacttccggcggcacgagcggagggggcgaggctccggccgcgagaggagaggccgcggtggcgccgcgccgcccccgacggcgccctctggcggcgacagctggcgccgccggggcacggggatgctgcgggagacccctgagatacaagtggactctcccggggcgcggggaagaagggagagccgactgcgagaaggaaggcgacctgggtgggcaggatcccctctgggaagattacagggacagtcggggccatggcggtcagaaggagaagagcaacgagtggcttttaaaggtcggaaccgaaatgccctttacagaggacgccatgaaggagagccttctgaagagggaccatgtggaagatgccccgaggactcggggaggcggagcccgcgggttcagcccccagcgcccgcacggcccctgcctgcgtaggccgcccgcgggagccggaccccgggcgccggttgctgtggcccgcgggggtcgccgggccgcaggcgccgcgctgattggctgcgccgcgggcggaagtgatgctgctgtcactgctcctccggctcccgggaagccgcgagtttccgcagggaggcggcggcagctgcggcggggccggtgagttgggaactaggtgtggggctggacctgggtggtcagggggccccagaagtgggggaagccggcgtctgaggatgagggagctgcacagagggtgcctgaggtcctggcgtgggggaccaaggaga

SEQ ID NO: 8375 - DNA, 2300 bp, Homo sapien
cctctgtctcctgggcttaagtgatcttcccacctcagcctcccaagtagctgggaacacaggtgtgtgccactatgcctggctcattttttgtatttttggtagagacggggttttgtcatgttgcccaggctggtcttgaactccagactcaagaaatccacccgccttggcctccgaaaggaggcctttttatttcagttaactcaaaaataaaattaaagtttgagccatccatgcccggctcaaactttaattttatttttgagttaattgaaataaaaaggcaaggcggggtgtggtggctcacacctgtaatcccaacactttgagaggttgaggcgggtggatcagttgggtccaggagttcgaaccagcctgggcaacatggcaaaatcccatctttaccaaaaatacaaaaaatgagccgggcgtggtggtgtgcacctgtggtcccagctacatgggaggctgaggtgggaggatcgcttaaacccaggaggcagaggttgcagtgagccgaaattgtgccactgcactccagcctgagtgacagaacgataccctgtctcaaaaaaagtattaatactcatagacttttttttttttttgagacggagtctcgctctgtcacccaggctggagtgcaatggcacaatctcggctcactgcaagctccgcctcctggattcacgccattctcctgcctcagcctcccaagtagctgggactacaggcgcccgccactacgcccggctaattttttgtattttttttaatagagacggggtttcaccatgttagccaggatggtctcgatctcctgacctcatgatccacctgcctcggccccccaaagtgctgggattacaggcgtgagccactgcgccagaccactcatagacttttaataaagaatgttcggataaattagatacatccatatgttatgcagctatttttgaattagatcgatacttattgacaatacattcatgtcaagtaaaagaaatcagaatgcaaaataatgtatgtaaaatgaccccatttaaaaataacaacaacaacaacaacaaagaaatgcatacctaagtatacatgtctttgtgtgagcatagagaaagatgtgaaagcataatacaaagcagttaacacattgattactcttatgggtggaagtggtatgaagtgggggagtgactctttatcacctttgtattattttactttttttttgatactggatcttgttttgttgcccagactggagtgtagtgggtacaatcaaggctcaccgtatctttgactttctgggctcgagctatccttccacctcagcctctcgagtatctggactacaggcatgtgccaccacacctggctaattttttttattttttgtgagacaagatctctgtatgttgcctaggctggactcgaactcccggacacagtgatcctcctgccttgggttcccaaagtacaaggattataggcatgagctactgtgcctggcctgtttgacttcttatttaaaaaaaaaaaaaagtgtgcgtttgtacatatgtatatctgtgtgtatatgtgtgtgtgtatatatgtatgtatttgttgttgttaaagagtaaaacaaacaaaacccatacataataaagtagaatcacaacaaaatgaaacaagacaatatttgttggatgtaacagaccctccctggtacaagaacacctttctcagcattcttgacaggtgttcattcagcctttatttgaacaccagtaatgaagagcttactgcttcacaaggcagtatatttcatttttgaacaattgcgattgctagaaattatttttcctgttgagttgaaatctgcattactataactttctcctttaggtctgaatactggcttttggagctactcatcaaccacattctttcaattcaatttgaattcactaaagtcaatacgtgaatttgtgatagttgaaaataacctttgcatcaaaagaactaacttattttcttttttatttgtgtgcgactgtaattgtgtggaactcaggagatattaaaggctattcaggatgtgacaataaagcgggaagaaacaaagaagaagatagagaaagagaagaaggagtttttgcagaaggagcaggatctgaaagctgaaattgagaagctttgtgagaagggcagaaggtaactgatgttaagaataaaaaccctgtgtgtatgtatatatgcatgaggggccagacccgtttgtatttgtagtttctttcccttcggtttaattt

SEQ ID NO: 8376 - DNA, 2300 bp, Homo sapien
cttttttttttgttgttgagacagggtctctgtcgcccaggctggagtgcagtggcatggtctcagttcactgcaacctccacctcccagggtcaagtgagtctcatgcctcagcctcctgagtagctgggactacaggcatgtgccaccatgtccagctaatttttgtatttttagtagagacagagtttcgtcctgttggccaggctggtctcaaactcctcacctcaggtgatccacctgcctcagcctcccatagtgctgggattacaggggtaagccactgcaccttgcccaagctcccattctttctgtaacctcaagatggtataaaatcatcaaccatctggctatctctttgacttcctatatttttttgactcccttgcatattagttcttctactaatctgccttttttcagttggtttttcagcagacctgcagagggcacaggggaagtgttcctttggcccctgcagcaccacaggaccccaggtcctgtctgtggtcgtggtggtaacgggtgccagcctggaccagtcctgcatcgtggagcttcactctggacattctaaggggcagactgtggctggggcgtgagggataataaaggtggtgtgaccgaagcctcctgtctatactgtcttttctctcccctttctctgacagctcaacatcctggtggatacaggcagcagtaactttgcagtgggtgctgccccccaccccttcctgcatcgctactaccagaggcagctgtgagtcctggggagagcccgggggaagtaccttttccaaggatccagggctaagaagggtcaggggaggggtacagagagaaagagttgatcctcagattttcttcttgccagggaaggggaagggcgaaaaaaagacagtgaccaggagagacagggtgaagtgggtggtgagaggagctataccatgggaaagggtgaattgagaggtagccaggaagtgcttcagtgctgagacagggcagcctcctgtgggagggaaaggaagaagagcccatagctcacagaacaatcttagggggcccattttctctgcctgaatggggagacgaaaaccccacatcccctcggtgtctctcagttctctaacaccagctaagtctaagctgaacaggcctcagtgacggctccccttgctgtgttcttacccaggggccactctaggtggctttgcatagtccaaggacatgaaggaaagggtctttcataaacccctctgcctagaccagtatcagaactgaaagctgaaatatctcctccatgcaccacccagggtgccaccagttggattcagcttactggtgaaaggggggttgaagaggactggtgaaagtgggggactggtgaaaggggggttgaagtgggctttaagataagaggcagtgaggggtaatctggaagcccccttagcataaaagcaggaagaagaagggatgagaggacaccaatatctgagacatcagtgtgtgcaaacgtgagtagaggcttaaatcctatccttggacttgtaggcagctgcaaaacgcaccttccctgtttcctctaatgtcccaatctaaaagaagcagtcagggaggagggtgcaggtaggatcgatgaaagggcattcactccagttcctcgttccagttccatcactgcccccaccacacacagaagccctggttagtggtgtgattaaacacaggtggggctgccacatgttgagcacgtttcacagaagtggtgtgtaataccaacctgcttttctgagatgcttgaacaaaccccttctctagaacttgctgtagaggttccacattcaccctgcctggcactttctctaccactcggatggtaccactaggttccaaggcagtaagagagtcaatggttccttttctcggggagcttgacggagccagagggcggaagagatgcccactagctgtccctgcagcagcagcagcagcaggcacaatgcacaaagcccaggcttgttcttcacagggcctgagctcaagatctaggaatatgagcaatagataggagagcaagcctcaccaatggttcccttcatctatctgcaagcccactttacactctgttctgggtggtgagtctagggatgttttgctgagcagcctgaaagcagactctaggattcccctgagatgagataaggtggtgtttgggagtaagtttaacttagatccttataccagttgtggttatgcatccacagatctctgccttctttccacaggtccagcacataccg

SEQ ID NO: 8377 - DNA, 2300 bp, Homo sapien
gttttaaatatttaagtcatcaaatccatccagtttttgggtttgtttaccttctagggtttgttagggaggtcttcttcaatataagatcatgaaaatattctatttttcctgtagttttattttaatgttaaattctttaatctatctggagtttattttcagaggaatgaaattggatttggttttttttccttccaaatgggctgccagacgtcccaacaacagtttttgaataatgcgtccattttcctctaatacgaatgccatctctatcatatctacaattcccatagatacatttctctattttgatttcgatttttttaacttgtgtctaatcatcttattgattagggttttctatccatatcatataatctgcaactaatgattcctttgctttccaacatatataacactttttccattttcttgtcttttgagtcaatcagaccggtctgaaccgtgtaggataagagtagagataatgatcggccgggcgcggtggctcacgcctgtaatcccagcactttgggaggccgaggcgggaggatcacgaggtcaggagatcgagaccatcttggctaacacggtgaaaccccgtctctactaaaaatacaaaaaattagcggggcgtggttgcaggcgcctgtagtcccagctattcgggaggctgaggcaggagaatagcctgaacccgggaggcagagcttgcagtgagctgagatcccaccactgcactccagcctgggcgacaaagcgagacgccttctcaaaaaaaaaaaaaaaaagagtagagataatgatctttcctttccaaagcctgcctttaatgggagtaacgtagcctgttattactacatttgttgttgttgtcgttatcttgtttaaaaagtttcctggctgggtacagtggtccatgcctataatcccagcattttgggaggccgacgtgggcggatcacttgaggccaggagttcgagaccagcctggccaacatggtgaaatcccatctctactaaaaatacaaaaattagctgggtatggtggcgcatgcttgtaatcccagctactcagaggctgaggcatgagaactgcttgaacccgggaggcggaggttgcagacttgagaccatgccactgcactccagcctgggtgacagagcaagtctccttttcaaaagaaaaatgaagattccctttcattttttaaaaaaattaaatcagagtaactgctgaattttatcaatggctttccacatttgataaacaatatattgttaaaaccataccggcttttctcctttaagctattagaactctaacgcttttggttcaaggctttaagctcttaccagttaatatagagatacttttcggagtgttaacactttaaagctatcaacagccatttctcctcagtctggctgatggtgcagaaaatcagaggagccataaggattcaagtagagcctcaagggcacaaacaggttcagatgggagaagacccactggctcttacctgcccgcagatcgcaggcgcaggagaaaataagacaactgcactttccccttttggaccctgctccgctggtttgcagcctggaaaaactcttcctcccctttcatcctgctccctcaatctctgctcgtgaaaatcctacccatttttaaacgctcaaattaaataccaccttctcccactgagtcttcccagatcccctagatgtccctccaaatccctactccttaatgccacatcgtatagtgtgaaaccccaccgcggcaggaatcacttaactgtcccgtgtagaatcaccgtttatttctctctgtatctccagcgcctggcagtgtgcctggcatacagtgggtgctccttccatgctgaaagaaagactgacagacgggaggtgtgcccctctccatccgtctggcccttcccgccagggccttgcagggcggactccacctcggcagagggcatcccagacccctctccagccccggaagccggattgcctgccatgggaagactacacttcccagcgatcccagggaaaagcgaaaaccttttggctttgacagccgccgccacaagtctttccgcctccccagcccgcccgggagctgcgagccgcgagctggattatggtggcctgagcagccaacgcagccgcaggagcccggagcccttgcccctgcccgcgccgccgcccgccggggggaccagggaagccgccaccggcccgccatgcccgcccctcccagccccgccgggagcccgcgcccgctg

SEQ ID NO: 8378 - DNA, 2300 bp, Homo sapien
gtgtgtactatggcaaaaccttggattcaaaacaaatgaagctgggtgtgatagttcacgcctgtaatccaagccacttgggagtctgaggtgggaggatcgcttgtggccaggagttcaagaccagcctggagacagagcaagaccccatctctttaagcaaaaccaaaaataatcatcaagcctgtaatcctagcactttgggaggccgaggtgggtggatcacctgaggtcaggagtttgagaccagcctggccaacatggtgaaatcctgtctctactaaaaatacaaaaaaattagccaggcatggtggtgggtgcccataatcacagctacttgggaggctgaggcaggagaatcgcttgaacccgggaggtggaggttgcagtgagccgagattgcaccactgcactccagcctgggtgacagagcaagactgtctcaaaaaaaaaaatttagctaggtgtgatggcacatgcctgtaatcccagctacttgggaggttgaggcaggagaatcgcttgaacctgggagatagaggttgcagtgagccgagattgcgccactgccctccagtcgggtgacagtgagaatcggtctcaaaaaaaaaaaaaaaattaaatagggaacaagacatttgttcaatgaaatcctaagtaaccattaaaaacaatgggatagcttcttataaactggccttccaggctggagtgcagtggcacagtcttggctcactaaaacctccacctcccaggttcaagcaattctctgcctcagcctcctgagtagctgggattacaggcgtgtgccaccatgtctggctaatttttgtatttttagtagagatggggttttgccatgttggccagcctggctaatttttgtgtttttagtagagatggggtttcaccacgttgggcaattctctgcctcagcctcctgagtagctgggattacaggcgtgtgccaccatgtctggctaatttttgtatttttagtagagatggggttttgccatgttggccagcctggctaatttttgtgtttttagtagagatggggtttcaccacgttggccagactggtctcgaactcctgacctcgtgatccacctgcctcggcctcccaaagtgctgggattacaggtgtgagccaccgcgcccggcctgtttatgacaagttaaagaaagcatgtcaggggcctgacgtggtggctcacacctggaatcccagcactttgggaggccaaggcgcgtgaatcaggagttcagggccaacctggccaagatggtgaaaccctgtctctactaaaaatacaaaaattagctgggcgtggtggcggatgcctggaatcccagttactcgggaggctgaggcagagaattgtttgaacccgggaggcggaggttgcagtgagccaagatcatgccaatgcactgtagcctgggtgacagagtgagactacgtatcaaaaaaaaaaaaaaagcacatgttagaacaataacattatgatctcatttctgtaaaaattaaaaagaatgggctgtgcatatatgcataaatatgtaggtatatacatttacatctgcataagcataaaaaaatatggaagatagcacccacagtgtcaacagtggtttcctttgaagtgtagggtttaatttcttccttagtttgctcattcattcattcagtaaatgtacactgagtgcctactacacgctaagcactattttaggcactgaggatacaatgatatgtaaaatccctgtcctcatggagcttacactctaatgcaggaagacagacagtaaagaaataaaattatagtatcttggatggtgatatgtgctatagagaaaaataaaatagagaaaggagatgggagggcggtttgcagtttcaaataaagtggattgaaagtgtagagggaacattttatatctttgtatccttaaataattggtaggattatcaagtgttttcctttcttatcatgtgagtagttttctgtatagcccaaataaacagtataaaaaagagaataaaaagttatttttttcccagaattaaaatgcttgtttatttatttgtatttagagatggggtcttgctctgtcactcaggctgcagtgcagtggcatgatcatggctcactacagccttgacctcctgtgctcaagtgacccttccacatcagcctctgtagatgagactacaggtacacaccatcaagcctggttaaatttttgggtttttttttaagagattgggtctcactatattgcccaggctggtc

SEQ ID NO: 8379 - DNA, 2300 bp, Homo sapien
ataggcataactgctgcagaaggatttaaatttaaacatgatgacgtcaatctaaataacagagagggaaactccaaaagaaaatgatatttatttagaagtagcattgcaataggtatacacatgccatagaggctgggcaagtaggaccttttttttttttttttttttttgagacggagtgtcgctcttgttgcccaggctggagtgcaatgtcgagaccttggcttaccacagactccgcctcctgggttcaagcgattctcctctctcagcctcccgagtagctgggattacaggcatgcaccaccatgcctggctaattttgtattttttagtagagatggggtttctccatgttgatcaggttggtctttaactcctgacctcaggtgatccacctgccttggcctcccaaagttctgggattccaggcatgagccactgtgcctggctcaagtaggaatttttattttatttatttttttagacggagtcttgctctgtcacccaggctggactggagtgcagtggcttgatctgggctcattgcaacctccacctcccgggtttaagtgcctcagcctcctgcctcagcctcctgagcagctgggactacaggcgtgtgccaccatgcccagctaatttttgtatttttagtagagacggggtttcatcatattggccaggctggtctcgaactcctgaccttaggtgatccacccgccttggcctcccaaagtgctgggattacaggtgtgagccactgtgcctggcaaagtgctaggattacagatatgagccaccaggcccggtcgatagtttttgttatcaggtattcatgcgtgagaaccctctcttcatggtcttccctggctccatttgtcagggttttaaaacaaatgactctattttgattttgataattttcacaaggaatatgctctgtatattccaacaatctgagtttctcatcctggaatcagcctctgagtggcactgggactatcctgagtcagctacatctctagaacctatcaggagcggctctatgagcttggcctcatcattttcctcctcaactagcagcatctgtatttgtctgtttctcagttttcctattgatgtaatggccagaactttctttgcccctcttaacttctctaggaggttggagacatatgagagaaaggaagatttgccctccgtgcaagcaaaactaaaactcttcggaattatattagtagcaacctttctgcccgacagggtgtgtggaggagctacacattgtgtcactttttttcttcttcaatagactctttgaaatagttatgacagacattactatccccatcttgcagacatacaaactgaaccctgggctttggtgaaaagatggatagtagaaaataggtttaactcctggtcaggtgctcactggtttaataggagcacaggagagccagtttttttgcggggagagatggggagtggacgcgtctccattaccttacattcacatttgttttgttgattaaagtaacaatgggttgattattgatgaccactgtattattcacctgatgttaatcatactcctaacaaatgatcaattagataattagataattcacattagtataaatactctaaatagtccttctctgtcctggcagaaatcctcacgtctaaactcggggtcctcttttttttttttttttttttttagtagagaaggggtttcaccatgttggtcaggctggtctcgaactcctgacctcaggtgacccacccgcctcggcctcccaaattgctggaattacaggcgtgagccaccgcgcccagccgatgaggttctctttcaacctcttgcggattcccattatctatcttaaactacactctttcaacctcttgcggattcccattatctatcttaaactacactcccatcgtgcaacggaaaacggacagagctcctgcgtgcaccgaagggacttcgagccaatccattgtcacagctctcagccggcgacctattggctcctgctggaggcgggactcccggttgctaggcggtaccttttccggaagtgtttgttgcgcgctgcagggcaacaccccggcgtccctggaagctgggggagcgggtgggtgttgggtggcgttgggggagctgcgcctcgcccagagcctcgcccggagcctcgcccggagccttccggggtgggggatagttgaggacctcatcgagggaggggttgggcggcggggaagggagcgagcgtggcgggggaccc

SEQ ID NO: 8380 - DNA, 2300 bp, Homo sapien
gttcctttggtagacaatgctagactgagttttcaagtctcgggtcatttgttatgcttctcttcgcgccctgttaaaaaatttccgggtgtccttggtaaggttggtggacttttcttcttctccttcttcttcttcttcttcttttttttttttgagacagcatcttgctttgttgcccaggctggagtgcagtggcacgatcttggatcactgcaacctccgccccctgggttcaagcaattctcgtccctcagccttccgaggagcagggactacaggcgcccaccaccgtgcccggctaattttttgtatttttagtagacatggggtttcaccatgatggccaggctggtctcgaactcctgacctcaagtgatccgcccgccgcagcctcctaaagtgctgggattacaggtgtgagccaccacacacggctcaaggttggtgcattttataaaactaatcaatcacagaatctgagagctggatagtatcttagggataatctggttggcgagtttcagactgtagtttgtggtagagccctgttttcaagtcagttcctctatagaggtccagcttataaaaaaagaaatggagcttctttggttgaacttggcagtgtgggtctttgtgacgcctcttctctgtcacatgcacaatatagtaccccgaggtactgaacttcccaggttccatggagcaaggtttgcaaaccattgatctagtcgaacctcctctttgtagataaggaaactggagcctagaaaacaacatattttcagcccaagggagtttttatcttttcttccctcttcagtttgtgttttacttcattttttagttttttaattttttaaattattatttttttttgctattgattttatttatttatttatttatttatttattatttattatactttaagttttagggtttaaatagagggtgggtttttgctgagggcttgcccagggctgaggtagcaagtgtaaatcagaagtgctttgtcttcgttttctctgcatgtttatatacccatctaggaaacgcagcctgaggagggacttctgcctccttcatcctttctctgcagcttgtctcctccgtcagcacctgggcttgctgatctggacctagatcaagagatgcaggctataagtgagggatcctataacaaaggaaagagcccaggcatgctgggtgacactccctggcgtttcatgggtgcccttcccagaaagctgcagccactctccaaaggccaaccttcccaaatccaccaggtctttgctgacatggagaaaatcttaggcagggccccagcccaatgcaggagagaattaggtgatcagcagggtctggagaaactccagaaggcgacagagaaaatctacctggggttttcagatcctgaaacagaagagctggaaatgagaagcaggcagcagaaactgggcactccagcccctcagaacactgggcttctccaaaatatgcaggatgtggtagaaagcaggaaccaggcctctgtccactcaaagctttctgaagccatcaaaggcctgccactgaaaggggagcagcacagccacagcttagccaaactgagccccactggccctggaggggacaagggccaaagccccattcccatgtcatcccctgaggaggagccctccctgtcctcttgttcttccggccacatgttgcctgccaggaagagcaagttgttgttagatagcagccctactgaagacctgagctggcagggagttcctggggaaggtgggagcataggcagcgggaggaggaggagagaacctcctggactgtggatggaacaggtctccaagcttgtcaataaggatatcccaggaagctgcaaggaaacagagcccagtgaccctgaggctctaggggcctcagctgaagatctacctcagggtctcttgctaataccacctgaaaccctggcatcagaaccagctcagaatccccttttagggagggctcccgaggagcctcctgccagtgagaagagacaggccctagggtctgcagagctcccttataaagatcagaagcctagcttgtctgggcctgacttggagagcagcagcagcagcagcagcaacagcaacctggcctcacacctgggctctcctgtcctggatgaggtgaacaacttcccttggaacctgcagagctcacggggatctgaggagggtatggctcagtcagactcgggtctcagagatcaacacttcagccccttcttagatcctcacat

SEQ ID NO: 8381 - DNA, 2300 bp, Homo sapien
cccagttcatgttcctcttgggggcctggctcctttacgaggtcttgtggataccccaccctctgctcttcgtggatctcaaagcgtgagcctggggagctcagtggagtctggacgtcagcttggagaactcatgctggtaagtacgttctcttgcgttcagtgtctgtagttcctgtggggcctcccgtgtgccataccaggaactatggcctaggggtgagaaatagacagaatcggtggagtcctcagagttcgtaatccagttgggaaaatgtaattcgcacctgtatgaatgtggactctgggctgtggaggatagacccatgctgtagggacatcagtgctgatttccaagtctctgcagccaaggcagtaggagtaggcaaagggagtcattgatgtgagctgcagtcgccaggtcagcttcatggacatggtggcacttgatctgggagacattgacatagagagtggggaggagcattctaaaggtcattccaaaggtcttccaagtgagtcctttgactgtccttctctattttgaagccttcacagggtctcaagacctctgcttatacaaagggtctcttgggctccatatatgaggacaagactgctctcagcctcttgggtttaggagaagaaaccaatgaggaggatgaggaggaaagtgacaaccaggtaatgatgaagtcctctccctggcctggaaaccctctgtgccatattttttccttttgaaaatgtttttgctgtgatagaaaaaatatgtaacataaaatttgcccttttaaccattttaaagttaaaattcagtggtattaattaccttcacaatgtgtgcacccaacaccactatccatttctttttttttctgcactcccccgccgccactattcatttctagaacttgttcatcatcccaaatagaaactgtgtacctattgaatgataacttcctattccctctccctccatccctggaaacctaatctgcttactgtgtctatgaatttacctattctaggtacttcatataagtggaattatacaatgtttgtccttttgtgtctggcttatttcacttagcataatgtttcaagcttcatctatgttgtagcatgtattagaactttggtcctttttaaggctgaataatattccatggtatggatatgccacattttgtttatctactcatctgtcgatgaatatatatgggttgtttccacctttggctgatctctgtgctactttttaaaaaagcaagaagtttttttggcctacagcttcatttcttgagcagtctattatgtcttctagatctgatccagaaagtacagccagcagaaagcaccttggccacttgcttgttgcacagcatagtttgcgctggatggagagccgtttagtgaggctgcctcagtggtggtcctgctctgagtcctctgaagccctgcctgggcccgcctgtcagctcagcagtgccccacttttccctctgcacacccctcaccctgggttgaccagtttcttcagagttaccacttgtcatcatttttgtttctagagtgtccacagctcaagtgagcctcttaggaacctacacctggacattggggcactggggggtgactttgagtatgaggtaagagccctaatccctacaggcacatgtgtcagcctggcatatccctcctgtttttattaagccctgctactttgttgtaatgcatatttggaaaaagaaccattttgtcccagtccttccagatgagatttctggggtttggggaaggacaagaataaatgaatggattcctgtcccttccagaccctgcctctaaacaaacaaacatcaacactcattatgttattgtaatacctaaaacctccaatgcttttttttttttttttttttttttttttaagagacagagcctcactcttttgcccagcttggagtacagtggtgtgaacagagctcactgctttgaattcctgggttcaagtgatcctctgcctcagcctcctgagtagttaggactacaggcatacgcacccatgcctgtctactttttacattttttgcagagatgaggtctctctgttgaccagactggtttcaaactcccggtctcaagcagtccttccatcttggtctcccaaagtgctggaattacaggtgtgagccattgtgcccagctatgtgtttttgtacttagaaaggagctttccctaccatgtatcctttgtttagtgtccagtgtattcatttaaatataacatttctcta

SEQ ID NO: 8382 - DNA, 2300 bp, Homo sapien
gcagtcccatgatgaaatttgccatatcccttcccccaaccaattatgaccttgctgaagaatagtgataatttatcagtgacctctcattccttacagaggaaaagttgtatatggtggagccatagggagagccagaaagggaatctgtcgtggtgtctgaccagcctctgcttcagctctagagggctgcaggcttgctggggccagggccggtgctgtgcttgtaaccctcctcttctccaagagctggctttagggagccgatggtgtccctgatcttactgatgcaaggctgcagggctaggggagctgtgatttttgtggtagaaggggctgccgcagcttcccaccggtgggcccaccctccttgcaggagaggaagcagcgggctgagcttctggggcacctgaccggagagctggagcgcctgcagagggcccatgaacgagaactggagactgtgaggcaggagcaacacaagcgtcttgaggacttgcggcgccggcacagggagcaggtgaggggcctggggcagggtgagcccactgtgacccctccatgcacagtaggaaggtgctgggagcagacgcatggccccagcaggatgcagcctgacagcttctggagtgagagtctctcactggccatctccaagctggggcatccttgttactttgttttctgggccagggaacacactcaggattagaactagaggtcagcccctgtaaggcattggggttggcacctttgcgtctccttgccccagcaggaagtaaacaaggtgtggagccttcctgggaggctgcaggggcacacagcgaggaagcctgagcccagagtggaggttgtggtgtggcatggtgggttctggaaccccctcctgcccctcagctaatgccttacactctttctatgcttatgtgtttccctttctgggcaggaaaggaagctccaggatttagagttggaccttgaaaccagagctaaagatgtcaaggccagattggctctgctggaggtccaggtgagggatctgcaggagtccttgacctcagagtcatagcttctctagcagagggcaggctctgcccctcagacctggggtctgcagtcagccagaaaatcctgtctcttccctgcaaggaggagaccgcccggagggagaagcagcagctgcttgatgtgcagaggcaggttgctctgaagagtgaggtttgtctccctgttttgtcctccctcctgttcttcctccatttcctgtctttcttctccctgttccccacattttgttcatctgatctgtccagggcactggggttccaaactctgttggccagtattccacaaatagtgccactctgtggaccccacttgggaacctcaagggagtgggactgtggtaggacaggagcctgcagacctcttgacctcagaggtggtgacttcagtggctctgaattcattcccagcctgtcctcctttggcttccctaccctctcgtgctgtctgctccctggcttctctctgtgctgtctctgggtgcttctatctttccttttgcccctaggaagccacagccacccatcagcagctggaggaggcacagaaggagcacacccacctgttgcagtcaaaccagcagctccgagaaattcttgatgagctgcaggcccgcaagctgaagctggagtcccaagtggatctgctgcaggctcagagccagcaactgcagaaacacttcaggtggcgtgggcaccctgcacttagccctgctggctgcctcctgcctgccctctgacctctgctgcttgtgtcatggcccagttaatagggagaggtggagtcccagcttgggagctaggcagaagagcctgtggctacattttgtagggagttggggttgttaagattctgtgaaaagcaggggatctctggtgctattgttcgtgcctgagcccttcctcagggactttgacggatgggagtgagggggtggagatggttctgacccacttcacccctcccccccatcgccagccgctgccctgcctctcactcatctttccttccacagcagcctggaggctgaagctcaaaagaagcagcacctgttgagagaagtgacagttgaggaaaataatgcttccccacattttgagccagatctccatattgaggacctgaggaaatcccttggaacagtgagctgggggctggggcctgggggctggggcaccaggatggtgtggggcattgggaggggctgggcatcaggggagtacttccagagggga

SEQ ID NO: 8383 - DNA, 2300 bp, Homo sapien
aaatggttttgatatcctagcgtcttcaccccacacaccctcttcctctttttttctttttttttttttttttttttttttagttaatgaaatgtgtgaacagtttgttcccagctaaaaacaagcgctgatgggtttcatacctttctgtgtaggaggaagaggtaggttctgagcaaggcactggctggcagtgggagaggccactggtgggaggtgaggtggggagaaagaaggagaagggaaagatccatacaaaacatcacgtgtgatctgtccctcttttgctctccctgtgcacaaaccctgctggggtccctgtgattggcacatgggcacagggacttgggaaggctccaccctttgggaagtgagtcagtacatccatgggtcaggagaaagggactgatgcttggaatggcagtagtgggaggtagaatcctcctaagagtttattccttgttatccatctccagggagaaagaaaggcaaggtattgataagaaaatcactacttcctggcttgaggatgacaacagcacacatatatctgcctgcatttgtgcacatacgtgtctatgtgtaccacccttctgtgtccttgaaagaaggtattgggaccctgggtgggggtgatgacaggagacagccagctgtgtgataaaattatgacagctaacatttattccatactgcctatgagccaggagttttaaggacactgctcacttataaaaatgtgtactgtatttctcccacattgtatatgaggaaactgaggcttagagaggttgagtcacttgcccaaagtcacacatccttcaagtagtagtgaatccattatatgagcccaggcatttggcccgagaggctacaagctcgacccctctgctctacaggaaaaagcctggaagcagaaggcctcttttatccaccagctgtgtgaccttgggttggtcactcacctctctgagcttccatctcctacagggttataaggagactcgaatatggagctgcatgtcgttgagctttgcaaactttgaagtgatgtcgagaaactcgcagatgactgaactcggctctcctctgcatgttccagagagactagcagatcactttacacgcagtaggtcttgtgctcttagccttttcaacttagaggcgtgcagtccagtttaccactgacctagagaaaagatgcaggctgggacgtcctgggaccaaccgtgctctgtcttctgtgctattttccttatcgctcagttgttggcactccctcttttcagacctcatccctcatcccatcacattttatgacactgcaggtgtctttataagctgcctctaattcctattggagcagggtaagatacaaattagtcaaacaaataaataacagtggttgttcaataaatacttcctggttggtggaatgaaggtataactaaaggtgaatgaatgaatgaatggatgaatgagtgaaactggccaggaaaggggcaagtcctctgtggaggagcagagggacattatggtgtaaagtgggacagatctgggtctgatttctctttcagctgtttaataacaatgtgatcttggacaagtcacctggtctcttcgggcctcagtttcctcatcagtagaatgggagccaggagacagcaggctcagggcagttctctcccttccttcctccctccagccagcctctggccttcacagtttttcctgagagagtcatgtacctgtctctgtcacctccagacttggggacatggaacatattctctccaggcttggctgggagcgaggggtaagtttcacctaccagctgtccctcccttggaagaatccttttccagcctttatgcatgggctggagggggtgtcaagtcagggtgcaggatgtccaggtgtagcaggagccagcacctctcagtagaatgtaggagttcttttcacctattgtcctcaagaatttggcttcaactgaaattcagagacatacagaaaagcctcatttacctctctcctggatgggccatgggagaggtggcatctggaagaaggatgggcaggaactcttctaggtgaggtaggggaagaagcacagaggcacggtcaggcagaggggaatgagtggctcatgggagggtgtcttcaggttcaagttcatggctggagcaggtgggaaggagggaaggcagcagtgatgaagaggtttctggacagggctggacaggcagcggaggccagacgggtggcctcattcacctccccaaggaagatgagctgca

SEQ ID NO: 8384 - DNA, 2300 bp, Homo sapien
agctgtgccgctaccccaggcccactcagatcccctcccagcagacagcagcccctttcatcctgtctgccttagcggtttattttaggcatgacctgaccaggtgctctgggtcaataggcttagttttaaataactggattcctctcaatgaccgttccctttagaagggagggggcatggtagaagaataagccagcaggctgagggcggtgagagatgggagctaagacagaagactggaaacgtgagggctctgtcactccctgcgtgacctcggggaaggctcatggcttccccactctgggcctcagtttccttatctgtaaagcaaaagatcggtctgggtcatctcaaacaccccctgcagtctgtccccccgtctctgttctatgcctgtgtttccagatgacaaaacacctcctgcaaattgtttcagggtggtgattttgcatgaagagctgagccaccgagggatgctgcagcttatagagcaagctctgctctggagtcgggaggcctgggttctagtcttgcttctgatacaaccttggtggccttgaacaagttaagccccgattttctcacccgtttaaaggacgaaccttgaaaacattatgctgagtgaagtaagccaagcacaaaaggatacatactttatgatctcacttatgaggtacctagaataagcaacttcatagagacaaagtagaatagtggttgccaggagctgggggaggggaggggaagggggagttattatttaatgggtgcaggattctgtttgggatgatgaaaaagttttggaaatggtaagtgatgatggttgcacatcgtgaatgtatttaatgccacagaatagtacacttcaaatggttgaaatggtaaattttatgttatgtacattttaacatattaaaaaacacacttttcaaaatttagttaaaatttctagggatattttggcaaaacctgggagtgaggagtcccaattctcccatgtgaacttaggccgcacatttcgaggaagtaaattttcttcctctggcaaatgcagctagccagtggaccccttctctccctccaaacttcgcactccacaccttagagtctgcccaggtacagcccaattgtcagggcatactcaaagcagcttccatgaccctgcaaagggagctacagtcctggctcataggccattctcagggatacctggatcccttctctgggttctatgtatcctcttattttggaattaagacgaaaggagggctttccaaccatattgaccttttacagcagacctggctcagccatgcctgagtccccagtgcctgagccagtgcctgacacagcaggtgctcaacattcatttggtcactgagaagacgccctcactccagtcctattctatgccaacttcataaagatgagtgtaaggaataagccaatttctgtcaggcaggaaagctataggggtgggtaggtgaagacaaaggaggaagataacacaggtagcgtagacattaaactgctcattgtgaataaccgtttaaatagtcacaatgtgccaagtgctgaggaaaattcgaacagcgtgccagggggtggctggactcatctggggttctccggagggcaggcttgcggaagtcacgaggggttggaagggcagctatgaactttggggtggggagtagcaccagacagcactgaaaagcctgggattctacccagagcgtccatgctcctcctggggagggtgggggggccgggtaagctgagtccgaaagaggcaggaagctcgtgtcccaggtgacttaggccagtagaaaccgggcgtccttggctgaagcatggcaggctgttggcacatggatgacacatgcctgtctgcgaccacaggctccaagccggtgggtgacagggacccctcgcctctcagacagcggagccgggtcggggcggtctggcccgggccgccgctcctgttcctgggcttgtggggctggggtccgtctgggctccgggctcgcgcggcgctcaccacccggggtgccgcgggggggcggggagagcggccgcctagcccagccccgcggatgacaggagccggggagccgaggagggaggagccgccgccgcagccgagcgctgggctgaggagcagagagagcggggcgccgagtgcgggcggctgggagcgcgctgagcgggggagaggcgctgccgcacggccggccacaggaccacctccccggagaatagggcctctttatggcatgtggctggtaactttc

SEQ ID NO: 8385 - DNA, 2300 bp, Homo sapien
ctttccactcttggggccacctatttggagggttggttaattccagggcctggggccagggaacagatggtgagagtgagaccactgtcacacttgctccagcccccgtccatgcaggcagggacccacccagggcagcctcagcctgagatgcttccaggtcgctccacctagtgcggactcctaatgtgcccgactcctaatgcccatgccccctttgctgtgagtccaaggccatggccatgcagggaggcctctgggaccttctgcactcaggaaggagcccaactttcctctccctcccttcactcagaggcctcgaaggctggagggattgtgggattctggcaccacctagcgtctggcttcctcatctgggcctgcaagcttttgagggaggagaggggagaactggcaggagaaccaagctacaggaccaggaaatgaacagggtgtgtttgggggccagaggcaggatagacctcactccacttgggaattaagctctttgtcttaatccactgcccccagtccctgataaccaccaactctcctagaaacacagaaggcttgagcagggaagggtccttagagagcaaaacagaccgtcttcaatttacagaaggggaaaccgaggctctaagagaggccgtggcttatccagagtgacatggccagcctgagtcggagccagaggtaaactgcaggtctctggctccccttccagagctcttcccaccacacgaacatccaaaggacgggaagcggttggtggggcagggaggtggactacccactgactgcctgtgggtttggagagtgaaggggaaacagagaaggcctggggttgtggggagaaactccagaggagaccaggagccaggcaggggaaggccaggtgacttacaactcagcaccaagtccttgtgacaccccactccaaatgtggactcattggtgtaggccaaacccttaaatggaattcagttttctttgcaggagatagaggcacacacttgagctctccctcgagggtgggagaaatgaacttgaatggggcaggtctagccaggggggctttcaggaggagggaggctcccaaagcctcttggatgcagcagcaaggcaaacaggaagagggggtattcagacctgtggcccaccccaggagaagtaagagcactggagaagaatcacgtttctagaatgttctagaatgttccatacagaggacaatccagcctgccaccctcagagggaaattccacctgctctggatgagtcacttcccttcgctgaccctgcctcaaggcctccctccttgtgaaatgtgaggctttatcaggtctgaacctgaggggcttttcaaaccaccacgtacccagatttccccagcccggttgaatatgaggtttggggggtggcctctgcaggcggaggcttaacgagccccatggccccaggtggtgttcagaggcctgggacctgcttcctaaccaggactcttgtgaacatttcccttctctctccagaaaggtcacatgggctggcagttactgaactttcacttcactttgggattttccacaattcagacctgcattgagtcacaaagatctaccaagcctaggaaattattgggtgaattactcttaatcagacaactccgaccatgacagtcttcgtctgaggccgcaattccctttctgaccaccagagggagcacgtggcttgcgccgaatcccctccagctgtgtgttttcaactcaatctttccaagggcctttgccgggaggaggggctcctggctcctgaatggtccgcccggtgccgtgatttcctaggaaagccctcagctcttctcattccgcttgttcaccccccaggtacagcacttgccccactctggggtaattcttggctgtggggtcttaagtgctcattccttcccagaggcagagaccccacgtgatctacacatcttccccaactcctggggaacggcgacgcctctaaccctgtagtctgagtaaatcaacaacagcaggacatggggaggggcagagaagtcaagcagggacgtttgtagggtgggaggggaaagaggctttgcctcagtagctcttctcaaccccagctgccgtgagtctgattcaactgatggggcatcggtggttgttcagcctccccaggtgaactcgaagtggagcaaaaggtgacagtcacagcttagtaggtgagcatgtccaggtgagggtgaggggaacgcagccaggcggagcaggtgagggcccaaggga

SEQ ID NO: 8386 - DNA, 2300 bp, Homo sapien
agtaattcacccaataatttcctaggcttggtagatctttgtgactcaatgcaggtctgaattgtggaaaatcccaaagtgaagtgaaagttcagtaactgccagcccatgtgacctttctggagagagaagggaaatgttcacaagagtcctggttaggaagcaggtcccaggcctctgaacaccacctggggccatggggctcgttaagcctccgcctgcagaggccaccccccaaacctcatattcaaccgggctggggaaatctgggtacgtggtggtttgaaaagcccctcaggttcagacctgataaagcctcacatttcacaaggagggaggccttgaggcagggtcagcgaagggaagtgactcatccagagcaggtggaatttccctctgagggtggcaggctggattgtcctctgtatggaacattctagaacattctagaaacgtgattcttctccagtgctcttacttctcctggggtgggccacaggtctgaataccccctcttcctgtttgccttgctgctgcatccaagaggctttgggagcctccctcctcctgaaagcccccctggctagacctgccccattcaagttcatttctcccaccctcgagggagagctcaagtgtgtgcctctatctcctgcaaagaaaactgaattccatttaagggtttggcctacaccaatgagtccacatttggagtggggtgtcacaaggacttggtgctgagttgtaagtcacctggccttcccctgcctggctcctggtctcctctggagtttctccccacaaccccaggccttctctgtttccccttcactctccaaacccacaggcagtcagtgggtagtccacctccctgccccaccaaccgcttcccgtcctttggatgttcgtgtggtgggaagagctctggaaggggagccagagacctgcagtttacctctggctccgactcaggctggccatgtcactctggataagccacggcctctcttagagcctcggtttccccttctgtaaattgaagacggtctgttttgctctctaaggacccttccctgctcaagccttctgtgtttctaggagagttggtggttatcagggactgggggcagtggattaagacaaagagcttaattcccaagtggagtgaggtctatcctgcctctggcccccaaacacaccctgttcatttcctggtcctgtagcttggttctcctgccagttctcccctctcctccctcaaaagcttgcaggcccagatgaggaagccagacgctaggtggtgccagaatcccacaatccctccagccttcgaggcctctgagtgaagggagggagaggaaagttgggctccttcctgagtgcagaaggtcccagaggcctccctgcatggccatggccttggactcacagcaaagggggcatgggcattaggagtcgggcacattaggagtccgcactaggtggagcgacctggaagcatctcaggctgaggctgccctgggtgggtccctgcctgcatggacgggggctggagcaagtgtgacagtggtctcactctcaccatctgttccctggccccaggccctggaattaaccaaccctccaaataggtggccccaagagtggaaagaggtggcccgagcttagtaccaggagggggctgggaagagggctggctccttcaggacatgtgcagaggcccagcaccaggctccccggacccacccaccttggcccaggggggtacatatggaaaacggcagagcacaggaatgtgaccacacagaggcccatcttggtagcctggggcctctccacagcaactgctaagcagggtcgcttccaggaacccaacagtggtgcctggggcagaggcctcatgggtatccaatgggctgtggttttgacctctgggcctttcagacttcccaggtgtataaaagccaggctgaggcctctgtccccagggcttctgccagttcaaggggtgtgaggagtggcctacagatgacaacactgaacttcttgcttttacaggcagacaggtgcctgagcaattaattgaaaaaacaaatgagacccggctgtatttgtacttgagcttggagaggctggtggtgacagaggagggagacaggcaggcaggtgagggaagcagcggtctctgacgccggctttattataagcatgaggtggcacgaggcaggagttggcgatgccacctgggggtcacattgagtctggagcttccttcagcccaagcgctggcagtgacgggg

SEQ ID NO: 8387 - DNA, 2300 bp, Homo sapien
gggcagctgtgctgggggcaccatgatggcccagtctctgctgctactctcgatatgccaacagaccaccgtggatctgctccagtaaatatttgctgactgactgactgacttaggttcttaaatgcctatggtccagccttatataaagagagagaaggctgggcgtggtggctcatgcctgtaatgccggcatattaggaggccaaggcaggaggatctcttgagaccaggagtttaagaccagcctggtcaatacagtgagacccgatctatacaaaaaaaaatttttttaattagctgggcatggtgacatgtacctatagtcccagctacttgggaggctgaggcaggaggattacttgagcccaggagtttgaggctgcagtgagctacgatcccaccactgcactccagcctgggtgacagagtaagaccccgtctcaaaaaataaaataaaataaaatataaaataaaatagagacagtcaaacgtggcctccaagcctgaccctgcgatgatactggcaggagggaggtaggagagactggaagaattttgagtcttccagggtctccttggaaaattagtccatggaaacaaatctccttttctcttttcaaggcagaagattccgctgtgggggcaataagaagcgcaggtgagcgctgcctggggtgaccgatgagggggttggggctggagaaggaggggcgggctgaggattttgtctctgacacagtggaggatccccagcctcagagatccctagacccacccctccccctgccctctcacctgttgcttttccttcccccaccaggcaaatcaatgaagatgagccgtaacagcaggtatgctaggagggcctggggaaggtgcggggagggcagggcaggcttgggagcaacagggaagaattctggctcctggactcggtaaataagaattttagggtcgtccacacatcagccaggtggtctgtcacccatcgtgtgtttaaaatgatggccaagggcctggcgtggagtgtgtgccgcaggagatcacagaggagccctggagaaaagtgagatggacaagggggaagtaaaaccccaacctctgctgcctcccacccaaccccatcctgcctttgtcttctcagcctcggcggtgccacccactgcactggggccagctgggaagccaagcatggccctgcctctggcgcctccccttcttccctgggctttagacctttgtccccgtcactgccagcgcttgggctgaaggaagctccagactcaatgtgacccccaggtggcatcgccaactcctgcctcgtgccacctcatgcttataataaagccggcgtcagagaccgctgcttccctcacctgcctgcctgtctccctcctctgtcaccaccagcctctccaagctcaagtacaaatacagccgggtctcatttgttttttcaattaattgctcaggcacctgtctgcctgtaaaagcaagaagttcagtgttgtcatctgtaggccactcctcacaccccttgaactggcagaagccctggggacagaggcctcagcctggcttttatacacctgggaagtctgaaaggcccagaggtcaaaaccacagcccattggatacccatgaggcctctgccccaggcaccactgttgggttcctggaagcgaccctgcttagcagttgctgtggagaggccccaggctaccaagatgggcctctgtgtggtcacattcctgtgctctgccgttttccatatgtacccccctgggccaaggtgggtgggtccggggagcctggtgctgggcctctgcacatgtcctgaaggagccagccctcttcccagccccctcctggtactaagctcgggccacctctttccactcttggggccacctatttggagggttggttaattccagggcctggggccagggaacagatggtgagagtgagaccactgtcacacttgctccagcccccgtccatgcaggcagggacccacccagggcagcctcagcctgagatgcttccaggtcgctccacctagtgcggactcctaatgtgcccgactcctaatgcccatgccccctttgctgtgagtccaaggccatggccatgcagggaggcctctgggaccttctgcactcaggaaggagcccaactttcctctccctcccttcactcagaggcctcgaaggctggagggattgtgggattctggcaccacctagcgtctggcttcctcatctgggcctgcaagcttttgagggaggagaggg

SEQ ID NO: 8388 - DNA, 2300 bp, Homo sapien
gatagatagatagatagacagatagatagatagatagatagatagatagatagatagatagatagacagacagacagacagacagacagatgaatttatttaacttcccacttatttttacatctcttattattcccgaaagactccatggaggcttacaaatacagaccaaatgcaataagataacacaatcctgtataataaagggagcacccttgtcttgtgtggagatggcagtagctttggtagcacatcttggaggatctgggctttctacctccagtttgccattaactgtgtgtttcaggcaagtcccttcaccttcctgccctcgttttttctggtgtacccagtgccctggccacgtccaggggctattgtggaaagcaaatgagcagcctcaagtttctttatctgtaaaacgccattagtaggaattaagtgatgcagtgcattccaagagcctggcacgtggtccatcttcaccaaacgctggctctgctgtgatgtttgcacgaatatatatttcttggctccagaagcagaagggagctgaacgggtattgcagcgcctgatctgcagggccatgccattctctccgtctcactcattcgtgcccattttcattggagggtggctggcttttccatgtccaacagcaaacatttgccaaaggctaatgcttgtcatttcttcaatcaacacacatataacagtaaaaatgatgccactcaccgtgtgccaggccctgggatatgctctttgcatgcattatctcacttcccctcaccaccaccctaggagctgggtactgcgcccattttacagatgaggagactgaggcacagagaggtgaagtcattgactgagaccacaccattagcaagtgagagggccagggtgtgaactcaagtgccaagccctgcccctgcttggggaggattcatggatacagtggctcccttcagaagggctcaagctcccctgctgtccgctggccactgaccttggctgttttgtggccattgggcttcagccttttctggaggccaattcaatggactagaactcaacgaggattctacagtacctgtgactacccggcacaggagtcctggggcgaaggaggtcacagcggagtggggaggctgcctgcgaggtgtggaaagcatctgcctcctgcagcaggaggcctgattgtcagtctccacttcccccacactggctgtgtgaccctgggcaaggcccctacctctctgtgccttagacacctgcctcatcagtaaaatgggaaacataaagcttgaggagaaaaaacagtgaggaaagtgcttggtaaaccataaacgcagggggttttccccacgatgaaagtcttgccctgtccttaaggatcctgcatgctccatggtaaactggcaaggacacaatccgagagccaggccaaatggtggtaggaggaagtgccagggcggcagggaaggagaaattagttggggatgactgaagcccttctgaatgaggtgtaacctgcagggtgcacgttgatgggtgaataggatgacagatgaagggcccttctggaggatctactgctggtcagctttggcggtgctccagggatgtggtgggggagcagtgggccaggctcctagggaccactgcaggaaagcctccagtaccacataaggaacaccagctgcagcggcggcatccatggtggctggtgcggtgggccctgcctgggctgggggccactgtgggccactgcccccagaaactcccaagtacagtgtacactgaagagattgtgcaacttccactttcctgttcccaccgccccagctgtagcttccccagctggcagaacagcacgactgctgacccatcccaacccttctctttggaaatttcctttgggaaggtttggaaactcagccagctcctccctgcccctgcctccccacgcacgtcctcaccctgcagaaggagcccctccatccacactgcagcttttcttgtgaccagggtaaatattacctggcactgttaatgtttaatgcccgcacctcgtccccggccaccccgtggaggcagccagacactctccaaaaagcagagacagcaggaagaggggagtggaggcagcccattcacctggggaaatgactgggttgtcgatggacggtggtgagtgtgctggtgtgcgtgcccgggcgtgtgcaatgctgggtggctctgattggcctgcctttgtggggtcagctggaccctactcttccctctcctgccacctcag

SEQ ID NO: 8389 - DNA, 2300 bp, Homo sapien
cgcgcctgtaatcccagcagttcgggaggccaaggcgggcggatcacctaaggtcaggagtttgagaccagccaacatggcgaaacccggtctctactaaaaatacaaaaatacaaaaattactgggtgtggtggcggctcctgtaatcccagctgcttgggaggcttagtcagaataatcgcttgaacccaggaggcagaggttgcagtgaactgagatcgcgccattgcactccagcctgggcaacaagagcaaaactccatctcaaaaaaaaaaaggggcttcttttttggacacacaaagattttgcgtatcatccgagccctctctgaggattttgagcaggagagggagcaacttttaaagggaggggttgggatgggatggctttggtgtcctttctggttggaccatcaatcacaccgggctctgagatagagatgccttccttcacaacactggtggcgggcagggaacagagtgtgtatactggcggtgtgggtgggggggatttggctgagagctccacttttctggaccacttagaatatgtttggaccaggtacctctaagtctcacccagtcccgaggtttgtaaacttctctaaccccagcttggggaatttccactcagccgctctgggctgagtgggcaggtttccacttgggagcatgggacaggcccgcctgccagccgagctgttatccaccccaggacaggtctggccctgcctccagggtggtctggagggaaaggtgcagagagcctggagtcagggctgtgctcaggggccccagcgccgatctcagcccatcctgataacaaatagcacctcttagacctcctggtctctatttcagccctgagagggctccctgggacgtcatgagtcctcccctcaggacagggagtgttgcaaaggagggacagagaggcgggagtcagagtgaccagagcccgggtcagaggctggggccagagccagcccctcctaactctgcttctcagtgtccacgttggggtggccgtgccagggcggctacaggaacctgacggagaccctgtggtcccaagtcagccacacagagactgctcactgtggctttgctgtgggcaaggccttggtggccgaggaacagagactgcctgggcagtgtagtgggctgccctgcatggtaggacaccctgcctagtggcctgccccgcctggtggggctccctgtggctccctgctggcttctggctctgaccatgccctgggcctagcagtgttgtcttctggccattcccctctgataccaaccagcagcccccagaggactcattaggctgctggtgtctccagctgagccctctgaggtgtggcaggcaggcctgacatcacagcctgggtgagtcactgtgggctgggtgagtcactgcgggctgagtgaggggtcccagctgaggaaagggcaggccacaggagcggcccccatcacagctccggctcccagccccgcagctgctccccatctctctgccaactgccagaacgacacaggaagctggggccggtgcctcaggtgccacgacagggtcctggaaaccattcccacccctctgagaggctgcagctgtgcctcccagtctcaggggatgcctagctacagaccggggtcttgggcaggatacctccggccaacggcccagctggactggagggcagaggtgcagcggagtaaagctcaggggacccacacatgcccctaaaggtctccctcacatgccaccagcccaggggcctggggaagagtgggctccttgattcctcccggctcctgtacccttttcgggcaccctgggctggctgcagtgtggagcccctcgagggagagggccagggcgggggctgtggttggctctgctgcatctgacagcttgcccatcctcaagtgccaggtggaggtcagaaaatctcccctggctttcacgtgcatcccttgccccaacccgccccagcaagtgggcacgaggtaagggctcctttgccagcccctcctccctccctgtgtctcttcctgtttgtgggctcacctgaagtgtgaagagggggagtgccactctccatccaggccccaggcaagcagcacctccctgctctcctgcactcctggacacaaccagcagctcctgccatggacaggtggtacctgggtgagtcctctgagccccattcctcctccctgctcaggctctaacacaggtgccagccccgtccctttcaagtgcacccacaagctccccagaagtgcagga

SEQ ID NO: 8390 - DNA, 2300 bp, Homo sapien
tttcacagggggtagatgtgtttattttcctgctagaagggagatgtgactcaccccagaacaagcttgcgtgctgctttgtagctgtaacaccccaaattcttccagcagtacccttggatggaacgtgatgaagcactatttgagagttaagccatggcggtttctcatgcacatttagttcctgttatccctctgcagcctgggctggtcagcattaggtagggggacctgggaagtcactgggccaaacacttcagaactctctggctggaaatggggttgaaccagaaggtggcttggctttggagttctgaactatcctttcccaaataggcttgcaaagcctgggcttgacgtgtcatcactagtaggtgctctaaaaagcacagagagatggccaaaaggcaggattcaagggcatttggagggatgaatgtacctgcctaaggacatgggcctagaaagggatgtggttttaaatctgccacctagaatacatgaaaagggaaaacgacagttggaatgctgtcctcagtttatagaggaaaagacaggaacggcaaagggttaggcacgcaaataggcaagatttgagtctggctttggagaaggagctttagcattcacaggaaccccagggagttcaggactgggccagagtggcatccattcagccaggtcccatgattaaggggccagaactatcccctgaggggaggctttttgggtgctctttctcagtagctatttatggttcccctactggttccaaagtcttcttgagttcatgtatatttcctgccttggggttttgagacctgaccttttattaaaataattagatcatctagggcagagctggaagagacctcaggatcatctagtccatctccctattttcccaaatgagaaaacaggcccagaactgagggcagcagaggcagggctaggtttcttcctagcagtacccatcatccccggcttggggtttgtaaggaactctccgtggccctacctaggcttggacaatcacagcctttctcagtagctcctccctccacccggctcggccatacacacaccttgactgaggctggacagcctccatctcagcatggctcctggctactgacacttgtgcctggcctctgccccttcctacaagctctgcccctaatagtaagagccaatttcttgagcactcactatgagctaagcctcccatggggtcagtctctaatcaccattttcccacgtgaggaaatagactcaggagctgagtgcagagatatgctccaagtcgcgtcacaggcagggttgccgagccaggatttatttacatcttcacattcaaagttcgtcatcatgaattttgactcttggggactgggctgaggacggggtggtactgctcctggcagggccagaggtggatggggcttgaaaagggggttcaaggcagcagatctatggttcaggtaaggaccatccccccagctccccacctggctctagctgaaaatgacaactacaactggagctggctcctgcgcccacgacacagccattcatgcttttggtgcacattccccttaattaccaaggctcccaattaacgtgggctgctgtgtctggtgctgggttattttctcctatttttccgttcctcggggtttactattgcagagagacaccaggtctgtcattgtgcctgtcttgctcccttcccaccctaaccagagggaaaccgaaaagcaacagctgatggcaaatccgctccggcgcttgcacgcctcctcggcggcagtctcctgttgcttctcggagcttgactgccctttggaaaaatctctccgcccctcgagaggagagaggagcagaggacgcgcgcgagcacagagcgggaggacggacagggagaggaggagagggggtctgcgcgcggccgctacccagaagccagcggacggcagcacggagtgggctgtccccgagcccagccccgagcgagccccccccccgcccccgcaggacgcgcctcccagccagcccgactcctaggaggaggggaggcgggaaagcagctcaagcctcacccaccgccctgcccccagccccgccactcccaggctcctcgggactcggcgggtcctcctgggagtctcggaggggaccggctgtgcaggtaggcggctggggaggtgggcaaagttggctcctttttccgaggaggggcgaggctcggtggggaccgatctctggagcgccgggagcgccgggttttgtgtgttcagtgg

SEQ ID NO: 8391 - DNA, 2300 bp, Homo sapien
atgtcacacgggtcagactgctttgtcagcgaggactctgggacaggccaacttgtgtctctgatgcaaaccaaggaaaagagcaagaggtgaaactgatgttccttcccagccttcccagtgccctgtgccccgtgccaggcacttcctctggttctatgtgttctcattttcccgatggtgaacctgtcaggccttgcgagttcccctcagagttagggttctcattcccccgaactcgcccagacccccaagcctgagctctttccctaggttggtgggaccttcagggaaggaggctgagggtgcccttcggagaccagtggcctgcctgggggatgaagtggaggccctcggatctggcctgggcgtgccagggctcagtggcagccagagaggggctgggctcctccctgggagagagggaagaggagcagctgaggacaggaggtgggtatcttctcaggaggatggatgggaggggcccctttgtcatggtgggctggtggatggggcaggaaggggatgtggcctgtggctgaattctgctctctttgaaagccagggaagtggctcccacaataagccaagatgagagaactctagggtccctgcctgggccctccagagttctctcctccagcctcttgcctctgggttagatttccctcaagacaccctaagctggggcacagtttccactgtgagctagaagtttccgttttcttgaatgtaaatggggggcgatagtagtcacttcctttcagtttttgctcaaatatgtcaccacagagagccctctctgaccatcctgttcccaactgccaggactctgcctcccctaccttctggatcctttcgctgctttgtttttgtgaacggcacttttcactttctaggaggctgtgtaactgatttattgatttttgtctgctttttccccccaacccgcaaatactagagccacagggcaggaggctttgcctattttgttcctgtgtccccagcacctaaagcaatgccaggcactcaatacatatttgttgaatgaacacgtgaaggatgcgtgtgaagtgtttcgcaggattcttggcatcttaagattattgctgctgctgttgtttgctgtgtgacttgagcacattccttagcctctctggccctctgtctcgcagtctgtaaaatgaaaagagtgaaccactaaagatccatgagcttctttcaaactctaaaaatcttggtgcctctgaatgctcaagaaagttcttcccaaacctcaacaggaactcctttttcttttttttttttttgcagttctcagcagcagctcagctggaacttagccggaggtgctaaggactccttttgcaatagcccttcctttacttcttttgactctgaggatcagaatagggtataggtttgggatcacgagtcagcccaatgtttcttggaacagtttccattcagatagttatgttttatttcattgactttgatgtgttgcttctggcactttattgttttcaatagagggcaattcatgatgtgcataattaaaggtcatttgattttcatttctttgttaagagtttcataaaaacaaacagagttcaggagaaagcaattgccagaccatgcgcccagagaccatgtgccctgatttgggatttggacacctggtccttggagatgaaggttcccactgtcctgccataggtggggctctgcccctggcctggaacgtcccctgtggggatagggtcatccctcagaaggctctggagcatctgtttcaggggctcaggtcaacaggaccaagaccatcctctcaaggctctgccctttctctcagggcccctctgaagaagtagctcagaacactcctctgcttctgtgggggcagtttcatgagtaaaggcagcttcaggttcccggtatttggaatttggtattcgctgagtaactgggatggcctcgatgaggggcagaggaacaggtctggctagttctgtgttgtttatactggggattacttcacacgtcccaaccggcttccccgccccatttggtgggggctggcccttggccctccaactcctttaccctacatgcctgagaagccagggaccaagatggatcttctcctcgacatcagctaagcctggaggactcttcccctcagagaccatggagagggacagccacggggtgagtgtgacctcaggcctcgggccagattctcccagcgctgaggaagcagggctgaggctgggagacaggtgggacagctacctctg

SEQ ID NO: 8392 - DNA, 2300 bp, Homo sapien
gagatggcctcagatgagccaagtgacacagaggtgcgagagactgaggatgtgctgaggtgttacccagcactccagtagtgctattacccaacacaaaaattggtctgaatatcagatttcaagcaagcaagggaaacccagaagagactgggagaagtccttatggaggctaaagcaactccatgttggatgctaatccacagttttggccgtgttggctttggagcctcccagaagacctctgagattcccaatttatcaattgctccttgtgtaagtgcaaacacttactgtaaatccggcccttaggtcaaacaaccttgatgttatcatacttcaactgtcctacacatcttttctgaatcacccttcccctgtggtctataagccctggtcctgggggtgaatcatggagacacaaacgtagcttctgtttataagtccttattaaatgtttttttcgaagaaactggatgtgtcagcctgtaacctgcaaaaggatctggctgctctctgcttgtagaaagaatggataataaaggaaaatctgctagctgccatgctagcaggggaagagcagcaaacaattccactcttcaattcatggggggaacgcaggggttttttaagaaaggatctgaaatgcagaaaaggcaagggggaggttaggaggtaccaggtggtgtgacttgctccagtggtcctctttaattatcgtcttatttggtggaggggctggtgcaatcgtggatcctgccaggttataaattagttactcttcagcagggtatatgttcaactcctgaagtaagcttttgttggagagagaattccggaggtgcctggtccctatcaggacgcagctcctgaggcatctaaggaaatatatgaccaggtaagagcatagcgtgtgcttaacaagcacgtaggtaaataaacgtgcgtaaggcatgggagtacagtatgggacaggaaagggagtggaggtcacagcacgtcctgaggctgtgttttaagatgagaggtaacatacatgcagtttgtctcaaaattatatcttgaggcccagaggaggaagagaaaaaaggaaagaagagaaactaagtttaaaacacggtttaaggctgggcgcggtggctcacccctgtaatcccagcactttgggaggctgaggcgggtggatcacctgaggtcaggagttcgagaccagcctggccaacatggtgaaaccccgtctctactaaaaatacaaaaattagcccaggcgtggtggcacatgcctgtaatgccagctactcggaaggctgaggcaggagaatcgcttgaacctgggagacgaaggttgcagtgatccgagatcacgccactgcattccagcttgggcgacagagcgagactgtaaaaaaaaaaaatagataaaaaaattttaaaaatcgcggtttgaggctcagctgctgagctgctggttaaaagcctctttcttgggtctctcagcttcctgggactttgggggcaggtctgcataaactgcttagttgtggacccccctccaacaattaggtaggggactactcagtattcatccatcggtgtcctcagacccccagacggggaggccctggggcaacgccaagactcacaccggcgtcctggcgcctttgccctcaagggcctgcaactacctcctccccattcggagcggccgcggccacatccttaacgccaagccggcacgccaggcaaaagcggctcggacgccctcaccccaccttccgcactcagggccgaggctgtgcctggccacctgcttcccagcacatgcacacacgcgcgcgcgcacacacccacacacacgtacccacggccggccgggctacccggaccactttgatccgaaggcactggaggcccagagggaaggaaagggaggggtggccggagcccgctagcgccccaggacagcctcgggttgccccaggcggtagccctgtgggacagtggttccccgtccgcggcctcgggggcggggcgtctgtaggcctcgccccgctgacgtcagccctgcggggcgctggcggagcgggcggcggagctgtcagtcccagcccaagggtagctggaggcgcgcaggccggctccgctccggccccggacgatgcggcgcgcccaggatgctgccgtgcctcgtagtgctgctggcggcgctcctcagcctccgtcttggctcagacgctcatggtaaggctccgggacgcggcccttccctgccctgccctctccgcgcccgctccattaaa

SEQ ID NO: 8393 - DNA, 2300 bp, Homo sapien
ggagcagaagccaggagggctgagtcatcatccctccaaccagccatgcccagcagccttcatgcccagacagctgcctctttcctggttcatcacctgagcaccaggtaaagcaatgcaaacctgtgggccagatgtttagcctggcacatagaggaaccaagacaactgaaaacgtggctcccagtggcccactggcttctcactgccctgctgctggggaggtgcctgcctggaccatcacggccctgaccctgaggtcacctgagatcacaggctcttgcctctgcccaagacttccaactctcaaggccaccagccatcagtaaggaagggctggggctgtgctggctccagagccctgcaggccagcttcagatctctgctgctcagagacaagtccaaggccacactgcattcatcagctgagatttggccaataatccattacacagatccggtattcctcctgctcagacatcactggggtcctccatgggccatattatcccaaaccatgaacctggggctttcaaacacttgtgttccattcagcctgttcacaagcctggcagtgtgaaccagtaagagaaccaggttccagccccaactctgcccgaaactacttcatgtccataggctatagtttcctcagctgacaaatgggaacaaaatattggggttgttgttggagaattaaagggctgatacacagaagcacgttatcaacagaaggacaaatacacacgtctaacccaggctggtctcctgggagggtcaggtctgagaaatggaaggagatctggattcatatggaaccagacactaattcattatgtgactttgggtcattgactttgcctctctggaatttagttttgtcgcccacagaatgggggaacaatgtggacaattatccaagtctctcccagcaaaatatctgtggctgtaaggtttcaccttgcacatcccctggccagggggcagctccagctatcaggatgtggcagaacgtgaatcagaaatgatcctgtggggctgggtgcggtggctcacgccataatcacagcactttgggaggctgaggcaggtggatcagttgaagccaggtgtttgagaccagcctggccaacatggcaaaaccccatctctactaaaaatacaaattagccaggcatggtggcgcacaacacctgtaatcccagcagctacttgggaggctgaggcaggagaatcacttgaacctgggaggtggaggttgcagtgagccaagatcgcgccactgcactccagcctgggcaacagagactctgtctcaaaataaaataaaatacaaaaacacaaaacttagctgggtgtggtggcaggtggctgtagtcccagctactcgagaggctggagcacgagaattgcttgaacctaggaggcggaggttgcagtgagctgagattgcgcccctgcactccagcctgggggacagagagagaccctgtcttaaaaaaagaaaagaaaaaaagaaagaaagaaagaaggaaatgactccgtggacgaggagacgtgggctctagccagagcaccaatagtgattttcagaatattgaacggctgctgaggcaggggcaggaagcactagtacattggctctgtgcaggacagcttcacttctgggatccagggaaagggggtacatcttacctccctaagagaagaaactccctccttctctgtggactttccaatcctattgctccacacctggcaatgatctctttgtactgagctgcaaaccctgtcgcccaacccccagaccactccaacttcccacaaccccaaaccaaagcacccacacagtgagaagtcatgcacctagaaggtagggggagggggggcggaaacttctggcatcaccctcagccaacacccagttgggtggaagtcattcaggcgggaaggcttttgttacgccttaggtgtgtcacctgttctgaggccgaaggtcccatgaatgacttcaggtgttgttccagcccctaagataggtgtcaggttacaagacacataatcattccagtttggcaacttcacttgtagggctgttttaatcaagctgcccaaagtcccccaatcactcctggaatacacagagagaggcagcagcttgctcagcggacaaggatgctgggcgtgagggaccaaggcctgccctgcactcgggcctcctccagccagtgctgaccagggacttctgacctgctggccagccaggacctgtgtggggaggccctcctgctgccttgggg

SEQ ID NO: 8394 - DNA, 2300 bp, Homo sapien
gaaaggaaggaaagaaagaaaggaaagaaagaaagaaagaaagaaagaaagaaagaaagaaagaaagaaagaaagaaagaaagaaagaaaaggaaagaaaggaaaggaaaggaaaggaaaggaggtagtagaagggacgtacttaagagagcagagccaagaacaattcatctgttcaggtgacaaatatttgttgagcaattgctgtggaccaagcactgttctaggcaccagggacttagcagtgaacaaaacagacaagttctgtcttcaacgagtcttcatttcatggaggggcgggaggagacagaaaatatacaaaataagtcaaatatagagtttgttagaggtgatgcgtgctttggaagaaaaaaaaagcaagaaaggaggataggaaaggttggaaggctgcattttaaatagggagatccaggaaggcctcactgtgaaggtgacagtgaagaaagactgggaggaggacagggagccagtcatgtggaggtgagggtaggagagccggtccgttgctttccagggtttccagaattcttgccccatctcccccagggcagaagtccccatggcacctccccagcttatttcccacaaggagtgggggacttaaaagaatgtatctctgatacttactgatattaactttgcctatgttttccctttcccaggttccttctccttggataaccatgtgcaattgacaatgtagttattatcacctctgttctaggcagtgataagctcctacctggtctccctaaccccagactcttttgttccaatccacctcctccctgatgaaagatccatctttctttttgttttttgaggtggagtcttgctcttgtcgcccaggctgtagtacaatggcacaatctcagctcactgcaacctccgtctcctgggttcaagtgattctcctgcctccgtcttccaagtagctgggattacaggcatgcaccaccatgctggctaatttttgtatgtttagtagagacagggtttcaccatgttggccaggctggtcttgaactcctgacctcaggtgatccacccacctcggcctcccaaagtgctgggattacaggcgtgagccaccgcactggaccagatccatcttcctaaaattaatttgatcctgtctctccactgttcaaaaactttcaatggctcctcactgccttcaggataaaacccaggctccttagcataatgttcaagagtctccacagctgccttcacccatcctgccttccaacttgcctttattcccctggtaccccaggcacaccaggcagcctacaggcaccctccgtgcctccgacagagctgagccagtgcctccctcccaaactgcatttaagtgccacctgctgagggaggctttcaccagcttacctttgaagatgtctctattataacatatattatcttccacctggctgggctggcatctgtgtctgcctcttcccccagatggtaatctctttaaagacaaggaccaggctagggacttgctgtttgtgggattgaggatgcattgattcacaagtatttattaagcctctactaagcacacactgtgctggaggcccctgcctccctgatgcttaatgtttaatcaaaagctaagtcaggaggtcaggaaaaggataaatggtggcacagtgaatgggtacgtgccccaggggctcaggcctctctcgggcaggcgagggtcagacaaaacccagaaatgtcctaggacaggctcaggcaagacacgggggaggtggcctgacctgggggctcctttgagcggcactcaggaaagataggtgagcctggataagtaagaagaggcagggtaaccacgtgctgttgaagctaagcctagtctgcaggaataaccccccagcattaaccaaaactgtgctcaaggcatacctgtcaccggccagaaggcaggaggctgtggagtttggctcagggatcaccaagtgctgactgcatgctcttcccctctgcctcccattttcttgcagatgtcaaacccctgcgcaaaccccgtatccccatggagaccttcagaaaggtggggatccccatcatcatagcactactgagcctggcgagtatcatcattgtggttgtcctcagtaagtgacagcccgtacccgactttcaccctctaagtaaatgacagggcccaacccccacccccgcactcacccctgaataagtgacagtcccccacccctgccctcaccccctcagtaagaggcagtcccacccctgccctcacc

SEQ ID NO: 8395 - DNA, 2300 bp, Homo sapien
gacccactgcgatggtccccagaacccaccttttgccaccctttctcccagtattcttttcagagcctgccaggaaggatgtaactgggagagatgcttagatcgtgttgccagaattcggggactgttggaattcttggctagagtcctctgtctggtcttaagaaacacccggagcttggattgcttgtctaaaaatcaatagtttagtctaagaaacaggagagagaaaggccttggaaagcttggagagaaggaatgagaagagtctgaatgagggaagggctgagaagctggactggcagggaaaagagagaggaagagagggagagctgcaggagcattggcgcggctgcggtgggggtgggagtgaactcactagattgtactcactctacaatctagtgggggatccaacctgagactttcacagggaagccacaagagaccaactctggttataattaaatgctgacctcagagggtgctgacgggcagagctgtgggattgatccaggtcttgacagggggccaaaattcagttgggcaggtgacatggtgtcagcaaaggctgggtgggaggtgacagagggagatgagtgcggtgcttgcaggagtcattaggtaaaaggcttttatgaagagagcagtaagagctgtgctgcattccagggagaccttaataaaaggaaatgggtttagcctgaaacaagtaaaattcaggttagacaggcagagctattgacgctggaagaggaaaccatggggggaaggagcagggcgtgactacaggctcttcctggtcctggacaggggaggcatccaaggagtgggctggtgtgatgtcatgacccttgaggaccccgattctttctcggctactttctcaccccaactcccttcctccaccagctcatagaggggactgtgaagaatgagaagtctgaccccaaggtgacgttgaaagacgatgaccgcatcactctggtaggctctactaaggagaagatgaacaacatttccattgtgctgagggacctggagttcagcgacacgggcaaatacacctgccatgtgaagaaccccaaggagaataatctccagcaccacgccaccatcttcctccaagtcgttgatagacgtatgcagtaggggctggcacagggcagtggcgtgggaaggacttgggaggcacccaactcagcatcacagtgaaatggcaaaatggaccgtgttggtgttttcttttgctttacactttccagagctgctggagttacatctaaaagctagaagagctcagcttgaacacttattctgctaccaaatagcttatgaaatactctctaagcctcgttttcctcatctgtaaaatgggaatatggcttcattttcctagagttgtggttagagaagctacctggtagtgttttgtggctagtagggttttctccgtatatactgattattaataccattgggtattccattagcaaaaattgattgaatgtcaggcattggactaaaaagtgctatgagtgatacattacattcttccttgaggaattcacagtacaaggtaggacagaagataaataaatagctagaatgggcagaacatgatgcatacatctgtcagtagaggtgaaaacaacagagatggagtaagacatggcccttgtcctctgggggcttacatcctacctaggattccagtctgacacaggaggaccaatcatacaaggagggtgcatatgaaaaggagccaggtggtccctgaccagacctggtgtggttagagaaggaggatatgataaccagggctggagaagtgaggcatggccccactgaggggaggggcctggaagactagggaagtgcagaagcagagagaaaaagggaaggggacttgcgcaaggatcctgactctgctgcattttgtgtgtaccgggagtttgctgctctcctggatgacactgagtccctggagagggagacacccgtgagttcaatctcgagtatgcaagggcggagccagaggttatccaatcagcttttctgagcctggagtcataggtctgcctatggtgtcacctcttcctttctgtctgggcttctgtcacccagcttgtactcagccttttcagaaggaagagaacgggcatttgtggagcgttttctgggtgccagatcccgagttagttgctgtcattgattttagctcctttgctcctcaccagctcccttgaggtggatcgtctctccatctgtatggattcattcatccatctgttcaacaa

SEQ ID NO: 8396 - DNA, 2300 bp, Homo sapien
gccctgatagcagtgtttttcttggagagtgtggttggtcacagagtggtggaaaggggctaatatctgaacgctgcttattccactcactgggtgtgtggccatgagcaaggtaatctttttaagcctgtttcctcatttgtttattgggaataaaaatagtaacttataggattatgatgagggttaaatgagacagtgtatataaaatacctctcctatcctatagtaactgctcagtctcaaattcaccatttactctgtggccctgggcaagtcaactctctgagcctcagtttcatcatatataaaatgggaacattatacctgcctttgagcattctaataaaagtcgtagttagtatgcacaaatcctctcgcaccgtggttctcaaagtgtggtccctgcgcacagcattccctgggaactttctcgaaatgtaaaagctcaggctccactccagacctgaatcagaactccaggggctgggcggagccagccgtaactgttctccaggggattctgatgcgctctcaagtttgaaaaccatggctctagaacaaatcctggttggccacaaatcctaggagctggccaaaaataaaggctaattgaaataacttcccagcactaattggagccctggtgggtagatctgggtctcttaggcaagttacataacctctctaggctcagttgtctcacctacaatgtggacctataatagtacgtgactcataggacaggccgtgaggatgaaatgtgcctggcacatagtagatgctcagttaatatcagctagtactattgttagcgacaatggccgaatcacgatggggttactggaccacggggtgtgattttagggctgggggatataagcacttcactttgtcatcagaagctaagggcacaggaagaagctgagcaagcagggctgcctgctgtccttggagatccttttctgtcatttgaaaagcattgctcagacgcattatcatccggtgggggcaaaacaagaggtttatgatgcagaacagggaattaagttagacaacagagggccttcctgagagtggggttggaaggtgccagtgtcctctagggaggaggtgaggcaggcatccacttccagacaccctccccgcccccgcctccaccgaccttgaggcgagtggggtttccttggggcatctgcaggactgggggtgggtgtgtgtgtggggcggggtggcggggaaccaggcccccttacaaggactccggagcgggagtttggaggccgtgagtggagaggcctagtcccagcggagggggccgcatcggagtgctggggcggaggttcgaagcgtgagaaagaagcctgggggcgctcggggacgagggggcggagtgtggcgagaaggccgggctgcagggctcaggaggggaccgcgggtccagcgccctccccgtcccgcccccgcgcgcgtgcactcgggctggcccggaatccctccccagggtgtcttctgccactgactttcccaccctggctgcgcccgcgcgcccccgcggctgccaagctccaagccccgcgtcggtccccacccccgccgtgttcccccctgccaggccgtcttcctgcggttcccagggtcccgtttggcggccagagggcgtcggactcggctggcccagcgaggtccagcccgaacgtgtccttctgcctctctgcccctggggaccagggaggagcctccagggcgggggaacgagaggctactggacggcggcccgggactgcggcggccgcgtttctcttcttcaccttacgggacccggctcttccccctcctcgaccgccccgcccgtcagtcctgaaaacctggcgagaggcgcgtactgtcctaggggaattcccctgcaaacagaagggagcccgccctgcgcgtcctggagtgggtgcggcaggagcgcttccaggcactgcgtccccaggtgaggggcggagccggggcgcggttcgcggcagtggccaggcctttgtttccttgggttggggtgacccctggtggtcatccagagcgcaacaagggctactccctggtccagaattcagtcctttccaggggagaaatggagaatgatggagggtggcccaggcggtgctgattggagtagacagccatcctcccgaggttggcactgagggtgatagagacctacctgcctggccaagctactccgccctgcctaagcatccccttccagagctccaggctggtggggttttattaagggaggcggtgctccttac

SEQ ID NO: 8397 - DNA, 2300 bp, Homo sapien
cacttttacatgcaataatatctcattccctctttacagctaggtccacttttgatgttgcaagtcctggagcaaaggtacaaatggaaattatacatatgtctaaatattaatcaggataacaaagtgttaagattgatgttttatcctctgcctttaattacttttccttcatgataacctggaaaaccatgtccaaaatgaaattttcaggccattctctggtacacactcttctctggtcctgtagtgagaggggctcttgtgcatgcctagggtgtgtgtcaagttacatgcactccccatcacctgcatacagctgtcccttgcccactgctctagcccttgagtgcacacctgatatggccagcccttgaaaggacagatctggggaatagggaattccagagttcctgatacctggagtacagtctagaaggggaggaggtgcatgcccccacctgccctgcccccttggtcccatggactcattctccagtgaggggcatggccagaggagggccagaatgagggcctttaaaaccagaaatcagggctgaggcttctgttgcccaggtccaggggtaacatcgctcttaataagcctaggaggcaaatatcattgcattcaccattttataggtgaggagcagaggctcccccagaagaccatgtaacttgctcaaagccatacagtcataaatggtggcgctgccagagcctctgtgccactatagggaaggcagcgaccctctctcctgaaaaagcaaacagacattcagcactttgcctgcaacctcaaggggtccgtgatcacgccgaagtccacccagagacccctcgttaagaaggcggtgcgttggtgtgcctgcagcagaagtcagaccatgaagtgggagcgggcttcccagtccggaccagtcctagacagtaaagagggcctgtgatgcagggagggtcttggatggttggaaaggtgctgaggaggagatcgactcatttacagaaccaccagcccaagtagcaccgctcaggtgaaactctttcacttgggcctgtctgggaaaaggcttactcgttcacagcctcgcctcagccctctgacctggttgtcaccctggactcctccacccctaccccaaaagggaggccgagggagtctgccgttccgaagaaaacaggagagttggaggagggcgaaaaggcagcatctgagggggacggcctaggtaggaaaaatgagaagcaggggtgcagcgggagggtgaaatggggcgcaggacacagaccaggcgcggaccaacctgctccctaacctggagcgtggtgatttccaaggggtccatggagaaatgtggggcggggtggcgtgggggtgggggaagggagggccggggcagtttgcaatgggaaagctctgttccgggcttcctaaaacaaccgccggagttgctgagcgatggggcagaaggtggcgggagcgggtcccgaggctgcacgcgcgccatgtcgcacgccaccgaggaggcgcaagctgcagtgggcaagcccgcacacgcccacccgttgcggcagcgtccgctgcggactttaaagcggtcccttggcggtcctgggagagggagccgctaaccttcccgtgttcccccaagcaaagcaaaacagtcttccagcaaccgaaaagctccacctctactccccccgaactatgctcctaattggcagctcagcgcatgggatgatgcgggtggctgcaggccggccctgcagtgccagccgcagcagcccagccccactggagagggagttgggggcacggcgtggtcccggggctccgggaccgcgaggcggggtgcggcaggcagggtgcgcagcgggcgggggctccccggcctacgcggcggccaccgcccctcctgcggctggagcgcttccagagcagaggcgcagcctcgctcgccgctgcgctcgctccgtcttcctcccgctcctgctccggctcctcctactccttccctcccgccgttgctccagcagccggctcccagcagcgggcgagcgcgcctccccctccgctccctccctccccctcctctcgctctctgcccgctaactttcccgagccccgaccggcggcgcagagctccggggtagctttgtggccgaacgccgacctcgggcggagagcgcggctgtgcccagtatcccatccccgcgacccccgcgcgctccggagagaacaggactatgcccggggctggggacggaggcaaagccccggcgagatggctgggcactgg

SEQ ID NO: 8398 - DNA, 2300 bp, Homo sapien
ctagcatggacaagatggtgaaactctgtctgtactaaaaatacaaaaattagccaagcatggtggcaggcatctgtaatcccagctacttgggaggctgaggcaggagaattgcttgaacctgggaggtggaggttgcagtgagccaagatcgcgccactgcactccagcctgggagagagagcgggactccatctcacacacaaaaaaagaaaagattaaactgagataccacaggctgagcatggtggctcacgcttgtactcccagcactttgggaggctgatgcaggtggaacacttgaggtcaggagttcgagaccagcctggccaacatggtgaaaccctgcctctactaaaaatacaaaaaaattagctgggggtggtggcacgtgcatgtagttccagctactcttgaggctgagacacaggaattgcttgaacccagaaggcagagattgcagtgagctgagattgcaccactgcactgcagcctgggtgacagagcgagaccctgtctaaaaaaaaataataaaataaaaaaataaaaaattgagatatcacatgtaaagtgcttggcacagagtttatgctcaaaaatattagttgctccctgtttggtacacaaagggcccatcacaaatgcaggtgactgctgcatgcgaatctctgccctacttaaccatctccccaggagtatgggggtcacctctgcttaggaccaccttggactccacccaccaagttctcctacttatgacgttagcttattttttcttccttcttcaaaagaaaagttttaaacatacacaaaagaagagagaactatatgacaaaccctttacacccatcaccagctagtttcaattatcaagcaaaacaactagtctcgtgtcacctattctcccatctctttttttcgttgaatatatatatatgtatttttgagatggagtctcactctgtggcccaggctgggatgtagcggagtgatctcgactcactgcaacctccgcctcccaggttcaagcaattctcctgcctcagtccccccaagtagctgggattacaggcacacgccaccacacccggctaacttttgtatttttagtagagacagggtttcaccatgttagggaggctggtctcgaactcctgacctcaggtgatctgcctgcctcggcctcccaaagtgctgggattacaggtgtgagccaccccgcccggccacccatgtgtgtctttaacagatagagatgttaaaggacaaaaccacattttatcagacccaacaaaattaagaatgattcattaatacaatctactatgtagttcatatttaacttttcccaattgtctcaaaaacttttctttcctgttgatttgtttgaatcaggtttatccaaaggcctgtgttacattcaattgtaagatctcttgggtatttttctatcagcctgcttcaacatgttctgttttcagaggaaacgctagaatgaggaaagcattaccccttgaaagtctctccaactcactttcctgaacccttttcaataacacaaaaacaagcatctcctttttttttttaggttttttttttttttttccctctggaggcagggcccaggctggagtgcggtgcagtagctgggacaagaggcatgcgacattatgcctggctaaattttgtatttttagtagagatgggttttgccatgttgcccaggctggtcttgaactcctggactcaagcaatccatccggcctcccaaagtgctggaattacaggtgtgagccactgcgtcagcctgggggtgtttttaaatgataaaaggtgtttccctttccagaatctttaaaataaatggattcctctaatagctttcaaaatccaacaatcatcccagtgaagtcaaaaagcagggtttgtattatttcttgttttagagggtaaaaatttctgggattttgttcttttcaaaatgacttttttatgccctcccacctgctttttgaaatccaccaaccacaatatttaccccatcccccttttctctcccccccatctctctctctctcctttacacactccctctctctctctttttagcagcaacatacaagccggccatattagagagatggaaataaagcttccttaatgttgtatatgtctttgaagtacatccgtgcatttttttttagcatccaaccattcctcccttgtagttctcgccccctcaaatcaccctctcccgtagcccacccgactaacatctcagtctctgaaaatgcacagag

SEQ ID NO: 8399 - DNA, 2300 bp, Homo sapien
gttctcaatctcatggagacagtgtccctagtgtccagatatggggtggagtctggccttcccctccgcttcgtggcctggctggtgctacttggtatagggctgtggggctctcagctctttgctaaagtattgagaccctctccttgcttttctactttcccaagcactggtgaccccggcagccctgaggcctctggtcttgggtggtaatcagttggtgatcattgtgggaattgtctgtgccacaatcctgctgctccctgttctgatattgatcgtgaagaagacctgtggaaataagaggtacagggctacccccaccccttggattgggaggctgggggtgcaaggctgcctctaccccaaagtagaacagggtgatagggccctacttatgccattctcacagaagggggtatttttaaatggaatcatctgtggtaaccctgcccactttgcttactgtgcccgggaaaagaatttaatattcctacgctctcctcattcactttgttattatgtaaagactacaaactcccttagaaatgggggcctcagtagggcataattcagagcataaatcttacacaagaactatcatggtaccattcactgcctaaaagatgatttttaaattatccatactgtacgttccgcatagaagctaagatcttaagggttgccagtggttttatctaaaagaccacattctaattatgagatacgatctttgaatgggtgccctcaggttctaaatgaattattattaaaagatgcttttggccaggcgcagtgtctcatgcctgtaatcccagcactttgagaggccaaggcgggcggatcacgaggtcaggagatcgagaccatccttgctaacacggtgaaaagctgtctttactaaaaatgcaaaaaattagctggacgtggtggcatgtgcttgtactcccagctacttgggaggctgaggcaggagaatggcgtgaacctgggaggtggagcttgcagtgagccgagatcacgccactgcactccagcctgggtgacagagcgagactctgtctcaaaaaaaaaaaaaaaaaaaaataataataataataatgtgcttttaaaggcctgaatttcatcggtagttctcccagggtctcagaagtgcccagatgctccaacagggacacttgtgtttcactggctgttggcagatccatgtccctcagtttatccaactatcgatggagtatgcttgtagtgcagatcgactcccttgttgaaatagtgtcagtgggaaagggcctcatgaatagtcctgacttttgagtgttctttcccagtgggtcttggatcctgcagaaaacacttgtgcctgctaagttttcacttgcactccctagggcttcctgatttggttttgaacttggctggcctctctaaaggtctttgctctgggcatgctcggagcactgagctagacaacctggattccactctcagcttacttcccctgtcgggacctcagtttcccgccaaaggaaaggtagcacttccatgtctagtcgtttattctaaagaaataattaaatggatatgctgagatttgtgcaaaactgccgtcttgcttataattaaaaatagggataattgccagtgtctgtcagaaaggcaacgattcagtgaaccagtcaatgaaacactccagatccctctacataatgacatggaaagatatccaaggagtaaaaatacagaatttatggtatgacctcatttttataaaagagaaaataatatgatgctcactccagcagcatatgtactaaatacattttatgtgagcttatgcttacactgagagaggcttggaaggacagttgtaaaatgtgggtaattgtgtggaatttgaagtgaaggagaaggtggatcccatggggtgacgggttgcagggaacttccacttccaactgtctacatttctgtattatctgaattatttgacagtgagaagatacaactttaaaagcagaaaatacaaggaaaatatttccactgagaccaaaacatatggtttcttttctagcttaaaccttgaattttttttttttttttttagttctgacttaggccaaaatagaaaaaaagaaagtatgttcagaaggcaaatggtcatgagatcaaaggccaagggaccccgacagggcaggcgcagagctcctgcttggggcttgggtcgggtgtttgtgggggttattctgctccgccccccggaaaggccaggagcccttcggattggcgtcttgctgagc

SEQ ID NO: 8400 - DNA, 2300 bp, Homo sapien
aaaaggggaaagagaaaggaattaaagaggaccagaaagtgtttatggtgatatggagacagcagaaaccctcaggcttggtacatgtgggcagctagagggtattctcatcttggggatgatgctgtgctggtctgagggaggaggctctgagtactttgcccacgtggaatcatctggatcacccacagagggaattcgtacagagggaatacgtacagtgtttggtggtgacagcgatttttgctgctgagggtctttggctaaacatgatctcttctagaaattctttgacttctatagattataacttgagtctgacttgatttactgttttatcctcagagctcatggtccatgtgggtggattgattcagatgggatgtgttttccagagcacagaagtgaaacacgtgaccaaggtagaatggatattttcaggacggcgcgcaaaggtaacaaggaggaaacatcactgtgttagagaaggctctggctgatggtatcaggacaaaggtagaatcaggcacatgaggaggtgttgcaagagcctgggctttggtgcttatcagaactggaccttctcctagcaatttcagctttctggtgggaaagataactccaatgaagaacaagaacaagaagatgatgatgatgcttaactttttggatgccgatatgagattgtacatgtaaagcattttgtataagacttggcccctgcattttagtttccttctttctcccttttccttcgtatagagtccatgggagaatgagggagatgatttttgtggcccagccaagaaagcaatgggctagacattaaagtgattacacttttattcttactggggttagttctgtgagttttcatctgtgccccattgccccatttatgtgatggagggaattttcatgggtacttcacgtgttgggattgattgatcctgggggccagggtgaagggtattttacgggaactctataaagcaggaagaagcaagtttattctttagaccagtagctctcaaccatgatgtggtcgtatatttatgggtcaacatgtgttgtggggatatcccaagtaacttgttattaataaaagttaagttgcaaaatttagtaaagactaacttttataaattaaaacatattccaggtcatctctctaacaaagtcatttgcacttgattcctctatgctatctgagtgggtcacagtgggtgacatcatgatggagtatggggaattacatctggtcccaggttcacctctgagagcttgccatacatttaaatgtcatccattgagtgattcacaggagaaaataggatgagaattgacattttgaggttgtgaatttgaatcacgagagacaaaatgttaggggccaggtcacttcattcatgtttgtgtctacacacccattaacttttcttaaaagctttaaaaaagcaatctacatggctttttttaatgccaatattcatttaacaagttatttttaaagaatctgctatatgaagaatacttaaagccccagtcctgatgggaaacttacaaccaagatggaggagatacatgtaaaataataaagacgtatataatacatcaggcaatagtaagagcctacggggaacaataaagcaggactttgtggtttttgttatgtgggtgcttggggagccctcactgagatgacatttgaggagagggagtgaaccctgcatatgtgtagggggaagagtgttcttgcagtcatagacagtagcaagtgcaaaggccttgcagccagtatgcaaggagcagccaagaggtccatgtggctggagcgcagtgacccaagtaggtgagggaagagcaagtagaagttgaagtcagaggtaaagggagatgggctgggtcatgcagggccttgcattttagtagaaatgggagtgggggccatgaagggttttgagcacaggagtaacatgatttaacttacatttttaaaggctcatctgctgaaaatagattgtcatagagaataagcagggagacaagtaagaaagctgttgcaggaatctaggtgagagatgagctggaccagaatggtatcagtggaggaggtgaggactggctggattggggatatattttgaaggtagaggtgataggatttgctgagggattcaatgtgatttgttccagaaagacagaaattaaggatgactccaggatttttagcctgagtatctggaggaaagcattgccatgtaccaaaatgggatggactggaaagaactggtttgggg

SEQ ID NO: 8401 - DNA, 2300 bp, Homo sapien
gaaggttgcttgagccctggagatcacgtcactgcaccccagcctgggcaacagagtgagaatctgttccctcccccaacctcttcctcccaaaaaagtagtaattctaatttaggtggagagatggggaaaaatttcaggctggatatcctataattttttgtttgtgtgaaacatacaggtagtggaaaatctagggttgtcatctcaagggcatcctgcaatcatttgctttttttctcttgaaaagcaactttcatctaatcttcccttatggccaatctaaagcagcccccaagtgactcttcaaacactactctgttttgtttcatcatagcacttattgacatctggtattttcttattcattcattcatttatttgcttcttttttctccacctcccgctgcatacaaactgcaaatgagctgggacctcgtctgtttttcttgttcaatgctgcataccagtgtctcaaacagaggctgctccgtatagtccttcactattggttttttaaattaatgagcttctcttgacatgattttgtgatttttgttcttttatcttaagatttgaaagttgagagcagcatgttttgcccactgaaactcatcctgctgccagtgttactgggtaagtagaagctaagggactccgtggggtatttgatttctcctgagttctgtgcattattaaaagccaattttacatattttcgattcccttgggtttgttgaagatggaaaccctaatgtggaacttcacagttttgttgaagcagctgttgttgaagccaactagcttatggtttcttgggaagctgaagcttcctgtttccattagaaacagaatgcatttgggtcctaaagggtgttctgggaccctcttacgtgacaaagggaaagtttctctgtggcattcctgcactttaaattgttatctttaaaaccacagttcgccttgaatcaggaactgaaattaccaaagagagacccagagctgtttttcatactgtggccatgtcagccttcttgtggttcctcaaatggactgagctctttcccaatttatggtggtttcctttgcctggaaccttcctcccagcacttcaacctagcaagcccgcccgatgcttccttacccttcaggtttccccttatgctccacttccttctgaggagcctgacctggccatctcctcagaccagattggtctcctgtttatgcctccacctaagtgctgagcttctcgttgctcatctccactggtttctaggttttcatccttttcccccatgcctttttctttatcccatggatgtagttctggaaggagaagaaattaatcaggtgctttgctctcatagccttttctttttctctttattattattttttgaactttggacagtaatttaaaccctgactcagcaaagtatacaacaggattgcctttgctcctattccaggcaatccagagtgtgtacaaacatgcacacaggcacgcacaccaaaatggtgttcattagataatttttctcaaagaagcagggttataatgatctcagaaggtatttagacattttcctagaggtctgtggagcagcctgcaggtttttgccctccgatccagagagctaccagtccaacccctgtatgtggtgacttggtggcactgggggttttgtagttttttgtggagaggttttcctttcttgcagaaaatctcatcttcttcagctgtttctctaccaagattgcccttcaaacatcagtttctctttgctttggttgctgttgttgcttcctagcagtccttcatttaattctacacacagtgttcttaatattaaattcgcttattacactttcaatcacacatggagctgctcaattcttccttacaggaaaattccaaatatttgttggagctaattttgatttctttcaaaataattccctctgaagggtttagagtcgatgttttcttttgtgtcctccctgctgtgtgagcctactgttggggcaggaagttaactgtcttctctcagggaaacagcttggatgaaaagactggcacattttctgttcattcccatcacttggctcttctctgatatgaactgggcagcatctaaatgtatctttcttgattttgttgtctctttgcatagagcatatcttgtgaaaacagaaatatccatgtaatggttttttcttgtagtgaccgctcgaaattgcttgagcaacatagagataatgggcaggggtccctgtgtgaagcacctagaggctgg

SEQ ID NO: 8402 - DNA, 2300 bp, Homo sapien
aggctacttggggaacatcttagtcctctgtagctcctgaacccagcactggtgcttcaagagagaaggtagcacgtctttgttcaaaacaaaacaaaacgacacttctggaggccacatcctgaatatgaatgttctactaagtcactcagttatggttctaaagggaaactgtaagaagacccacaaggagtggaccaagactattatttaattgcacaacttgaaactttgctgccagaagaggcagctccattcctttgactccagtgttgggctgttaactgctgcacctcattgcctttttttgtttttgtttttgttttgtaggagggtaggcactgttgggccatatgcacaaatattgtaactcttggtatctttactgcatcatagtcaataaacttctttgtaccctttggctaccttttggtgtgtgcatatctacataaaaggtgggaattgtcatgtgaaaaagatgggggtttgtggtattaaaagctgaattaaatttaaaagagtttaattgagcacagaatgattcatgaatcaggcagtctcctgagccagagtggactcagagactccagcgcagccacgtggtggaagatttatggacagcaaaaggaaagtcatgtacaggaaacagaagtgaggtacagaaatagccggattggttacagctcggtgtttgccttatttgaatagtttgaatcattggccatcttcgattggccaaactcagtgactggcacaagagtagactagagtccgtatactattccatttacgttatagttcatgatgtacagagaaacctttaggccaaacttaaaatatgtaaggaggcagctttaggctaaacttgatttaacagtggttttcagcatcgtgcaaccagtcatgtcggagctgtacccccgcaagaacctgcagaggttccgtggtgtgctggaaccagcttacatagcaagagctgattacaggctgagtacccctaatctgaaaatacaaaagagtggttgctatttcaactccaaaatctgtaactttgagtgccaacatgatgctccaaagaaatgcttattggagcattttggattttcagactagggacgttcaacttgtatgtattcggcaaatattctaaaatctgaaaaaaatatgaaatctgaaacatttctggtcccaagcatattggataagggatactcaacctgtattaagttttttaggaattttgcaagccagttgttaaactgttggtagcttgaaataggttatgatgggaatatttatgctgtggagattgctggctctctagcacatcacttctcaaggaccatgcagcgtagtgcttgggagcaaacgttcaacagcttttcagatgatacaggacaagttccatgagtctgcccatgcctaggtcaagccaatctagccgaggttgaaggtgcgtacattgagaacacctattttgaagtggtgactaagactgagaggtatcttgaagtgaagaaaccttgagttctaatctaggatgtccaagtcacccaagaggttctctatgggaatcaatggctgcctgtattctggaaatgctgatatcacatggccagaggaaactttcatgtctacatggtgagttggaggactgggcaggcgtatctttggaagcagggattgggtgattgcctggcgaggttgcacctctgttttgagaggaaaaataaaagaggttgctgtatctttaacacagaaggttttgtgttaatattacgtttattgtattttgtttgcatgaaatggatttctttctcagcacctatttgcctggtgccattcaagctcctaccctcagagggcttgtcatctaaaaggggagatggcacctgaagaggtctgagtgtgaggttcacctcagtaggttgaatttgtcacctctttttagaatgaaagtatacataacaattgggtaatgggccagatgactgaaatgagaaccttgatttagaggttcctgtttgcatctctgcaaccacttcagaaggcacgtgtttggtttgctctgagcctaacctagagtgctcgcagcagtctttcagttgagcttggggactgcagctgtggggagatttcagtgcattgcctcccctgggtgctcttcatcttgggtaagcagttgctttgaatttcttaagccattttttgaacttttctcacacagaagtgtgccagtcctgaaggctggttgaattggtagtctctcaggattgtgaagctgcgattgcagaactctt

SEQ ID NO: 8403 - DNA, 2300 bp, Homo sapien
tttttttcagacttgaaatagttcacttgattctgagtggtcaggaaactgtggctggccttatttggctctgcctccttggtaaaaagtaggacagagcaagcaatggggagcttcctgggtcagaaacagcagctctctcctagtgctgctctctgcaaggctggtcagaaaatcaacaaactcatacaagttggaattaaagttacataacatgatgttgcagtcatggggttagtcaatcaggattgtgtcagattaatcaatttgcaagggatatgagtttcatgaacttaacattgaattcatgggctagactaatctcgaggatacacagtgggccgtgttttgtcaataaggagtttcaaactcttttacactgatgctgataattagtggtagggattctttacctccccctttgaaatgttcaacacacttattatttctcattatctgtctttatcactaaaatgtaagttccgtgagagtagggactatgcctgcgtggctcccaccatatccttttgcttaacaatgcctagcacattagagatctgcaccaaatatttgttgaataaatgcatgaacaaatgaatgaataagtgagtcagcatcttttctgggaagttgcttttcaaaattgggcaattcagtggttgtaaacacccaggttcctaaatgggaaggtaccaagtaacaaagaaagaggaaagcctgtattttgcataagccatattgcataagtcatattatattgtaatacctgcctggcctgccccaggtataattaggcttttggtgatgaagtgtctaatcaaggcttttgataagtgtctgataattaggcttttggtgatgaagtgtctgatcaagtcctaggcagcattattttaattcaacatatattcactgagtacttatcaggtattagacttagggattatattaattgtcaagatagataacttgagagaggctgaattatattacaacctccttgtgattttgagaataagcaaaaatctcccttttgtcacttactagttgtataccgtagagcaactcacttagtcttttgtttggctttgttttctttctttccttttttttcttttttttttgaggcggagtctagctccgttgccgaggctggagtgcagtggcacaatctcggctcactgcaatctccgcctcctgggttcaagcaattttcctgtctcagcctcccaagtagctgggattataggtgtatgccaccacacctggctaatttttgtatttttagtagagatggggtttcactatgttggccaggctggtcctgaactcctgagttcaagtaatgtgctcacctcggcctcccaaagtgctgggattacaggcgtgagccaccatgaccagcctgtttccctttttatacatttggaataattatacctgcctcatgtagttcagtgtagtcatgaggctcaagtgagtaaatgtgtggaaattatttgcaaactatagagtgctattcaaatacgagatgctactttagaacaaagtttcccaactttggcactgttgacattttgagccagataattctttgctgtgggtgctgtcctgtgcatggtaggatgtttagtagcattcccggcccctacccactagatgccggtagcatctccccagttgtgacaatcaaaaatgtcttcagatattgccaatatctcttggagggtgaaattgcctctggttgagaactattattttagggttccagggagaatttagaagagattcaagggttaggatcccagaagtctctcatcgggcctttttctgatcagttttattaacctataggatggaggttaaaaaagcataaaaagttgcccaactgaaaaaaaacacaccattatacagttgtattttattttggacctactgagctttatattttcattgcattttccaagttaaccttttctctcatggtgttgctttcttagatatttcattatcagtctttccagtacccaaccacagcaggcacatttcgggatcggatttcctgggttggaaatgtatacaaaggggatgcatctataagtataagcaaccctaccataaaggacaatgggacattcagctgtgctgtgaagaatcccccagatgtgcatcataatattcccatgacagagctaacagtcacagaaaggggtaagctcattgccaccaaccttcttctgcagtgctctgtgactgctgtggtgctttctggagagctcgatgataaacaaagctgtcta

SEQ ID NO: 8404 - DNA, 2300 bp, Homo sapien
ccccccaattcaatgatctataacaacagagcaaagtctatgctcatttgcagactggaatcattaagtaatttaataaaaaaattgtgaaacagcatattacaagtttgaaaattcagggctggtgaaaaaaatcaactctaaatgatgataattttgtacagttttatataaaactctgagaactagaagaaattattaactttttttcttttttaattctaattcacttgtttattttgggggaggaagactttggtatggagcaaagaaataccaaaactactttaaatggaataaaaccaactttattctttttttcccccatactggtagataaagcaaactttataagtgggctattgaaagaaaagttacaagcttaagatacagaagcatttgttcaaaggatagaaagcatctaaaagtttaggctcaagatcaatctttacagattgatattttcagtttttaatcgactggactgcagatgttttttcttttaacaaactggaattttcaaacagattatctgtatttaaatgtatagaccttgatatttttccaatactattttttaaaaaattgtatgatttacatatgaacctcagttctgaaattcattacatatctgtctcattctgccttttatactgtctaaaaaagcaaagttttaaagtgcaattttaaaactgtaaattacatctgaaggctatatatcctttaatcacattttatattttttcttcacaattctaacctttgaaaatattataactggatatttcttcaaacagatgtcctggatgatggtccataagaataatgaagaagtagttaaaaatgtatggacagtttttccggcaaaatttgtagcttatgtcttggctaaatagtcaaggggtaatatgggcctgttgtttagtgtctccttcctaaagagcacttttgtattgtaatttattttttattatgctttaaacactatgtaaataaacctttagtaataaagaattatcagttatataatttgtgtatatacatatctagaagttctacattgcaggaaaaacagatggatatatatttaatctttaccaaaaagttttcttagtagagacaacctgcaagtcaataatggatacagttagtttctaatgggtaaacagaagtatacggatttccacagaattttcacactgttttggatagctgggaattgggcataacaacactacttagtttgagggctctttcaaagaaaagtatcaaagattctatttagtactttgcattacacttttaatagggaaaactactggctttcaagtctagtaaaggaatggaaattgaaaaatggaaacttattaattcttccccaaagcgaaagcatacttttattctcctcctgctttcattgacatgtggcaatttccagggaagaggcttactgattattaaagcagtgtacttattgtaccatctctttttcagaagtatgtgacgccatctcacttcaagtactgtgataacataactttcttacttttccaaccaaagacacagaaatcccagttcctcttttcctctaatacaggctgtaatgatttgatcatcattgccaccgccaaaagtaatttaataaacacccaattttggaggctgcaatacttacactaaaaaggacaccaaccaatgaggcttgtggcacatatcactacaagcacctaatatatatttatctatactgtatgatctcccaggtgtttctgaactctaaatttacagtagtgtattctgagaaccttcaactaaatctcgagacgtaaaaacgatgtctgacatgcagtcagagcatcaaaattatttagttctgcagaattccataaaaacaaaattgtaattattccaagtccgtagcctacttcattttcaagcaaaagagagcatttagctcccgcctgaaagttaataaatctctggtcagtgaaaccaggtgtggttctggaaagaagccaggttcctatggtaacttcggatcgccatttaagttgtctctcggcctcctgctctgacgtcacttccggtgttacctgtgtcgttaccgggagctgtaaacaaggtgtgcaagcatctgaagagctgccgggatgcagcagagaggagcagctggaagccgtggctgcgctctcttccctctgctgggcgtcctgttcttccagggtgagtgctccggctggctacgctccacttccggccggggggttagggaagatggtcgcttttccggttccgggtag

SEQ ID NO: 8405 - DNA, 2300 bp, Homo sapien
taggccttatgtagatgcctgcagttttggtctaagtcctgctgactggtgtccagaaaactgtgaggggcaaacatcctttttatttagcattttctcttcttaaccttctacccttggcctcttccttgcccagtgaggtgaagtggttgactgtggagccactcctgctaactggaaggaactgggcgttgccaggcactaagccaggaacttgaactcagctgagaagtgggatctggataactcctgcccctcagagcaaggctggcaaccagctcatgggtgtttggctacctgggggagggatttctgctcctgacaacaggcagtttgttcagttcttcctgccctgattcttctcctgttgcttttcactgcatccctgagctctttggtaactctacctctcaccagtttttgcaatttgctgtagacttcaaaatcctggctctacctctccttcctctgtagctgtatttccctgcaaagttggaagccaaccaagatcaagtttccttaactctttttctttcagggtcctggagctgaactcttctgacctacataccagaaaggctgtatcttatccttcctcaccaacatctgaaaggttcccccagcagactgattttaggtccctttctgaactagaatctgacaaagacgccacacagttttcagaaactctcaccatgcaacagattttcactagcacacagctggtctgcatttggggccacctctgctttctgagttccaacacaatggatttttgtggttgtctacctgtttttgctccatgcccatgtcatctttctcctgttgctttctgttttctgcacttctgcattctcctctcttttggtagaattttctcttttcttccctctttatgatgttttatttttttctactcagcctgccgccttctcttgttcctgccaccctttctgctctggattcagctagaagattttatgagtgactgaagagtttctagactgctaatccagggataaacgcaatctgtcttttttcagggttagattcccagcccagcctacttcttaactgcatgtgtaatcttcatccccctcctaccgatgtttctgtgccgcttcattaatctgtaaagatgacccaccctctttccagacaaggaggcatcttttctcgtttagattcctcagctctttagacttctcagtcatttagctattcaaaaaatgacagatgaaatccgaggcacaacaaagttatcatgaaaaccttttccttgagagccccatgtctgattgttcatattagctgttatttggtggaaagaacgctagatttttaagaaaagttctggttttgccacatggtagctgtgcaaccttgggcaaatcatttaccttcctcgggttcttagcgtcctcactggtagaatgggaatgcttcacaagggcgttaatggagatgaaacaatcagcaggagagcactttgtagattgcactcggatggcagggtgaatgagcagggatggtgtcctcatttgtttttaaagtcttcaaaggtaaaggattgttaagcatggagatttgatttgttgtttctgccaggtctcctggaaagctacaaactagaagaagtgcaggaatccttgtggtaacaggggtatcagctttttgtccacagagggtcctaaggaattccgactcccgttttgaaattgtatcgaatccagtcccaagtgaatgtggccctggggtggtgctttgagaagtggaatcactgcaggacagtttcaacattcacttcccaggcaagcctaaagcctgttttaaaagggcgtgtgggggccaaacccataacagtctgggacatttcagactggcaccacctcctctggctgtttccgaggccatctagaggccagagcccagtcagattaactgaaagtaaagagaggactgcgggagtttgggacctttgtgcagacgtgctcatgctcgttcgtgtagagggcgggagagaggaaaggaaggagggcattgggagctgaggccccacctttcatttcagaaaagtgcacaggcagagcgggctgagtcacaggcacaggtgaggaactcaactcaaactcctctctctgggaaaacgcggtgcttgctcctcccggagtggccttggcagggtgttggagccctcggtctgccccgtccggtctctggggccaaggctgggtttccctcatgtatggcaagagctctactcgtgcggtgcttcttctccttggcatacagctcacagg

SEQ ID NO: 8406 - DNA, 2300 bp, Homo sapien
gctcatgtctgtaatcccagcacttcaggaggccaaggtgggcagatcgcttgagctcaggagttcgagaccagcctgggcaacatggtgaaactctatctctaccaaaaatacaaaaattagttgggcgtggtggcaggcacatgcaattccagctacctgggaggatgagacaggaggatcccttgagcccaggagggggaggttgcagtgagccaagatcgcacgattgcattccagcctgagcaacaaagtgagacttcatctaaaaaaaaccccaactttttccatttgaatattataagaatttgatactgtcactcacctttttaaaactatttgaatacttcctacagccctaagaaaatccttaagaatccctaacatagcttgcaaatcccttcccatctggcccctgctgagtttcctatctcttttatttttttcatttttattttttgacagggtcttgctctattgcccaggctggagcatagtagcacaatcatagctgactgcagcctcaacctcctgagctcaagtgatcctcccacctcagcctcccgagtagctgggactacaggtgagcaccatcacatccggctaattttttgtatttttttgtagagatagggtttcaccatgttgctcaggctggtcttgagctcctggcctcaagcaatctgcctgctttggcctcccaaagtaccatatctggcgaatttcttatattatttcttacactcctcgttctccctgttacctgccgtgctggattttccatttctcttcctcatctctggacttcaaacatgctgctgcctctatctggaatgctttccactccacctggttcattgctgttcctccatcaaatttcagcttagatgtcacctgctcagggggaccttctcttccccatcccaccccagactatcttagatcccttctatcactcccacagcacctgaacgtcttttttcttagcatcaatctcctgaagttatctggggggttttttagagatgggatctcactatgttgcctaggctggagcgcagtggctattcacaggcacaatcacactcactgcagtctcgaacccctgggctcagtcagtcctcctgcctcagcctcctgagtagctgggaatacaggtgtacaccatcatgcggggcatggttattggttatgaggttatctgtttaatctccacatttccttttttatccaagaggactatttatcttgtttctcctgtattactagcacccagcatataactacagtacagtagacagaaaatatgtattaaataagtgaatttcatcaaaatgttttctagagtcccagctctgtaatctgcaacttagataacctgcctgagccttagtttgctcaagtataaaatggaaataaaaataaaaataatacttaccttagagggtcgttttgaggattaaataagatatatcagaaaagctcttagaacggtgcttggatatagtaagcatttgattaatgcatgcttaaacataaagaaaggttacatcaattcacactcataccagcagactttgacactatcactctttaccctgttcaacattgagtcttgtgtttttaaatatttttgtaaagaatataggtaaaaagtggcattttttctttggatttaattcttatggatttaagtcaacatgtattttcaagccaacaagttttgttaataagatggctgcaccctgctgctccatgccagatccaccacacagaaagcaaatgttcagtgcatctccctcttcctgtcagagcttatagaggaaggaagaccccgcaatgtggaggcatattgtattacaattacttttaatggcaaaaactgcagttacttttgtgccaacctactacatggtctggacagctaaatgtcatgtatttttcatggcccctccaggtattgtcagagtcctcttgtttggccttctaggaaggctgtgggacccagctttcttcaaccagtccaggtggaggcctctgccttgaacgtttccaagtgaggtaaaacccgcaggcccagaggcctctctacttcctgtgtggggttcagaaaccctcctcccctcccagcctcaggtgcctgcttcagaaaatggtgagtctctctcttataaagccctcctttttcatcctagcattgggaacaatggccccagggtccttatctctagcagatgttttgaaaaagtcatctgttttgctttttttccagaagtagtaagtctgctggcctccgccat

SEQ ID NO: 8407 - DNA, 2300 bp, Homo sapien
tcagcctctcaaatagctgggactacagttgtgcaccaccatgcctggctaattcttttgttttttgtaaagatagagtctcatcatgttgctcagactggtctcaaactcctggcctcaaaggatcctcccacttcggcctcccaaagctctgggattactggtgtgagccaccgtgcctggcaagaaacactttcaagtgggcctcactcccatcagtaatgtccctctcaggtcccttcccccacccacctggagtagccttaccttgcgagagaagggtagccagtaccaggccagagagaaacgtgctatgttccatctcccagcggaactcatccagtagataaagccaggtcaccgaactatcagcctgggtgagagctgccctcccctagctgactcacaggtaccggaaagaggagagtgggggaggaactagaagatgtctgcttctctgctttctgccgttgatggtgggaaattttcagagtgggggtgggctaggggtagggtaggaaggaagcggtgtaaattgctctatctctgagcagggagctggcagagaatatggaaaaggtggcctgaactttagcgtccctattgacaatgcaaccacatttacacacaacctaaacactgccacatctcgaagccccttgagagaagccgtcggccccatagcgcaagccgtagcagctagatttctcatggaggctgatctttctcaggacccttcactaggcagccagggacaccagatctagcagcttcttgtcagtgggaggttgggctttagagaccccagccagagatttgaatcctgggtccaatactgcctacctgtggggcctgggccagccataaaatttttcagagtcttattccattagtaccattattaggattcaaacaagatatttgcatggtgcctcacgcatcatatgtgctcattaaggggtagttattaataataatataattgactgacaggcaatattgagcctcccggtgagacaaatggacctttttcccctgtggcctacgaggatctgaaactcttcacgctgctgcagttagactgtcacttacctggggacagagtcatgcctgtcttgctcactgctgtatcttgtgcctggcacataacgggagctctgcacatttttgttggctcactgactgactggctgagggagataggggcctgagatcctggacattcagtccgggctctggcccctgaaaatgtgctggcctgtcctcggaattgttccacctattgccttccaggcgcctctttcatgatctcaaaagaatagtgaaaccaggtgccgtgtctcacgcctgtaatcccaacactttgggaggctgaggcaggtggatcacaaggtcaggagttcgagaccagcctgaccaacaaggtgaaaccccgtctctactaaaaatacaaaaattagccgggcttgctggcacgcacctgtaatctcagctactcaggaggctgaggcaggagaatcgcttgaaccccggaggtggaggttgcagtgagctgagatagcgccactgcactccagcctgggcaacaaagtgagactctgtctcaaaaaagaaaaagaaaaaaaaagtgaaaaaaattcctgaatgaaggcctggactgaggtggctttccatttggaggtccagccccaagcatctgagagtccctcctaaattcattacctacagcaacaacaactagcaacaagtaacaactggctacgatcctaacaactaatgacagggacatttatctccctcatgaagaaacggtcccaggaccatctcccacccagcatccattgcggttccctgtgcaagatgagtctctgagtgggaatccagcactctctccctcttcttccccaccaccttcaccctccttaacggaaaaacaaaaggcatctgcacctgcagccctgctgaggcccctgctgctcacacttgcagcagagggtggaggctctgggttcttgccttctctcaaaggccccagccccaacagtgatgggtggagccagtctagctgctgcacaggctggctggctggctggctgctaagggctgctccacgcttttgccggaggacagagactgacatggaacaggggaagggcctggctgtcctcatcctggctatcattcttcttcaaggtaagggcctactaggggtctggaagcctggggaagggctcaagggaagagcccatcactagtgagacaggaatattggtatccctaaccttcagcctacctctgct

SEQ ID NO: 8408 - DNA, 2300 bp, Homo sapien
acatttcctaggtcgactgctagcccccagctctgaagtagggaacatatactttttccttttagtttcttggcctatgcccttttgggctgcattcaaatctaagatggcggtaacagggtcctctcttcagccatttaagtactctgtttgcatttttcagagacaaggattccttctcctccatgggacactgtttctctctagcagagaacagttaagagcctccattttgcccttctttgaactctaaggtgacagcagaggtaggctgaaggttagggataccaatattcctgtctcactagtgatgggctcttcccttgagcccttccccaggcttccagacccctagtaggcccttaccttgaagaagaatgatagccaggatgaggacagccaggcccttcccctgttccatgtcagtctctgtcctccggcaaaagcgtggagcagcccttagcagccagccagccagccagcctgtgcagcagctagactggctccacccatcactgttggggctggggcctttgagagaaggcaagaacccagagcctccaccctctgctgcaagtgtgagcagcaggggcctcagcagggctgcaggtgcagatgccttttgtttttccgttaaggagggtgaaggtggtggggaagaagagggagagagtgctggattcccactcagagactcatcttgcacagggaaccgcaatggatgctgggtgggagatggtcctgggaccgtttcttcatgagggagataaatgtccctgtcattagttgttaggatcgtagccagttgttacttgttgctagttgttgttgctgtaggtaatgaatttaggagggactctcagatgcttggggctggacctccaaatggaaagccacctcagtccaggccttcattcaggaatttttttcactttttttttctttttcttttttgagacagagtctcactttgttgcccaggctggagtgcagtggcgctatctcagctcactgcaacctccacctccggggttcaagcgattctcctgcctcagcctcctgagtagctgagattacaggtgcgtgccagcaagcccggctaatttttgtatttttagtagagacggggtttcaccttgttggtcaggctggtctcgaactcctgaccttgtgatccacctgcctcagcctcccaaagtgttgggattacaggcgtgagacacggcacctggtttcactattcttttgagatcatgaaagaggcgcctggaaggcaataggtggaacaattccgaggacaggccagcacattttcaggggccagagcccggactgaatgtccaggatctcaggcccctatctccctcagccagtcagtcagtgagccaacaaaaatgtgcagagctcccgttatgtgccaggcacaagatacagcagtgagcaagacaggcatgactctgtccccaggtaagtgacagtctaactgcagcagcgtgaagagtttcagatcctcgtaggccacaggggaaaaaggtccatttgtctcaccgggaggctcaatattgcctgtcagtcaattatattattattaataactaccccttaatgagcacatatgatgcgtgaggcaccatgcaaatatcttgtttgaatcctaataatggtactaatggaataagactctgaaaaattttatggctggcccaggccccacaggtaggcagtattggacccaggattcaaatctctggctggggtctctaaagcccaacctcccactgacaagaagctgctagatctggtgtccctggctgcctagtgaagggtcctgagaaagatcagcctccatgagaaatctagctgctacggcttgcgctatggggccgacggcttctctcaaggggcttcgagatgtggcagtgtttaggttgtgtgtaaatgtggttgcattgtcaatagggacgctaaagttcaggccaccttttccatattctctgccagctccctgctcagagatagagcaatttacaccgcttccttcctaccctacccctagcccacccccactctgaaaatttcccaccatcaacggcagaaagcagagaagcagacatcttctagttcctcccccactctcctctttccggtacctgtgagtcagctaggggagggcagctctcacccaggctgatagttcggtgacctggctttatctactggatgagttccgctgggagatggaacatagcacgtttctctctggcctggtactggctacccttctctcgcaaggtaaggct

SEQ ID NO: 8409 - DNA, 2300 bp, Homo sapien
catctcctgggttcaagcaattctcctgcctcagcctcctgagtagctgggattacaggcacccaccaccacaccccactaatttttaaaatatttttagtagagatagagtttcaccatgttgaccaggatggtctcgaactcctgacctcaggtgatccacctgcctcgacctcccaaagtgctgggattacaggcatgagccaccatgcccgtccctgccacatttctggattggctggcatgagaactcccagacagtggaggagttgttcaagtacacatagctcattggtgtccaagctggatccagagctcaggttttctactgctgaactcaaatgctctttccatgatatgcagccacctcacccaggcttgagagttgctcctcaacctgtgttgtctttacctgacttttccttgcatttctctcagaaataattctattctaaactctcactgtcctcttcaagtctcccaaccggtcatcacccagctcagtttcagcaggtggcattgcctcccacctggattttttagaacacggaagttgttattgtcctttctcctttagcttcctttccctttataaacctatttgtggccagtgccgtttgcacttcctttctcctggtcttagagggtaacgttgccttcctctctgtgctcttgaccccactcttgactctgtccttccaccatcaactccaggaccttgctctactcatcatcttctcctttagcctagaaatgtgctcaagtttctctcaccctcaaaaacatttattcttagactctacttcctcctctacctaccacccagtcttttctccctcctcatccaaatgtctttaaagaatagtctacacttgctgacctcatcacctgaccttcaccttctaccaattttcacttggcttccactcacaataccctgctgaaactgtgctaaatcacccatgatgcatattctgccacatcccgcagacttaaacttttaaatatattcttatattagtgggctctctttaacattttatactcttggtaattctcttcttctagaagctctctactctcttggtttccaaggtagtgcatacatttgattatttcagctctttgattctccttttatctctttcctggaatgtttttttttctctaactgccccttaaaattggtgccctcactgttccatcttcagctccctcttcctcacatagtacttgtgtgacttcagcaaattccatggttttaactttcccaggatgtccagactccaggcatcaacccagttcatccacttcctattggatagtccaatggagtattcatgcaggcacccatactatactgtacactcagtctggcaccatgaaaactaatctctccaatgagactatgagttctgtagagcataagtgttttattcatttttatttcctcatggcatatcacatattagggtctcacccatctttgttgaccaattggccaactgcccaactgagtgaatggacatttcctaggtcgactgctagcccccagctctgaagtagggaacatatactttttccttttagtttcttggcctatgcccttttgggctgcattcaaatctaagatggcggtaacagggtcctctcttcagccatttaagtactctgtttgcatttttcagagacaaggattccttctcctccatgggacactgtttctctctagcagagaacagttaagagcctccattttgcccttctttgaactctaaggtgacagcagaggtaggctgaaggttagggataccaatattcctgtctcactagtgatgggctcttcccttgagcccttccccaggcttccagacccctagtaggcccttaccttgaagaagaatgatagccaggatgaggacagccaggcccttcccctgttccatgtcagtctctgtcctccggcaaaagcgtggagcagcccttagcagccagccagccagccagcctgtgcagcagctagactggctccacccatcactgttggggctggggcctttgagagaaggcaagaacccagagcctccaccctctgctgcaagtgtgagcagcaggggcctcagcagggctgcaggtgcagatgccttttgtttttccgttaaggagggtgaaggtggtggggaagaagagggagagagtgctggattcccactcagagactcatcttgcacagggaaccgcaatggatgctgggtgggagatggtcctgggaccgtttcttcatgagggagataaatgtc

SEQ ID NO: 8410 - DNA, 2300 bp, Homo sapien
acgtatatgtgtatatatacatatatgtatatgtgtatatatgtatatatgtgtatatatgcatatatgtatatgtgtatatatgtgtatatatgcatatatgtatatgtgtatatatgtatatatgtgtatatatgcatatatgtatatatgcatatatgcatacatgtatatgtatatatatgtatatgtgtatatacacttgtgtgtgtgtacgtgtttacaactgctatttggcaatagttaataaaattacaaatgcaaatacaagtgcccaacaattcaatttatttgtgtttgttacaaatagtcttatgtatgttcaaaatcacatttattgttagagctaaaaccataaagctgtaaaaagtataaaaagaagacaggagaaaatctttgtaactgtgggtttggtaaagatttattagacatgataccaaaagcacaatatatagaagaaaaaatcaataaaatgtacttcaaaattcaaaccttttgcacttcaaaagacaccattaagaaaaacaaaccacagattggtagaaaatatttccaaatcatatatctgataaaggacttatatcaaaaacatatgcaacccaatagtaagaagacaaacaaataagtcaacttaaaaatgggcaaaagatttgatacacatttcactaaaaatatatgaatggttaataaacacaagacaggacactcagcatggttagtatctagggaaatgcaaattaaggccataataaaataccatattaaatccatagaatggctatattaaaatacagttacgggcctggcgcggtggctcacacctgtaatcccagcactttgggaggtcaaggcgggtggatcgcctgaggtcaggaattggagaccagcctggccaacatggtgaaaccctgtctctactaagtacacaaatactagatacacaaatactaaatacacaaaaaatgagctgggcgtggtggcatgtgcctgtagtctcagctactcgggaggccaaggcaagagaatcgcttgaacccaggaggtggaggttgcagtgagctgagatcgcgccactgcactccagcctgggccacagagcaagattccacttcaaaaaaaaaaaaaaaagaaaaaaaagaaaagaaaagaaaaaaaagaaaatgtcctaaagctggattatggtaatggctgtacaattagttaaatttactaaaaatttctgagaacaggtgaaatcacttaagatgggtggattttatggcatgtacattatgcttcaatgcaattatttttaaaaatgatatttatacaatgttagtcattgcagaattgttgtaagagcaaaagattggaaccaactaccaacttaaatatccactgatagataacaggttaaataaatcatagtctatttgtacaatatggttgcattaaaaaggatataatggtatcttcatataatggtatgcaataatctcacaagatgtatagtttgatatcatttgtctaaaagataggggaagggaggataatatgtacttgagaatgtgctcatatatgcctagaatacctccagagagatatataagaaactggttttaagaccaggcatggtggctcacacctgtaatcccagcactttgggaggctgaggcgggcggatcacttgaggtcaggagttcgagaccagcttggccaacagagcaaaaccctgtctctactaaaaatacaaaaattagccaggtgtggtagtgtgtgcctgtaatcccagctgcccgggaggctgaggcaggagaatcgcttgaacccaggaggcagaggttgcagtgagccgagatggtgccactgcatttcagcctgggtgacagagccagactgtctcaaaaaaaaaaaaaaaaaaaaaaaaaagagaaactaatttgtctctgaagagggcaacagggtcactgggtagcaggggatggcggtggagggagagctttcactgaatatttgagccatgtgaattataacctatacaaaaacgaaataaaaattacaacacaaaaaattatattcaaatccagggggttatttgatcttttcatttttcttttacaattttccccaataggtggcgcttctgaaacacagtatttgtttttatttttattttatttgagaaacccccaaatttgctctgatggcctttcttctccatttgtcatctctgggaaccttgagtctagatttagggctgaaagtctctctgctaggagctttccaaaatgcattgctttgattctgggaactgaatagga

SEQ ID NO: 8411 - DNA, 2300 bp, Homo sapien
caggcgcacatccacatgatcagctaatttttgtattcttagtagagacagggtttcaccatgttgaccaggctggtcttgaactcctgacttcaagtgatctgtccacctcggcttcccatagtgctggaattacaggcatgagccactgcacccaaccccattttaactatttttaagtgtaccattcaatggcattaaatatatccacaatgtgtagccatcatcactacccatttcagaaatttttcatcctcctaaacagaaacttggtacccattagacaataactcccattcgcctctccctccaatccctggtgacctctattatactttctctctcaaggaatgtgcctattctgtgtaccacatataaactgaatcatacactatttagtcctttctgtctggctcgtttcagttagcataacgttttcaaggttcatcaatgtttcagcgtgtatcagaacttcattctttttcaaggctgaataagtcatctgtagctatataccatattttgtttatgcattcatctgttaatgaacattctgggttatttctaccttttggttattatgaatagtgctactgtaaatatatgtatacaagtatctgagttcctgctttcagttattttgaacatctatatcaaagcggaattgcttgatcatgtggttatactatgtttaactttttgaggaatcatcaaactgtttttccaaaaagtctggactatttaacattgccatcagcaacgcatacggtttcaatttctccacatctgccaacaattactttcctttttttttatagtagccatcctagtaggtattaagtggtatctcatgattttttttttcatttccctaaagactagtggtgttgagcactctttcatatgcttatccaccatttgtacagttggccttccatatctgtgggctctgcatctgtggcttcaaccaaccatgaattggaaatattccaaaacaaatttcatctgtattgaacatgtacagactttttgtcattattccctaaacaatacaacactatttagatttatgttgtattaggtattataagtgatctagagatgacttagtcatctctaggatgacacaggaggatgtgcataggttatatgcaaatactgcatcattttatgtaaggaacttgagcatccttggattttggtacccaagggggtcctgaaacaaatcccccacagataccaagtggatagtcattctcttggaatgtatcttctttggagaaatgtctattcaagtcctttgcccttttttgaactgaactgtttgggggtttttcgttcttgtagttctttacatattctagagatgaatcctttatcagatatatgagttgcaactattttctctcaatctgtgaattttcacttgcacagcgcttttaactcttgaaaattatgctgcttctattatttatgtgtatcccgatctcttgccctcgtgacccgcccgtctcagcctcccaaagtgctgggactacaaggcgtgagccactgtgcctggccatctatgtgtatctcaaaacaaccttgtaggatgtatactgtctccactttacagataagaaaactgaaatccaatcaaagatagcacactccaaagattgctccaaagacagcacaacaataacaaacttgtagttgttattgctgttagtgttatccctttgaataatagagagtaacagaagctgcttcaaaaaggtctaggactggtgggaaaataagagagcagacccccaacagaggttgcgagcagagccagggatcacagagttttatctgccctcggtacgctgatttccaaaacccagcctcatattctatactccaaagcgcactgccaggtgggccaactccagcccccacaatccgatgccaaggccacttcttgccacttcctgcccgcctccagcccgcccctaacaagctagcgcatgcgctgtaggactatttgcgcgccgttccccccggtgagcctgcacaccgtgcttccggcgcggagatgaacttccacatgccccggcgcttgttgatgacgtaacttccggttgctgtgctgagtcggaagtgggaacccttcggccgctgagattctgtcgtgtcgtcgctgctggcacttcaggctctggtaagacaggcaatagcttcaggggacggggtcgttgactttgcgttgtgatattttctgctggtccaatgccacttcaagcctgttcactcttatcttctccaaattcctt

SEQ ID NO: 8412 - DNA, 2300 bp, Homo sapien
gcagagtaaggtatcctttatctctgtctcccccttacttcatcagtaaggaaatgagcaaacacttggcgataactctaggcctttagaaactccagggcagattttgttagtagccttaacacactcaaaagcaaatgactacaaagcaaatggctacacataagcataaactcttcctcttatggcaccgcctttgctgatatttcgctcttgccttactccaggagacccccatcaatttgaacagaagtttaattaccgccgtcccatgtatcctatcctaagatacatgtgggggacagatacctatcgggagagcattaaggtgagagagtttttgatgaaacctgttgctttatataagccctaatgagttgtaattcagtactaaaatggttttcttgtgggctgggacttacaggatttggctgactatgcctctaagaatttagaagccatgaatcccccacttttcctccgctttcttaacctgctaatgaatgatgccatcttccttttggatgaagccatacaggtaaaaaaaaaaaaaaaaaaaaagatttaacttctccataccatcaaatcatcagcagtacatacattttaccttttaatcataatagagcagtccttatgcccctagtaccagacttgaacaccaaaaatttgtgattagtagtgtaccaccaagcttgtcattatagagctttctagttcattccattagagaccaagatcaagggtcattgaagcatcatgagatggacattttggcagagtcaaaaataccatatggtgaagccaaactaagttgtactggcaggagtaattcatcaggccagcactacagaaagaaatcagaggagcttgcttttggtcagtgactttcaacccttttaatcccaacatgtcagtaaaatatctcactaagacagtgatttttaacccactttcctaaaagattctgatttttgcaccactacttgaaagaaaatctctgatttgggttattttttcatataaaggctccaagttgtcaatacttctcatatttccactgccttctaaattcttagctatatggtgaaacaaaggtttcacaaagtataaaatgcagctgggtgcctctcagctccttcagtgtattatttccttaaccttccctggtggaactgcttacttctcccataaaaacttggctgtctgtagagcaaaacttcccttacctgtgatgggtataggatggacaaggcactgacctaaagggagatgaagcaggtaaatcctgagggtagcctttagacagtcatgagctcctccttatgatcagcaatcccctgagtagcttgtgtttaatttgtgagaaaggtttgatctgatttcttcataatcctacgctttaggatttaagataggttttcttcaaaagcgagaataggtcctgttacaaacaggcccttttaagcaagaggtgtgtgacacaaagcatgaagcagatggtattttcatgagactgtaagtttaacaagttgtttgctacaacaggaaggatgacgtgaggtagagagttttaaataattatggttcttccacgcatcttgcatatgtgatagagctttgatttttttgtaagcaatttggcaggggggatttgttttcatctttcaggaaggattcattgttttttcactatagtgtggggttttttagttttttgtttcttggcctgggtttcatatattaaactattcatccttctttgcatttcacaatgctatactatttctaggggaattacctgtgaatctacccaagctgaaacaaatctgtatgaagccacaatttctttttttcctgaaagttcttttgagcttcagccttatgctgagaaataaaggctcatgtcttttacatggtccctcgttttcccagcttagttgactggattttgaataggacctcttaaatgtcacgtcccttcaactgcacctttcttctctgatatatcccatctctggtttctgcagtatttgagcaagataaagattcagcaaattgagaaggatcgaggtgaatgggatagtctgactccagaagcccgccgagaaaaggaggctggcctacagatgtttggacagctggcacgtttccataacatcatgtccaatgaaacaatcggtacccttgcctttctcacatcaggtaaggacatgaagtactgcttccccccaaaaaagtaatggccaagatcagcttcacttgggggatcagcccagctgaaactaagaattcagacc

SEQ ID NO: 8413 - DNA, 2300 bp, Homo sapien
acgtttcactttttttttaggtaagtaacatcaaatatgtgtgacctggctgacccagcctgccttaccaggcctctggaggggaccctggggttaccctcaggagatgaatctcacagtatggttttcctaaccagctctcttttggcttcactgtttttctttatctggcctgaaccccaggtctttgtaatcatttgctgttatcttcccctttcttgctccttgtttccatacccctgccatgcaagatgtcagcctagattaactcagccattcccctctgctgtaatatccaaactgcagaccattgttggaggaaaaacacaatttttagaatggtacaaccacaaacttatctctaacgttgcccaacaacccttctgtgtgtccttcagctattccaaactttggcctccttcctcaaattccttctcatacccccctcccattgacccctcacagtccgatgactttgccttcattttgctgggaagataaagacttcagagactttgaagactttcagacctctctcccataatcacatctgtggaaaaggccccatagatccctggctagttctcttttcctgcctcatcagggctcttgtcaatatccctttttatcaggcaggatggcctgtgcctgtaatcccagagctaagcaagaggctgaagtgggatgatctcttgaggccaggagtttcaggccagcctgggcaatgtggcaagaccccatctctaaataaataaatgactgcctcttctctgtcttcaatttctcccctgagttccacatccccctttggttttctgacttgtaatcctttacagccatatttcttcaccattcaccctggattctatcctaattttttgaaaaggcgctagttagttaaagattgccatattgctaaattaactttcccatccttaatttgacttttctgcagtatctagggcagcagaatcactccttcattgaaaagttcttagttccttgattacacttctaatttttctttccatctctctaaccattccaaaaatcggagatttacttctgctcagacttccccaggttacattacttatagttctgttcctctcatcaaatgccacttccctacatacatcttttcctcctcatattaaactatgaagtttcagccctctgtagtatacagctgttctcttacacatcggctcaaggatcttttctaggaagtatgctgaaatcagcaccatgcctaatctgatggaatgccccctctctgagtatacattgcaacttcagatctcaactctgccacttccaaactgtgtggccatttttcaagcccagtctcaatggggacaatgccttacaggctttctttaaattccaaaatgcctggcatagtgtgggcgttcaatacaggtgattttttcctcacatctgcacagctccttgtggttaactagggaattaggggaaatggattccaatcgtgatacagcactttggggagattgggattacaaaaaatcaactttaaaagggctatggggccaggcgcggtgattcacgcctgtaatcccagcaccaaggcgggtggatcacttgaagctaggagttcgagaccagcctggccaacatggtgaaacaccgtctctactaaaagtacaaaaattagccaggcgtggtggcgggcgcctgtagtcccatctactagggagactgaggcacaacaatcgctggaacccgggggacagaggttgcagtgagccgaagtcgtgccactgcacttcagcctgggcgacagagcgagactgtctcaaataaaaagggctatgggttgagcctggtgacagcctgtgtggtgattgctcggcccctaactttatatgtttggccttggaccctctctacctctgtacaacgatcgtgttggactagaagaatctcagcgaatccttctccagtactgacttcaaaggttctcagaatcgcggcgaaagcaccctacgcaaaatagcggaggtcggcgccaagaaaagcactgcaggttcagggcgcatgcgcatttccgctccttgccggttttccggacctctacgagtggctgccccacaaaatgcctgcttctctgcggaatcctactgttcttcacatgctctctaataccatcttttcatatccactttctcttccatgttgaaaaattaaattgacaggctggattctgcaaagatctttggacatttaagtatcttcgaccggcgcgaaaagaggcggcctgaccttggaagtgggac

SEQ ID NO: 8414 - DNA, 2300 bp, Homo sapien
acctctgcagaccgttatgcatattaaagaagggggggcggcaaatacaaaagaaaaataagagagacgagagagagagagaaagagagagagagagagagagaacgaacaaatcaggatgcttgagggaatccacgtggtcgccaatctgtaactgatcagagcagctacactgaagcaaaaaccccagcgcccaacgctaaatatattgcaatggagaaaccgtccacaatggggtgtctctgtccttagcagagccttggggctgccgtttaagaccctcctgctactcccacccttttagcatctagtaaaccacgcgctgtaacaacggaatcttgttctgtgtattgcgttgtgcgagtgtgcgctttgcaaaccatctgggccccatcctgcgcggttggaacgaagatcgattcgggacgagttgggggagttgaggcttgcctgtgtctcctccctttcattgctcctctccagcccccatcccatcgtccgctctgcacaaatgtttcgccagtggagggacgtaggttttcagcaccaggaggctgtggaccttctctggaggcgtgaagtgcaccctccggagggccagagctgagtgcaacctgctcacaacgaccctctccctccttcccaaattcgccgccccaggctgtaatattacatgcagtgcgctgtaccggtgcgggagtccaggaaggctgcatgaccttccagcgaactccccctcggcttgggggatggaggctgccccggggcctgcaggctgtgtatcgatcccccagcctcagccaacgcaagttctcccgacacaaacccctccctaccctctcggctttcccagccttgcaggcgtctaacgctatgctcgaggcgccctcccctctttcccgcaataaagtaaacccggtggatattcattcccctccctaactcgcctccttctttccccctcccccctcagcttactaaccccgcgcacagagctcgccgccggcgggccccttccacccagtgtatcataatgcccaacgctctcctcctccccctctcttaatcagaaacgtgctcgcgagcccccctccctctgcgtgcatacattagggtctgctttgcatgcagcggcaggcagagaccggaggaagaaggggcgggggcgcttttgcccgcctcttccctccaggccccgttagccacccagcttcagcttcgttgtaacaccgcgtcgttagcggagcacgccgtggcctcagtgcccgggctggagaaacacaacccaactccctgcagaagggcacgaaagccagacgagtgcacagtagagcgaggaggtggcaggagacctgccactcggtgtgtgctttttggaaagagctccagcatgaaaatgggaggggctccttttttattttttaaagtgcgttcattgagggcctttctgttttgcatatagtaaactgggcagcgcttctgttttgcatgtagtacaataagggctcttttattctagaagcgttcaattcgggctaacccatcttgtatccgtgccctggggcggaggagaaggctcactgctccccgacccagccgccgcgttatactggaagctgctctcccgggctgttcgattcccagcgcgtcccgggaacgtgtgtaatcggcctctcggcgctcaaggctgcaggcggcccggctccctacgcctccatcctccgcgtagtcctcgccccctccccctctctccggaacccgcgctctgctccgggctcccgggcttccttcccccctccttttcccgagcaatgcctctcccggagggcggggcatgcagttatccaggttgcggggccggcgggcgggcaggaggcggcggcccgggcctcgggatggagttgcagcgcccaggcgtcagaggcggaggcccgaggccgctatacagattgcggggctggcgggcgcggcccggcgctctgcatagcggccggcagggtgcaggcggccgggcggcgcagagctggttaggcaggttccggggccccgtgcccccccctccgcctccccgcccccctgtgttgtcgcctctccctctcgctgcttcacttcacggggcgaacatggcgcacagctgtcggtggcgcttccccgcccgacccgggaccaccgggggcggcggcggcggggggcgccggggcctagggggcgccccgcggcaacgcgtcccggccctgctgcttccccccgggcccccggtcggcggtggcggccccggggcgcccccctcccccccggct

SEQ ID NO: 8415 - DNA, 2300 bp, Homo sapien
tctaggagggagggagggaggaatcttgctcggatgaggtaatctgtgaaagggaggaggggttcagtcccgggatgggaaaccccggcgagggggtctgtgccaagggatttggggaagggtcagggggaggagagcggggggcaaacgccctcagccagatgggcccaaaccccggggtgggggcgcctgggggtctgcagccctgcatgggggtcccaagatgggagagccattcgccccgggtcagggaccccgagatggtcccagaattgggatgctcctcaatcccggatgggggaggggagggggctccgcagagggtcgagaccccggacctgggggttcctcgcccccttacctctccgctgccgcctcccccgccgctctccccaaacacggcccggaaccggcgcaggttggtgccgatggcggccgagacctgcagcgccgcgtcgaagcccgggcccacccggagcagggccggccctgaagaggctgaggacgatgacgaagacgaagacgaggcggacgacgaggaggctgctgaggcggcggccgctccccctggaaccccagccccgctgcttcccgccgccgccgccgcggccgccacagccgggggggaggggggcgccccggggccgccaccgccgaccgggggcccggggggaagcagcagggccgggacgcgttgccgcggggcgccccctaggccccggcgccccccgccgccgccgcccccggtggtcccgggtcgggcggggaagcgccaccgacagctgtgcgccatgttcgccccgtgaagtgaagcagcgagagggagaggcgacaacacaggggggcggggaggcggaggggggggcacggggccccggaacctgcctaaccagctctgcgccgcccggccgcctgcaccctgccggccgctatgcagagcgccgggccgcgcccgccagccccgcaatctgtatagcggcctcgggcctccgcctctgacgcctgggcgctgcaactccatcccgaggcccgggccgccgcctcctgcccgcccgccggccccgcaacctggataactgcatgccccgccctccgggagaggcattgctcgggaaaaggaggggggaaggaagcccgggagcccggagcagagcgcgggttccggagagagggggagggggcgaggactacgcggaggatggaggcgtagggagccgggccgcctgcagccttgagcgccgagaggccgattacacacgttcccgggacgcgctgggaatcgaacagcccgggagagcagcttccagtataacgcggcggctgggtcggggagcagtgagccttctcctccgccccagggcacggatacaagatgggttagcccgaattgaacgcttctagaataaaagagcccttattgtactacatgcaaaacagaagcgctgcccagtttactatatgcaaaacagaaaggccctcaatgaacgcactttaaaaaataaaaaaggagcccctcccattttcatgctggagctctttccaaaaagcacacaccgagtggcaggtctcctgccacctcctcgctctactgtgcactcgtctggctttcgtgcccttctgcagggagttgggttgtgtttctccagcccgggcactgaggccacggcgtgctccgctaacgacgcggtgttacaacgaagctgaagctgggtggctaacggggcctggagggaagaggcgggcaaaagcgcccccgccccttcttcctccggtctctgcctgccgctgcatgcaaagcagaccctaatgtatgcacgcagagggaggggggctcgcgagcacgtttctgattaagagagggggaggaggagagcgttgggcattatgatacactgggtggaaggggcccgccggcggcgagctctgtgcgcggggttagtaagctgaggggggagggggaaagaaggaggcgagttagggaggggaatgaatatccaccgggtttactttattgcgggaaagaggggagggcgcctcgagcatagcgttagacgcctgcaaggctgggaaagccgagagggtagggaggggtttgtgtcgggagaacttgcgttggctgaggctgggggatcgatacacagcctgcaggccccggggcagcctccatcccccaagccgagggggagttcgctggaaggtcatgcagccttcctggactcccgcaccggtacagcgcactgcatgtaatattacagcctggggcggcgaatttgggaaggagggagagggtcgttgtgagc

SEQ ID NO: 8416 - DNA, 2300 bp, Homo sapien
tcactatgtaccaggcattaatcactttacatacaaactagtaaatcaatcctcacaacaaccctaaaaagtatgtactattgttatccccagtttatagatgaagaaactgaagcatgaagaggctaagtaacttgcccactatcatacagtcaggcagcagcagagctgggatgtcaaccaggtggtagggctcgagtgtgtgctcttaatccccacatgatactgctcctcgaaaagctcccagtccaggaggcagggcagacacataattctgagaccagcaaaacaagttcgagaggggtcagcgtgggacctgttcctgaagggcgagttttgaaggatgagtgggagttagttggtgggtggagaaggtacagtctgtagaggtccaaaactcctgctgcattcaggttattctaattaagtgaagacaatgggaccatgctggggaccaaagatgaggctaatgtgaaggtataaaccacggaaacctagtactacttgactgttaggagcagtggtgacacaggtgctcccagaaccagcaatgccaggctagggagttttgagtccactccaggaacaatgggaacctcccaggagccccttatccaggcttatctgccccagatcactggagacagcctgcagaccaaaaccccagagagatgcagtggtgattccaactggagattcctccagaccagctcctccgagggaaaccaaggagtactgcattctgagcgcttctccggaggctcaggctctttgggggactagagaacatgagtgaattgaagcagagcccgaaagaagccagcctggtggactttaagaaggtggctggctgcctgaagttctgagttcagagttctgaggcccaacccaagtattttatgagaataataacaataaaaatggtgcaggccagctctggctccaggaccaaggaaattagatacatggagataaccaaagaatgatgaaaggcaatcagtccaggatacaggggagagagaaggtgttctaaagaaagcaatggaaaagagaaaacggccctcaaaaggaaaacaatgagaaactgtcttgattgtacttgtaagaaatgattgtgcggttaatattattttttgaaccctgacattcagagtcagtcacctggcacatagtggatgcttaataacaggtgtggaataaattggctgctacttgcccgggcagtgggccagactcataaacatagtggccattcagaatcctgcaacgttcatgttttcgtgtattagcggtggaaaataataggaacaaggcgagacctggacttcagtcccagctctgccactaagtggcttggctgtagagcttaactcttccacagtcttcatctgtgtaatgggaataacgatccgtacctctagcaggtgcgaggcgggttgtaaatggccacgcccgggagccgcaagaaccacggtgatccgcgcggccgcaggtgggctggggctcgggcaaggccgccctggcctccgctgacccccgccccgcccgtctcgtcggtcccgcaggcgccctggaggatctggaacgcgcggtggagctgagcggcggccggggccgcgccgcccgccagagctttgtgcagcgcggactcctggcgcggctgcagggccgagacgacgacgcccgcagggacttcgagagggcggcacggctgggcagccccttcgcgcggcgccagctggtgctgctcaacccctacgccgcgctgtgcaaccgcatgctggccgacatgatggggcagctgcgccgcccccgtgacagccgctgagcgccgcggacccgggcgtccgcgggcgaggggacgggactgggccctgaaccaataaagccgtcgggcctcaccgactccgcctgctcctgcgtcctgcccgcgcccggagagaagggcactcgggggtactcggcgcgggctggggaccagccggggggtggtgagccgcggccgcccacctgccgggtaagggcccctcgggcccgtggtcgggcatcgattggccccgcctggcgcagcccccgcccctgcagcggactgcggtgctcatcagacctgagcagttgctccggcggcgctcggggagggagccaggtgagccgccccggtggcggggggcgggggcgggatgctcggcgaccccaccctccgaccctctcctcttccgccgacatccaccggagccaccaacatcaggaaagggggcgtagggcgagggatgggagagagaacagggcaggagagagga

SEQ ID NO: 8417 - DNA, 2300 bp, Homo sapien
tcgggagaatgaacgccacgccttcacctgccgggtggcaggggggcctggcacccccagattggcctggtatctggatggacagctgcaggaggccagcacctcaagactgctgagcgtgggaggggaggccttctctggaggcaccagcaccttcactgtcactgcccatcgggcccagcatgagctcaactgctctctgcaggaccccagaagtggccgatcagccaacgcctctgtcatccttaatgtgcaatgtgagtggccctgaggtgggcagggagataggttctttgcccagggacccccagcacccaccaggcaggtggtccgcaggacatttagcagacacttaagcactttgcaaatatgaactcatttgatcctctgagtaaccccatgaggtcattactattgtcgtcaccattttacaaataagaaaactgaggcagaaagaggtaagcaatctgcccagggtgatgatcccgctggtaagaagcagagccaggattcacatctgggcatttggctctagtatttacactcataatcactccgaaatgctgcctctctggcagacccagccatcctgttcctcagcatcccctctgaggagaggcccaggcccctggctcccatctgggtttgggaagaaagggctagaagtatgaggggctgtggtgagagcatattggcctctgctttgtaccagtcaagccagagattgcccaagtcggcgccaagtaccaggaagctcagggcccaggcctcctggttgtcctgtttgccctggtgcgtgccaacccgccggccaatgtcacctggatcgaccaggatgggccagtgactgtcaacacctctgacttcctggtgctggatgcgcagaactacccctggctcaccaaccacacggtgcagctgcagctccgcagcctggcacacaacctctcggtggtggccaccaatgacgtgggtgtcaccagtgcgtcgcttccagccccaggtgagcatggccagcaagcggccctgcaaagcttcaggtgggctcaggggtcccgtccccatacagaaatgggaatacttgttgccctgtggttgggtcttgtggatgaactgtccccagccaccctgggcaaggagggcagagtagtacctatggcatgttggggctggggcactacccacttgggacctgacacagaggacatcctccagggcttctggctacccgggtggaagtgccactgctgggcattgttgtggctgctgggcttgcactgggcaccctcgtggggttcagcaccttggtggcctgcctggtctgcagaaaagagaagaaaaccaaaggtaggccagggacactgggggcagtgtggatgaggtcaggctgagcagcagccaagacagcaagtgcagctgggcagaaccagtcatctctgacggtggcagagcacttccagggggtggccatgggtacggtgacatgcatcccaggtagcagggtcaagcactgggaacccagtctctggccccagggccaggcctgggcatttgagagaccccttgcctgagggtcctgggtctgaaagggtaggacagcccagcgtgggagggcacactgagaattagggacatggtttctttctccacaggcccctcccggcacccatctctgatatcaaggtaactcttccttgggctgggtggacaagcctaaccgaaatgcaggatggggacaggagggagcctggggtttctggtagaggcagccatgagtgcctgtgccgggactcatatccatcccgaactttgtcctccctgtagtgactccaacaacctaaaactcaacaacgtgcgcctgccacgggagaacatgtccctcccgtccaaccttcagctcaatgacctcactccagattccagaggtatatctagggccctgctctttgcccctgcttaatctccagaagtgcttctgagaaaaagaacttggtgcttgggaggggcgaggcctcatcaggcacactcctcgtcctgaacactgccctctttgtcaaccagcagtgaaaccagcagaccggcagatggctcagaacaacagccggccagagcttctggacccggagcccggcggcctcctcaccagccaaggtactggggaaggggcctgccaccctcctcctctgccccccagccctgtgcttatgccagaggcctccaagtgcccaggaggcagagagagctctccaaattccaaggaacaagcgttactgagtccccgcgggcttctttgatcccgc

SEQ ID NO: 8418 - DNA, 2300 bp, Homo sapien
cttggatctcagaagctcagcaaagaccagttgatgctgcttcttcggaaatataacggtagctgaattaaaccacagaagaaaaagcaaccctgtaagcatgcttcttgaggagtcccatagtggcagtatcttataatggttaaaagcagagacttaggaatcagactgacctgtgtttggctgctattttcagcgcttattatgagtgactttaggcaagttactttaactgtctaagcctcaattacttaatctgtagattggcagtaacatctatctcataaggttgtgaagtaaattagatgatataatctaagtgctccccacaaaaaaactaagtgctcctacatagtaagtactgcacattacatatccactattacgagcaaaacagatcacaaatttttttttaaatgcagttctatttttaactatcagtatgccagaaaagctgtctctcattttttaaaggcactttccttgtttacctctggtaggttttcagggtcaaatttccaatattattttctttttaaaatgtattgctattattattattttgagacggagtctcgccctgtcgcccaggctggagtgcagtggtgcgatctcggctcaccacaacctccacctcccgggttcaagcaattctcctgccgcagcctcctgagtggctgggattacaggcgcgcgccaccatgcctagctaatttttgtatttttagtagagacgggggtttcaccatgttggtcaggctggtcttgaactcctgaccttgtgatccacccaccttggcctcccaaagtgctgggattacaggcgtgagccaccgtgcccgaccaaaaaattattattgttattattcattatttatatttgagatggggtcttgatctgttgcccaggctggagtgaatgcagtggcccaatctcggttcactgcaacctctgcctccctggctcaagcaatccccccgcctcagcctcccgagtggctagcactataggtgcgtgccaccacacctggctaattaaaaaaaattttttttttatttttaatagagtggaggggggcggttcttgctatgttgctctagctggtctcaaactcctgaactcaagcaatcgtcccacctctacctcctgaagtgctgggattacaggtgtgagccaccgcacctggcctccaatattttatgtttctctctccctgacttcccaaattaattatgtccacagtttgaaaatatttgttccttacatctccattcactcattcctcgattcatccacccaatgagcattgttagtgtctaatttctgcaatacactggtgttacaaagcttaaaaattaattagacacaggtcttgctttaaataagttaaaagtctactttagcaaataagaaagacaggacacagagtgaaaaaaaattttttttgagacggagtctcgctttgttgcccaggctggagtgcagtggtgcgatctcggctccctgcaagctccgcctcctgggttcatgccattctcctgcctcagcctctcgagtagctgggactacaggcgtccgccaccacgcccggctaattttttgaattttttagtagagacggggtttcaccgtgttagccaggatggtctcgatctcctgacctcgtgatccgcccgccttggcctcccaaagtgctgggattacaggcgtgagccaccgcgcccggcccacagagttaaatttgaacctcagatacccaaggaataatttattgctataagtatgttccattccatggcaccctgtggaggggaaagactatagtgtaatatagtgctagaaaaggacttacagagtgctgcgaaatttcccctggaatgtgtctacatcctggtaagactgatctgggagcaactgcatccccagagattgttgtcctaggggaacaaacgcacaccttgtttccagattgaagggctaactctacaccagcccgaaatttatcagccgcgttgccacccatagccgctagatgccgcaacagacgtatttactgaaaccatagacaaacaggcgacttggccgcccagagaggctttatccgtgactccttgatcttcttcctgcgtggagagccttcgcgggtgaggcttaacgcgcaggaggtctcacgagagtggaagcaactctcgcgaattttaaaatttatctttttgcctagcgactgacaacaggctggttgcttggcgtggaatcctaaagtggcctggctttgagactggagtgagaccccagccct

SEQ ID NO: 8419 - DNA, 2300 bp, Homo sapien
gtgatccgcccacctcagcctcccaaagtgctgggattacaggcgtgagccaccgcgcccagccaggagaaaactgactttgaacttggctctaccacttactagttgtgtgagtttggacaaatgcttaacttttttgatcctcagtatctttatttggattgatgtaaaagattggaaataacatgtgtaaagtacctgacacaaatgaagcactcaattaaaagttgctattatacttaattgtggacatacaggtttaatatggatgagtgctgttcggttgagctaaggatgtaggataaaatgatttaaggaagaactactgaatcagctatactctgaaaaatctgaaatttggcatacaagaaataacatgagaatcacaagaacagattttgagtcttggttccatcatatactggtttagaaactttgggtaagtcacttaaacttttcaccattttcttcatatacaaaatggacatgagcacaactgccctgcttccagtgcatgtttttttaaagatataatttacaaatcataaaaattcaccttttaaaattatacaatttagtggtttttagtatatttgcctctatctagttccagaactattttttttttaagagtctaagtctcacaatttgcacaggctgacctttaacccctggtctcaagccatcctcccaactcagcctcccaagtagctgggactctaggatcatgccaccatgcctggcttaattccagaatgttttaattattccagaaataaatcttacactaattaactgtcactctctattcctacccttcctgagcccctggaaatcactaagctagtttctgtctctgtggattttcttctattctggatctttcgtattaatggaatcatatatgagtgccccattgtatccgtcttttttcacataatattctcaaggttcatccatattgtagcatgtcagtactttattcctttttgtgactaaataatattccattgcatatatatgccacatctattgatgaatggatttgtttggattgtctccactttttggctactatgaataatgctgctatgaacattagagtacacatttttgtgttgacatatattcagttctcctgggtatgtacctatgagtggaattgctcagtcatgtggtaattttgtttaactttttgaggaactgccaaactcttttccaacgtggctgcactattttacattcatcctcaccaacaattattatgatagccatcctagtgagtgtgaaatgacgtctcaccacgggtctgatttccatttccctaaggatattcaacatttcttaatgtgcatattagccatttatatatcttctttggacacatatctattcaaatcttttgctcattttaattttgtgttttctactccctccattttgcagatgaagcccatttttagacaggaatactgtatttgtctttttattgctgagttataagagttcttaggccaggcgcggtggctgacgcctgtaatcccaacattgggaggctgaggcgggcggatcacttggggtcagaagtttgaggctagcctggccgacatggtgaaaccccgtctcaactaaaaatacaaaaaacagccgagcgtggtgtggcgcgtgcctgtaatcccagctactccggaggctgaggcagaagaatcgcttgaacctgggaagtggaggttgcagtgagccgagatcacgccattgcactccagcctgggcgacagagtgagactccatctcaaaaaaaaaaaaaaaaagttctttatatattccggatactggtcttttaggcacacaggttatcctgtatattaaataatagtggctgtgccagcggcttgttaaactgtaagatgtgacgcaaaataaatgaaggcgatgacagtgaaaggggagagatacgaggttccacagctggagggtgaacgccccctacacctcctgggcttaatcgtaaccggagcggggtaccctcaatttccccagcccacaggccccgcccccccccccgccctttgacctgcgccgcttccggttgaagacgtggcttggggccgccatcttggcaagaggcgaagcggcagcggttcctgtcaagggggcagcaggtccagagctgctggtgctcccgttccccagaccctacccctatccccagtggagccggagtgcgggcgcgccccaccaccgccctcaccatggtaagatccgagccaggacccgaactcctggggtccgagcctcac

SEQ ID NO: 8420 - DNA, 2300 bp, Homo sapien
aagattaaagtctaactggaagcaatgactatctgcttgtgaagcctttttttttccaagttagacaagtgttaactacagctagtactaaacatggatctatatgagagtaggtaacatggcttctgtcttgtaggctctagaggaatctcaagcaaaacctcacaaatgattttcttttgctatgcacatctgtcttattacaacccccttacccccaattcccttgtcctagaagatccacaagtaggttggttgctgtgcattgctgttacccaagggcagacagcaacactacaaatagctgccttaacgtcttatcctggggagttggggattgatacggaggtaggcctttagaaaaattagactatctttccaaaccaggctgttttccctctcacaatcacaagtcaagctattaggcagttttcagaagcttggaccacttctcccatcccccaccgcagtttttttgccctgctgttcttagggcaggggctaagtggttatttagggtctaaaccaatactggaaagcttccctaggtttactctgggtgatcagattgattaccaaaccaggacaggggctgtttgaaagaagcattagaaattcaagacaatgagagaaattgaaataggtcttgtctcccattcttttgcccaaatgaatgcttgttcttttagctcattaggaaagcccttagccttggaggtacacaagaccagtcttctgtcctacccaaatttcccacttagcttggatgcatgttagctttgggtcgaagcagactatgcaatttctaagacagctgaaaagagagctttgaacttttccccaagttgctgcagggtcattgctaccaccacgcctacaccaatgatgcctgacttcaggatccagaggccagaaacggacagctttctggaagagggtgtgtatctacaaggattgcttgctgtatgagcaataatcacctctctggggctagagggagtacaatttgagaggtgggacaaagtggggaatgtgccaaggcaaaagcaggagtatggaaattcactcctgacacttgtagccaatgcaaagggccttagaaaaatccactcttccttccacacccaggctttgccctctccccctgcttccacttcggaaagtctgaagcaggcctggaaagctgttttctgctttctttccctctcttcctccccctttcctgagctcccagctgctcgacctcttgcgtaactgtgagagagcgctgagttttttgatgggctccagatgtggagcagggcggagatggagagtgggggcggtaggtctttagtcccctgagtgctctaactgtgggaacatagaggcctgacacagcaggggagaggacacattgcacagcgcctttatcatagggtcagctggtccctgtgttgggaggtcagtgagagaagttgggtgctgtttcgaccctctgcctcagcatccactgcctccatggcaggcttgattattccctgaaattcctcctgcccagtacagtaaagaggagctgggggccgtgaaacagaatgaagtgaaaagcctctgaggtactgcaatctggacccctcccctcagtgctgggtcttggcacatgggatacaacagtttgggttttttccttcttcctttttttacatacccaaatagcctgaatattactgttgtgatctgcctcatgaaggttcatcagaattactttcatgacttcaaacagtatgaagagaggaaaaactagagtctcgctcctcaaatcctaggacttcctggtacccacagcatattctggatcttgagtgttccacctccattagctatagcaggtggcagcaaagggcggcctctcccctccccctccttgtctgctgcttggccccggtcagcttcagtctccagccgtggggggtcccctgctaaggccagccctgtcaatgagtgaccagagattcctgtagttcagcctcctgctgttcctgggttagggagagacggcacaaactaaactcattgaattagaacagcacttgtccatctcaaagaggataaattattttttgctatccaccccagctggaatttagaccagacttacaggctttctgctccttccttcagtgaagaagagtctccagggtccctctagtgcaggtcaaagaagtccagtccagctgagttcagctccctagggcctccccagccagtctcctggaccaagagctggctttgcaaggtaaggatccactgtcagcgttgga

SEQ ID NO: 8421 - DNA, 2300 bp, Homo sapien
tccacacccaggctttgccctctccccctgcttccacttcggaaagtctgaagcaggcctggaaagctgttttctgctttctttccctctcttcctccccctttcctgagctcccagctgctcgacctcttgcgtaactgtgagagagcgctgagttttttgatgggctccagatgtggagcagggcggagatggagagtgggggcggtaggtctttagtcccctgagtgctctaactgtgggaacatagaggcctgacacagcaggggagaggacacattgcacagcgcctttatcatagggtcagctggtccctgtgttgggaggtcagtgagagaagttgggtgctgtttcgaccctctgcctcagcatccactgcctccatggcaggcttgattattccctgaaattcctcctgcccagtacagtaaagaggagctgggggccgtgaaacagaatgaagtgaaaagcctctgaggtactgcaatctggacccctcccctcagtgctgggtcttggcacatgggatacaacagtttgggttttttccttcttcctttttttacatacccaaatagcctgaatattactgttgtgatctgcctcatgaaggttcatcagaattactttcatgacttcaaacagtatgaagagaggaaaaactagagtctcgctcctcaaatcctaggacttcctggtacccacagcatattctggatcttgagtgttccacctccattagctatagcaggtggcagcaaagggcggcctctcccctccccctccttgtctgctgcttggccccggtcagcttcagtctccagccgtggggggtcccctgctaaggccagccctgtcaatgagtgaccagagattcctgtagttcagcctcctgctgttcctgggttagggagagacggcacaaactaaactcattgaattagaacagcacttgtccatctcaaagaggataaattattttttgctatccaccccagctggaatttagaccagacttacaggctttctgctccttccttcagtgaagaagagtctccagggtccctctagtgcaggtcaaagaagtccagtccagctgagttcagctccctagggcctccccagccagtctcctggaccaagagctggctttgcaaggtaaggatccactgtcagcgttggatttcggagtggaggttgagatggagaatgacttcaacctagctcaatttgggggctgcttttaggtgtttagtgcctccttctcttccttattaactcccactcctactacaggttggtgtgctcaattgtatgtctatagcctgcctccatctcccaatctgtaatccagcaagtctgtcggggtggaggggtgtggagctccatgggggcaagatgataattccattcggttttcctgtgctttggagtttgcatgacactttaacgagtcttcttgtgcctatccttaagaaagtctgtgaagcctgatgtgcgtggctatcaatgtcatttacagctcttcatggtggggcttggaatagggcgaggggaggaggtgacagggagaagacctgggtaccctcagtagatgttctggagatgttgagagcatgttgtaggggcttcgatttgggaggttcagtgggagcccgtggaggtttcaggcatctaaggcaaaaagaaagaggggagagtttgggggagggagaacggattgtcaaaaacaccctctcaaaagcgtgttaaagcctgggagtggagggtggtctaggagagtcgggagggcagggtgggaggagagggggatgtgtggtggtggtggtggtggtggtggtggtggtggtggtggtggtggtggtggtggtgatggtggagagcccagctgcaaagatgaacaaagcgggcgctgtgcaggctgggggaggtgctgctgtgggaaagggtgggtggggggaccttgggctccagccccacaagggcgtcttctttggctggccaggcggacgggacgggggacgggggcggggactggcgggaggggggcgggacaggctcgctctcctcctacttagcgagctcccggggaaaagcaacggtgtcctcctaagcctgaggccaccgcgaccgagccgagccaggctaagggaccagtgtctccctgccccccccccacctctaggtaagagcgccccgtcccactacacttgcgggtcccattcgctgcggtgctaggactggataaggggaagtccccggggcctggcgagagccctgagatcagctctaggctaggg

SEQ ID NO: 8422 - DNA, 2300 bp, Homo sapien
tcgacctcttgcgtaactgtgagagagcgctgagttttttgatgggctccagatgtggagcagggcggagatggagagtgggggcggtaggtctttagtcccctgagtgctctaactgtgggaacatagaggcctgacacagcaggggagaggacacattgcacagcgcctttatcatagggtcagctggtccctgtgttgggaggtcagtgagagaagttgggtgctgtttcgaccctctgcctcagcatccactgcctccatggcaggcttgattattccctgaaattcctcctgcccagtacagtaaagaggagctgggggccgtgaaacagaatgaagtgaaaagcctctgaggtactgcaatctggacccctcccctcagtgctgggtcttggcacatgggatacaacagtttgggttttttccttcttcctttttttacatacccaaatagcctgaatattactgttgtgatctgcctcatgaaggttcatcagaattactttcatgacttcaaacagtatgaagagaggaaaaactagagtctcgctcctcaaatcctaggacttcctggtacccacagcatattctggatcttgagtgttccacctccattagctatagcaggtggcagcaaagggcggcctctcccctccccctccttgtctgctgcttggccccggtcagcttcagtctccagccgtggggggtcccctgctaaggccagccctgtcaatgagtgaccagagattcctgtagttcagcctcctgctgttcctgggttagggagagacggcacaaactaaactcattgaattagaacagcacttgtccatctcaaagaggataaattattttttgctatccaccccagctggaatttagaccagacttacaggctttctgctccttccttcagtgaagaagagtctccagggtccctctagtgcaggtcaaagaagtccagtccagctgagttcagctccctagggcctccccagccagtctcctggaccaagagctggctttgcaaggtaaggatccactgtcagcgttggatttcggagtggaggttgagatggagaatgacttcaacctagctcaatttgggggctgcttttaggtgtttagtgcctccttctcttccttattaactcccactcctactacaggttggtgtgctcaattgtatgtctatagcctgcctccatctcccaatctgtaatccagcaagtctgtcggggtggaggggtgtggagctccatgggggcaagatgataattccattcggttttcctgtgctttggagtttgcatgacactttaacgagtcttcttgtgcctatccttaagaaagtctgtgaagcctgatgtgcgtggctatcaatgtcatttacagctcttcatggtggggcttggaatagggcgaggggaggaggtgacagggagaagacctgggtaccctcagtagatgttctggagatgttgagagcatgttgtaggggcttcgatttgggaggttcagtgggagcccgtggaggtttcaggcatctaaggcaaaaagaaagaggggagagtttgggggagggagaacggattgtcaaaaacaccctctcaaaagcgtgttaaagcctgggagtggagggtggtctaggagagtcgggagggcagggtgggaggagagggggatgtgtggtggtggtggtggtggtggtggtggtggtggtggtggtggtggtggtggtggtgatggtggagagcccagctgcaaagatgaacaaagcgggcgctgtgcaggctgggggaggtgctgctgtgggaaagggtgggtggggggaccttgggctccagccccacaagggcgtcttctttggctggccaggcggacgggacgggggacgggggcggggactggcgggaggggggcgggacaggctcgctctcctcctacttagcgagctcccggggaaaagcaacggtgtcctcctaagcctgaggccaccgcgaccgagccgagccaggctaagggaccagtgtctccctgccccccccccacctctaggtaagagcgccccgtcccactacacttgcgggtcccattcgctgcggtgctaggactggataaggggaagtccccggggcctggcgagagccctgagatcagctctaggctagggagctcggcagaaacccgtgggggagagagggcaccccaggtgagtgcgtgggggcgaaaggagcgttatggggagttttcctgtgagcctcttgcttttgccttcctcggccgctgccaac

SEQ ID NO: 8423 - DNA, 2300 bp, Homo sapien
ccgcgggccagatggaagcggggccgcaggtgagggacgtccctcgcgtagcgccactcagccgccggggccagagcgggagtcaaggtgagggcgcccccaggtggccgctctcggccgcggcgatcgccctttgggaaagcaccgcctgagtgcagggcaggttggcctggtgtctctttccacttctcttggatcaggttactgtgctggggccacagcctcgcacctcccaatctctccatcttttcttatcttctccccacacctctctccttatctctccctttactttcgcctccttattctcttctctcctctaatcactcttgttctccatcggccttactcctttacaatctttatctccacttgaagttcttgggtgtaaataaatgagcacaccacagctgccccacacggcgatagtgaccaatactccaatatgacagataaataaactaacgcccagacaggtgaactgccttgctccaggtcacacagctcataataataaacggggccaggcgcggtggctcacgcctgtaatcccagcacttcgggaggtcgaggcgggcggatcacctgaggtcgggagttcgagaccagcctgaccaacatggagaaaccccgtctctactaaaaatacaaaattagctgggcttggtggcaggagaatcgcttgaacccgggaggtggaggttgcggtaagccgagatagcaccgctgcactccagcctgggcaacaagagtgaaactccgtctcaaaaaaaaaaaaaaaataataataataataataaatggcattaagtgctttgctttcacagaatgccatttaatataatacctgaatttcagacagtcctttttaaaaaactgacagctttattgaggtataatttatatactataacatccacccaatttaagtatgcaattaaaagatttttagtatatttacagagccatgcaatcatcacaatttaatttgaaaacattccccccaccccacccccaccaaacttgtgcccttttacagtcactcctcattccacccctagccccaggcaagcactgatccagacagtcttttttatttttttccattactctagttttatagaagaataacttgataatcagagaagttaaataacttgtctaggatcttatagctaataaataaataaagtcagggtagaatttaaggctttatatatcccagtctaaagttctttctaccaaaggatgatgtttctccttcaccattatttattattttgtttttcttaaccccttttttacataaactccccattcccaacccactctcttgcccctcctccctcagaaaatgctgagggatttccctgagtctaaggaagcagtacagcaatctttgtccttggaaattcttctccatggccaggaattctggggaggtgccaggccagcttggggctttgcataggttaatggcgttttccctcccctcttccctggcagtcttggggtgggccccagcctgggttccggcctctcttccgccagcttgggtggaaatggtgacggagatgatgcagtccaggtccggaagggtggaagctgggagggtaaatttagtaacaccatagctaaggtcctcgggacccactgccagggtcagacactccttggaatgcgggctgctgcccctacttcctttccaagtcccctggtagatggcttgaagagagagtggaaggaaaccctgtttccctgggtctgcctccttacccctcagccacactcttagctttccccagtaacatttcagcagcaagtgggaagtttctcagcttagctagttggccaagggatgggcatgggggcatacattagtacacaaaggtcctcacatctcagataccaaaaacatgagccagggagagagggatgcatggtgggtgaggggcagtggggtggtggtggggagtattcaagttctggctctggaatctgtcttactcctggttctaatggtttaagcttcctatagcacctagccaattaagaacccaagagttgagcccaatattcccagtattagttatcactaaagttttttgtttttaattaaaaaaaatttttttagctgattgtgttgggttgaggttgctttctggggaagaaaaggtgtaggagttgagacatctggagatagcaggaatggctgagtttttcttttgtgtctcctttaagaaaacatcctactaaagccctgggaaaagagacaaatggtgaagaggagaatgaaaggt

SEQ ID NO: 8424 - DNA, 2300 bp, Homo sapien
gggtgggcagctgcctgtggtggccatcagcctgagtgaatacccagcttctggtgctctcagtcaacccaccagcattcctggcagccccaagtttcagcctccagtccctgctccccgaaacaagattggcacactccaggaccgccctcccagccctttccgtgagcctccaggcagtgagcgggtgctaacaaccagcccctcacgccaactggtgggccgaacattttcagatgggttagccacccgtaccctgcagcctcctgagagtccccgcctgggccggcggggcctggacagtatgcgagaactaccccccttaagtccatctctgtcccggcgagctctctccccgctgcccacccggaccaccccagatcccaagctaaacagggaagtggcagagagtcctcggccccggcgctgggcagcccatggggcttcaccagaggacttctccctgacgctgggggcacggggccgtaggacacggagcccctcacccacactgggtgagtctctggcaccccacaagggcagcttcagtggcaggctgagcccagcctacagtctgggctctcttactggggcttcaccctgccagagtccctgtgtccagaggaagctctccagcggggacttgcgggtgcctgtcacaagggagcggaaaaatagcatcacagagatcagtgacaatgaggacgacctcctggagtaccaccggcgacagcgccaagagcggctccgggagcaggagatggagaggctggtgagcgggtgccagggaggcttgccactgtccatggcagagtctctgccagggctcgagcaggccagctggcagagcaggagaggccctcaaacagggcttcggcttctcaaggttccccacctccaggatacactttagtgatcaatatcttatggttctggtgccgtgaagaagaaattcctttgaaatctctaagactttattttaaattcttgctaattttgcatttattcaacatagcatttgttttaatgttaaattaaatttcacattgtttacctgagcacagtgaagctctaggaaaacataccacaggtatggtaagacctcgaacctcccagtttgagaagcagttggtgatcatgagtaggctgaagctcagagaggggaatggctttgtccaaggtcacacagcaagttctggcagagctagaattggaacccaggtcccctgtctgactctttctgagacttgttctttagaaaagtaccttgtccttcttttttgcttgtctttggcctctacaagtgggtgggagctgctcatcctggcccaggcagtatcatctaggagtgcaggtggcagggtagagggacagagcaggataggcaaccctggcctgaccgttagccagcctgtgtaattgtgactgtgtgtgtccatgtgcatgcacgtgggtgcatgcaggggctgggtgtggctctaggcagctgtcctggagatggcatctgagctgggtgggggccaggattccccagatagctcagggagcttaaggggctctggctggtgtgtacacagtcgagcccatgtacagaagaatggattctgccctctgtcccttacgagcagaacagggttctttggaaggtgggcaggaaccctgggattggtttgaggaagagaaccagaactgatgagaaccagaactgaagcatctggagatgcttttggaagaggttgggacagttttggatgagggtataggattgtgtgtttgtgttggatgggggtgagatgaggcggatcccatcttttcctttgctgcatcttctcttcactgtttttgcattggtctagacgggaatgcatggccattctaagctggggtctcatcctggagagggggcagtgagcctggcacaggcagagtggcaggcacagcctcccccaactcctccatcagttttcccacccccattcccacacataagcacacatcttaccactagtcctgacctgcctcacctgccactttaagtcttggaggctgcccgccctgcccctcccacctcaaccaggctgcttatctgggtcctggggcaggggtggaggcactggcccagcctcccaggtgccgaggctctgttccggtttttttttttttttttttgccatggaactgggcaagcaacaggagggaagctgggtaagtgtatgagaacacctctccagccttctctccacttcctgcggtttgggttcatggccaaactgtaagtgatgagagacacttgaggaggt

SEQ ID NO: 8425 - DNA, 2300 bp, Homo sapien
gtctttggcctctacaagtgggtgggagctgctcatcctggcccaggcagtatcatctaggagtgcaggtggcagggtagagggacagagcaggataggcaaccctggcctgaccgttagccagcctgtgtaattgtgactgtgtgtgtccatgtgcatgcacgtgggtgcatgcaggggctgggtgtggctctaggcagctgtcctggagatggcatctgagctgggtgggggccaggattccccagatagctcagggagcttaaggggctctggctggtgtgtacacagtcgagcccatgtacagaagaatggattctgccctctgtcccttacgagcagaacagggttctttggaaggtgggcaggaaccctgggattggtttgaggaagagaaccagaactgatgagaaccagaactgaagcatctggagatgcttttggaagaggttgggacagttttggatgagggtataggattgtgtgtttgtgttggatgggggtgagatgaggcggatcccatcttttcctttgctgcatcttctcttcactgtttttgcattggtctagacgggaatgcatggccattctaagctggggtctcatcctggagagggggcagtgagcctggcacaggcagagtggcaggcacagcctcccccaactcctccatcagttttcccacccccattcccacacataagcacacatcttaccactagtcctgacctgcctcacctgccactttaagtcttggaggctgcccgccctgcccctcccacctcaaccaggctgcttatctgggtcctggggcaggggtggaggcactggcccagcctcccaggtgccgaggctctgttccggtttttttttttttttttttgccatggaactgggcaagcaacaggagggaagctgggtaagtgtatgagaacacctctccagccttctctccacttcctgcggtttgggttcatggccaaactgtaagtgatgagagacacttgaggaggtctagggaccctagagagccatggaagcctcacaaaccaggcttcaggcctataggtaggcctgcgggagaaggcaacaaagaccaggaatgtgattgtgtcatccctcctttacctcctaggcccctgagaggtgactgtatctgggtgggtgtgtatgtggagaggggtggatgaagtggtagggccatgggagtactcactcatgggcctgggcattcaaggactggcagcagcccatcctgctgataaacagccaagggctgcctgagggtaacttggagctgaggtggggacaaagagggccgtgtccttggtctacctcttctccatgtatgtctgtggttgggtgtctggtccctgtgggctcatgggtctgttttccagcactgtctgtctgcatacgtgcccacctgtctgtatgctagactgtgtttatctgtgagtgtgcatcagtgtgcatttgtgcatgtcagggctggtgtctctgtacttgcctattaatgcagggccagggcacatgttgtatccttgtgtgcctgtgcatcagtgctggtgtgtcagtatgtgtccttgtgtctgtagatctgtgtgtacctgcgtcaggacgagcaactgagtttatctgtgtctcattgtggtctgtagtctgcttaacagtgtgtttctgtatgtgtttagtgtgttactgtgggtccatttggtgtgttcctgtgtgtcctggggtagactgaaaaaagaaaggaacaggaagatggaaggggctgtcccagaagtgggcaggaagaaccaggctgttatgccatgtgggcatgtggcacaacagcctcgttcttcctgcccacttctggggcaccttgtttccctctgcctcccctaggtcttggggtcaggcctctcctgacttgacactgatgtcctagccccctgtaaccctgctctccctcctgacaggatactgaacctggctctatccccaccagggctcagcttcctccccttcatgtcctgctctgtccatcctccccaggaacgccagcgcctggagaccatcctgaacctgtgtgccgaatacagccgggctgatgggggacctgaggctggggagcttcccagcattggggaggccaccgcagcattggcactggcaggccggaggccctcacgaggccttgcaggggcctctgggcggagcagcgaggagcctggcgttgccacccaacgcctatgggagagtatggagcgctcagatgaggaaaatctcaaggaggagtgcagcagcactga

SEQ ID NO: 8426 - DNA, 2300 bp, Homo sapien
agcctcccccaactcctccatcagttttcccacccccattcccacacataagcacacatcttaccactagtcctgacctgcctcacctgccactttaagtcttggaggctgcccgccctgcccctcccacctcaaccaggctgcttatctgggtcctggggcaggggtggaggcactggcccagcctcccaggtgccgaggctctgttccggtttttttttttttttttttgccatggaactgggcaagcaacaggagggaagctgggtaagtgtatgagaacacctctccagccttctctccacttcctgcggtttgggttcatggccaaactgtaagtgatgagagacacttgaggaggtctagggaccctagagagccatggaagcctcacaaaccaggcttcaggcctataggtaggcctgcgggagaaggcaacaaagaccaggaatgtgattgtgtcatccctcctttacctcctaggcccctgagaggtgactgtatctgggtgggtgtgtatgtggagaggggtggatgaagtggtagggccatgggagtactcactcatgggcctgggcattcaaggactggcagcagcccatcctgctgataaacagccaagggctgcctgagggtaacttggagctgaggtggggacaaagagggccgtgtccttggtctacctcttctccatgtatgtctgtggttgggtgtctggtccctgtgggctcatgggtctgttttccagcactgtctgtctgcatacgtgcccacctgtctgtatgctagactgtgtttatctgtgagtgtgcatcagtgtgcatttgtgcatgtcagggctggtgtctctgtacttgcctattaatgcagggccagggcacatgttgtatccttgtgtgcctgtgcatcagtgctggtgtgtcagtatgtgtccttgtgtctgtagatctgtgtgtacctgcgtcaggacgagcaactgagtttatctgtgtctcattgtggtctgtagtctgcttaacagtgtgtttctgtatgtgtttagtgtgttactgtgggtccatttggtgtgttcctgtgtgtcctggggtagactgaaaaaagaaaggaacaggaagatggaaggggctgtcccagaagtgggcaggaagaaccaggctgttatgccatgtgggcatgtggcacaacagcctcgttcttcctgcccacttctggggcaccttgtttccctctgcctcccctaggtcttggggtcaggcctctcctgacttgacactgatgtcctagccccctgtaaccctgctctccctcctgacaggatactgaacctggctctatccccaccagggctcagcttcctccccttcatgtcctgctctgtccatcctccccaggaacgccagcgcctggagaccatcctgaacctgtgtgccgaatacagccgggctgatgggggacctgaggctggggagcttcccagcattggggaggccaccgcagcattggcactggcaggccggaggccctcacgaggccttgcaggggcctctgggcggagcagcgaggagcctggcgttgccacccaacgcctatgggagagtatggagcgctcagatgaggaaaatctcaaggaggagtgcagcagcactgagagcacccagcaggaggtgagatggaggggtaggcaagacaaagaggctgaagttggacctgctgggggcagaggaggctggtgtatccaatgccaaggtccagtgaggggaaggatcaagtttgggaagagattagagagcagaggtgcagaaatgagacaaggaagagaagggaggtgttgatgagcttcccaagctgtaaatatgctttatgacctgcctttccatggggccccacccaggcctggcactcagtggtaaatattctcttccgcagagcccttattgctcccctcaaaggtgggggttgcgggggggcagggaattagcctcctgtctcagtccagctattcctcagcaagtgcctggaggaacaggtgatccattttcttagtctgattccaaaaggctctaggcttcctcagttgatagcttccctcccctccagcacgaagatgcacctagcaccaagctccagggagaggtgctagccctggaagaagagcgggctcaggtgctggggcacgtggagcagctcaaggtccgtgtgaaggagctagagcagcagctgcaggagtcagcccgagaggtgagccgtgaagtccctagctggactcttccctaggccaactgaaggccccagagaggggc

SEQ ID NO: 8427 - DNA, 2300 bp, Homo sapien
caaggccacacagctaggaagtagcagagcttatgccacgtcagggtttgtgacactaaaggccatattcaccacatgctagtgctgcaggggagcttggccattatttagtctagtcctacccccttcttttgcagataaggaagccaaggcccagagtagggaggtgtgtggcccaaggtcacacagcctgttagtggcagagctaggaccagagggaacccagcttctagttggtctcctgcacaactgcctgactgacattaaatccttgcatgggtctgtttacaggtcttttcttagacccagggttgggctagggattggcccagggaggaacagcctggaaaggagaattggcagctgccaatagcatctggccattgggctggctcaggaggcttgttgtcagagccagaaggcctcagaggcctagtgccagggcggtacgtcagatcacagcagactaggtgacatgggggaggtggccaatgggggagccaggaatcactgggcactatcttttctttccaggtttaccgctccaagatggatggcgaggccaccagcccccttccccggacccgcagcggccccctcccctcctcctctggctcttcctcctcctcctcccagctcagcgtggctaccctggggcgtagcccctccccaaaggtctgaggacagtgggtggggctgcacatgtggctggggatggagacttccaccctggggagaggccaagaccttgggaatgggggtaagggccttctgagcccaggtccgaactctccattcctctgcagagcgctctactcacccagaatggcacgggcagccttcctcgcaacctggcagccacactgcaggacatcgagaccaagcgccaactagctctgcagcagaagggtgagtgactgccccgccagcccacctgctctcctgaggggaccctgggtagttgccatgcctcctctatgctcacacctttcacaggatgtttttcctttaattgggatctaggcaagaccagaaaggatttagagtgggtacctaaagaagagcttcctggatatttatctaaagccttcagggcaggagactaagggcttagggggctgtgacatctttcctagagagcctagccaataagggaactgcttgttgacctgagtcgggttagacattgccctctctggagggaggggatggatttgatgacttctagaaatggttgcctgagatattggctctggggacccaggagtccttgttgcttgtgtgcaatttggttgttttgaaagcccatgtctgtgcctctctctcctcttaccccctctgtgtctctaccgtaccctctgcctggggtcccccacgccagtcgagtcgcttcccgccgagcccctcccaaccgacgacccagcaggtagaacgttggtcatagagggcattgctttggccaggcagcccctgccctggcatcagcatgatgtgtcctgcccaggtccccactgcctgcaggcagggtcccaggctgagctgggttggggtgtctgctggcctcacccctccagctggcctctcttctgccctcagctgtgctctaccgtgtctcccctgccttctttcttgcgtttgttgcttttgcttctgcattgcaggggggtctgcattggcagtctgggtgctcatggggtttctgccatctcttccttctcccttctccagcaggcagggtgggtgcatgtatcctgcctagacctacttaggccttggttgtgagctggagccaactggctgtcgtgctgccccagcactacttgggtaggtttggtgtcctatatggactcagggtgcgaaagagcactgaagccagactgtgcatctgtggccggttgtgcaggcgactgaagcattggcagagcagccaggcctggagctgcaggggccttagggaagctgcggggagagggggctgctctgtgttaacctctccctgcttgcccctccctctgtgtgttgtgctgccagtggcctgctccttagctgcgtggggagcccactgtgactcccatctgtctctccttcaggacaacaagtgattgaagagcagcggcggcgactggctgagctgaagcagaaagcggcagctgaggcacagtgccagtgggatgcccttcacggggcagcacccttcccagcgggcccctcgggcttcccccctctcatgcaccactctatcctacaccacctgcctgcggggcgggagcgtggggaggagggtgagcacgcctatgata

SEQ ID NO: 8428 - DNA, 2300 bp, Homo sapien
gtgagatttatccaaagaatgcaagggtggttgcacagcattgtgaatgtaataaaaggaaattgaattgtacacttaaaaattgttgaccaggcatggtggctcacacctgtaatcccaatacattgggaggatgaggcaggaggattgcttgagctcaggagttccacaccagcctggacaacatagggagacccaatctctaaaaaaaaaaaaattatttttaatttaaaaattagttgggcgtggtggcatgtgcctgtggtcccagctgctcaggaggctgaggtgggagaatcccttaaacctgagagatcaaggctgcagtgagctgtgatggagccactgcatgccagcctgggcaacagagcgagaccctgtctcaaaaaacaaagcaaacaaaaaaaacaatgccagctgcccacattactgggtggagctatctgaacctttactagttcagagtggtgcctgattcatgagtcatttctttgcttgaataaatggttaaatttaatttgtctaaggtttttctttttaatagcagtaaacactgctcaggtgccacaactgacatccttaactgcaaacctaagtccttcaggagaggtcatgcctatcattaaactccatgtgccttgcccaccccctgtcccctgtcccttcagctcaccttccatatgttgaggggatgagcctcctaaagtaaccgaatctgcttttttttttttttttttttttttgagacagagacttactctgtcgcccaggctggagtgcagtggcatgatctcggctcactacaacctctgtctcccgagttcaagcgattctcccacctcagcctcctgaggagctgggattacaggtacccgccatcatgcccagctaatttttgtatttttgtagagacggggtttcaccatgttggccaggctggtcttgaactcctgacctcaggtgatccacccgcctcggcctcccaaagtggtgggattacaggcatgagccactgcacccagcctgaatctgcttcttaagctcacaaacttctctgctggttccactttggggaattacaaggaattacattccttggcttggcaaagaccatttccagactggtgccaacatgttcctccagtctatctcaaaacccttccctgcatgaacaccaagttctctgcagctaggctgaggggtttgctcttctcttcacatgctctgcatacattgtagtggtctccagcccatttcccttggcaaactcctatgcggtcatcaagactcattaggactggcgcagtggctcacgcctgtaatcccagcactttgggaggccaaggcgagcagatcatgaggtcaagagattgagaccatcctggccaacacagtgaaaccccgtctctactaaaaatacaaaaattagctgggcgtggtggcgggcacctgtagtcccagctattcaggatgctgaggcaggagaattgcttgaacccgggaggcggaggtggcagtgagctgagatcacgccactgcactccagcctagcgacagagtgagactcagtctcaaaaaaaaaaaaaaaaagactcattacaaatgacacactattgtgggtctcccttagtcctccccagacagaatggttctactgtcctgtgcttccgctgtatctcttgcagataacagtgagaggccctgaatttcacaccacaccagggacaggatcttgagccattccatttgaaatgttaagggaaatggtaactctctgaggttggtggtcttggggccacccaaggaacctggcatccaggttacaggtgtgtggcctcgactgtgtccctggcctttgggtgcccactccccacccccaccaccatgctctgagggaagggcctgagccattggcaccagctgagactgtgaaatagaagaggcaaagtagaagcaagggaggtggccactgtgccctgagagcaggaggggcaagcgggccacacacagaccaagcacacgtcccctcaggtggccacgcctcaaaggctggactttggccgacttggacaggcaggtgagccaggctgtgcccagcaagccgaaggtgcctgggcttgctcattcagtcacagtcacagccaccatgccagggaggacctgggagctgtgcctgctactgctgctggggctgggactggggtcccaggaggccctacccccaccctgtgagaggtaggggtgtggggaaggcagcaggggaggatggcaataagagggaggctgggatgagatctcaa

SEQ ID NO: 8429 - DNA, 2300 bp, Homo sapien
taattttgtacttttagcagagacagggtttctccatgttggtcaggctggtctcaaactcccgacctcaagtgatctgcccacctaagcctcccagagtgctgggattacaggcgtgagccaccacacctggccttagccaagttttttctaaatcccggtaaagtagttactacattatgtaaacatccaaattttaatagttttacaattttagagttgtggaaactgaagtacagagtagttctgtaacattcccacacagctgagaaatgaaggaggcaagatttcaacctggcagtttagctccagaacctgtacttttttttgagacagagtcttgctctgttgcccaggctggagtgcagtggtgcgatctcagctcaactgcaacctccatctcccaggttcaagcagttcttctgcctcagcctcctgagtagttggaattacaggcgcttgccactgtgcacagctaatttttgtatttttagtagagacagggtttcaccatatcaaccagtcttgtcttgaactcctgacctcaggtgatccgcccgcctggtcctcccaaagtgctgggattacaggcgtgagccactgcacccggcctcagaacccttactttttttttttttttttttttgagacggagtagtctcgccctgtcgcctaggctggagtgcagtggtgtgatcttggctcactgcagcgtccgcctcccaagttcaagcgattctcctgccccagcctcccgagtacctgggattataggtgcgtaccaccacgtccagctaatttttgtatttttagtagagatggggtttcaccatgttggtcaggctggtctcaaactcttgacctcgtgattctcccgcctcggcctcccaaagtgctgggattacaggcgtgagccaccgcgcccggccagaacccgtacttttaaacactacaccatactacctctttaatgagaatcatcacattaaaattctgttgtggagctgggcatggaggtatgtgcctgtagtcctagctactcagtaggctcaggcaagaggatcacttgagcccaggaagttcaggctgcagtgagatacgattatgccactgcactccagctgggtgacagagtgaaatgctgtctctaaaaataaataaattaattaaattctgttacagaaagcgggggaggttgtctgtgtagtgtagaattttttttttcccctagaagatggggattatagattttgcccccttctgcatatttgactctctgcagtgttggagagaatttattgttttccaccaggaacatttcatggatgcttttgttggatgatgccttattctttgaccatgtattaaccaagaccttagacattattttattgtttttaaaattgtcttttctttctactgcaggcagataagttgctgtcacaggattttgtgcagataatggaggatattattctcacgctacctaaaaacaggcagattttactatattccgctactttccctcttagtgtacagaagttcatggtgagtataaatctgtacttggaatcagtgccatcctgtgacctttgagtatgcttttatttgtaattacatcttcatatctgtgaatatactttatgctaattatttcaagcctttggctctttcttcagttgatcaattaaagatttgttttacgtaaattaactgactttttaagaaggttgtaatagtaacttaattaaattcctcatctttcacttagtttttggtgtcatgatgacatagccattggtgctagctgaattgattccggtattattctatatacaaaacagagcttgagtatcctaaactgaaatccaaaatactgcagaatttgaaaccttttgagccacgaacatgatgctaaaaggaaatgttctttggattttgaattttcaaattaaggatgctcagtcactaagtgtaatgcacatattccaaaattagaaaaaatttaaaacctgaaacacttctgttcctaagcattttgggtaaggaatactcaacctgtagtaacttagctgcatttttgagatcttatatcttaatttatttctatcgggtcgggcatggtggctcatgcctgtaatcccagcactttggggggccgaggcgggcagatcacaaggtcaggagttcgagaccagcctgggcaacatggtgaaaccccgtctctactaaaaatacaaaaattagtctgttatggcagtgcatgcctgcattcccagctactcgggaggccgaggcag

SEQ ID NO: 8430 - DNA, 2300 bp, Homo sapien
gaagttggaggagggctatactagaagcagggcttcttacgcgattggtgtgaggagcacatttggctttctctgattggcccagagctggaagcaggggcaagaaatagggaagctgccggttaaagattaagtcctgacccttctggccgattactgaagaggttatgggtaggaggtcatggttaggtttggccattctttgtatattcagtctctcaattgggtgaggattagattttgtttctcttgacctagctagcttttagctccaaagttttgtttaacttggaagaagacagcagttctattatttctgtcaaggataaacacagacattgggatctgaaaagtattatgggaacatacataaatatcttcatagtgagggtcaggccggagagtcaccctttgccttaagcttctccatttccttactgaattcctatttctattataactgacgcttcactagcttccctccctttagtggagggcccggcctcctccgcccctactttcttcagtcttgcccttcgagggcaggagaagacggttgcgccctactaactcttcaccttacagtccagcttctccccccaccaccccggtgcgctctctcggtttgctaccctctccaccaggcctccccactccacctgcgcaacgcccccagctccgtgctctccggagtaatcccccctcagtcgcactctcacagcccggcccctgcccccgcctcacccccagttgtgccttcacctcccggttcctcctagacaggtcccccaagatacgccctcacagtccggtcccccgccgtcctctcccggcgcacgctcaagtccggtgccttccccccgcagacccccgaggcgcaccctcaagctcggtgcctctgcgccccccgcaggggcgccctcaagcctggtacccttcacatgagagccccccgggcgcaccctcaagctcggtgtacccccccataccacccgcaggcgcgccctcatgcccgaagacttcccccgcccaggtgcaccctcaagcccggtgccttcccccacaaccagcgcccccaggcgcaccctcaagcccggagcctacccgccgccaggcgcgccctacaggctcgccccgtcccaccgcgcagcgccccccgcgcactctctggagtcctccctcctgcctggtgcggcctccgggcccggtcggccccccttcctgcccccacactcagacgcgcgcccggcgtctccgggtcgctagttccgcgccttcctgcatggaggcgcgccccgagaggctcggacgcggccccttaggcccggcatcagcctccccggccagctggagaagtcaggtcagcttcctgtccccgagcagctgcccgggggccagttttcaaaacatatccttagtcatgtaataaagagatgttcctctggtctcaactcccgatttttactttggaggggcgaaggcaggcctacccttgccagccaccatttctcaatcacgtcgcggctgtggaaaagcagccgtcctgtcccttcagaaaggaactcgtatttccccctcgaacttttctcgtcggtgtgagagaagggccctccattttctcctcaggaagctttcgcggcccgacttcctctcaccaccaggccaggaaggcagtgacgccgcggcgaatatagccgcggcggccgaggtttcgccatcttgagtggaggaggagccgcggtcgccgccatgcggagaggcagggaaagagggaggaggcggcgggcgggcgaacgggcgagcgagggagggggcagaggagccgagttagctcagccaggcggcgacttcggcggcgccacgagagcgggcagcggaggaggtagggctggacagccgggggagccggcggctcgggcggctggcctgcgcgcccctcggagcggggcgggggcgggggcgagaggaggccgtagcgagagggctgggtgggggcgggcggaggtttccgaggaggaaggagcgtccgccattttgggagcttcgagtcaacaataaaggaccgagggtgccgagcgggagtggcctcgttggtaggacacgggcccgagtcgcgaggcttggggtgaggtggtggggtcgaggtcagcggtgctttgggggctgtggggagccccccgggccggctctgggggactctcgggcggaggcctaaggcctggccgggcctggggaggaaggcggtcggcagctgtgtggggtgggagcgcctgagaggaggcgaatataggaatgtggtg

SEQ ID NO: 8431 - DNA, 2300 bp, Homo sapien
agacgccatgctgtaaatttaaaataaaaaaaaaatgtaagccgaaccttctttttaaccttaagaatagtcttcactattctccaccaccttcccaccggctgtgtagaaataacgaccaccaaatgagaataggctatttactcagagctggcaagagtcagccgcgacccatcacttgatttaacagactcataggcaggcaggggagtggaaaagctttacatatactgaaaaaagggagaaacttcaggttggctctgattggaggatgttggcatcgggaagttggaggagggctatactagaagcagggcttcttacgcgattggtgtgaggagcacatttggctttctctgattggcccagagctggaagcaggggcaagaaatagggaagctgccggttaaagattaagtcctgacccttctggccgattactgaagaggttatgggtaggaggtcatggttaggtttggccattctttgtatattcagtctctcaattgggtgaggattagattttgtttctcttgacctagctagcttttagctccaaagttttgtttaacttggaagaagacagcagttctattatttctgtcaaggataaacacagacattgggatctgaaaagtattatgggaacatacataaatatcttcatagtgagggtcaggccggagagtcaccctttgccttaagcttctccatttccttactgaattcctatttctattataactgacgcttcactagcttccctccctttagtggagggcccggcctcctccgcccctactttcttcagtcttgcccttcgagggcaggagaagacggttgcgccctactaactcttcaccttacagtccagcttctccccccaccaccccggtgcgctctctcggtttgctaccctctccaccaggcctccccactccacctgcgcaacgcccccagctccgtgctctccggagtaatcccccctcagtcgcactctcacagcccggcccctgcccccgcctcacccccagttgtgccttcacctcccggttcctcctagacaggtcccccaagatacgccctcacagtccggtcccccgccgtcctctcccggcgcacgctcaagtccggtgccttccccccgcagacccccgaggcgcaccctcaagctcggtgcctctgcgccccccgcaggggcgccctcaagcctggtacccttcacatgagagccccccgggcgcaccctcaagctcggtgtacccccccataccacccgcaggcgcgccctcatgcccgaagacttcccccgcccaggtgcaccctcaagcccggtgccttcccccacaaccagcgcccccaggcgcaccctcaagcccggagcctacccgccgccaggcgcgccctacaggctcgccccgtcccaccgcgcagcgccccccgcgcactctctggagtcctccctcctgcctggtgcggcctccgggcccggtcggccccccttcctgcccccacactcagacgcgcgcccggcgtctccgggtcgctagttccgcgccttcctgcatggaggcgcgccccgagaggctcggacgcggccccttaggcccggcatcagcctccccggccagctggagaagtcaggtcagcttcctgtccccgagcagctgcccgggggccagttttcaaaacatatccttagtcatgtaataaagagatgttcctctggtctcaactcccgatttttactttggaggggcgaaggcaggcctacccttgccagccaccatttctcaatcacgtcgcggctgtggaaaagcagccgtcctgtcccttcagaaaggaactcgtatttccccctcgaacttttctcgtcggtgtgagagaagggccctccattttctcctcaggaagctttcgcggcccgacttcctctcaccaccaggccaggaaggcagtgacgccgcggcgaatatagccgcggcggccgaggtttcgccatcttgagtggaggaggagccgcggtcgccgccatgcggagaggcagggaaagagggaggaggcggcgggcgggcgaacgggcgagcgagggagggggcagaggagccgagttagctcagccaggcggcgacttcggcggcgccacgagagcgggcagcggaggaggtagggctggacagccgggggagccggcggctcgggcggctggcctgcgcgcccctcggagcggggcgggggcgggggcgagaggaggccgtagcgagagggctgggtgggggcgggcggaggtttccgaggag

SEQ ID NO: 8432 - DNA, 2300 bp, Homo sapien
ttggggcagcttcctcctggaggtttcaggactgtacgtgctggagaagaagtgtgatgccttgtcctgaaagccgtcttctttgaaagcagcttctaaaggcagtgaatggagaagagcgaggaaacgaccccaataccaccaacagaggctggaaactcctcaggctgtttaatcctaagaatgatgcatctgttggccgggcacggtggttcacatctgtaatcctagcactttgggaggctgaggcaggcggatcaccttaggtcaggaattcaagaccagactgaccaacatggagaaaccccatttctactaaaaatacaaaattagccgggcgtggtagcgcatgcctgtaatcccagctactcgggaggctgaagcaggagaattgcttgaatccgggaggtggagtttgtggtgagctgagatctcgccattgcactccagcctgggcaacgagagcaaaattctgtctcaaaataaataaataaaaatacaaaattagccgggcgtggtggtgcatgcctgtaatcccagatgctcgggaggctgaggcaggagaatcgcttgaacctgggaggtggaggttgtggtgagccaagatcatgccattgcactccagcctgggcaagaagtgcaaaactctgtctcaaaaaaaaaaaaaaaaaaaaaaaaaaagaatgatgcatctgttggggatgcagtggggtaagcatcttcagtaagcaaggtgtgaagaggggaaagagggaaggtgaatatggaggagagggtgaaggagggcactggaaagggtagtaggatcccagcaaagggcgatttggctgaaagggagcgtgataacaagggtgggggtggggccaagaagcagccaccatgtgtgggtgcctctgtgcgtgcagtcatctttctcacatcattgtggatcaagagaggaaatgcccacttctggaagaaaaagccacaaaatgagacttggaagggaaattgatcaacatctacaaaacggcttcttaaaggaagcggccctcagacaggacagagttgagggaaaggacagaggttatgagtgcctgcaagagtggcagcctggagtagagaaaacactaaaggtggagtcaaaagacctgagttcaagtcccagctctgccactggttagctgtgggatctcgggtaagttgctctccctctcggcctcacggacctcctgaataaaaattgagggttagactggatgatctctgaagccatctctagcttggtagtttatgaggttaataatttatgagcaaacaaagttaatttatagatagaacatcattatttttgagtcagaaaatgactctgtaactatgtgcttttcttggtgatttcactttttttttttcttttagagacatggtcttgctatgttgcccaggctggtatccaactcctggcctcaagccatcctcctgcctcggccttccaaagttgatttcatttttgtcttccagtattgttttactgttgttccctttgaaaaattctaacctatcttttctgaacttgagctgagaagggaaggggttttgcctctgttgggcaaaaggatggtggcaagtagtgtgaccaagtgccctaacttgccaggacttaggggtttcccaagtcaagggacttttcagtccttggcagactggaatggttgatcaccctagtggtgaggaaaatgaaggtttggaggtggcttggaggagaggttgctgggagagctcttctcctgttctctgttgatcaggagtttccctcatcaacctgctgactttgcgtggtggtttcattacaagttgtgagccccttattgggggtatagggaggagaagtgagggcagcctttaaactagtcataggccccagttgagacaattattgccgggaaagaagctgaaatgcttgactagcactgatgctgtgggggattttccctctttcttcaaaaaaacagaaaagacccagtggaaaaaaaaaaaaaagtgatgagttgtgaggcaggtcgcggccctactgcctcaggagacgatgcgcagctcatttgcttaaatttgcagctgacggctgccacctctctagaggcacctggcggggagcctctcaacataagacagtgaccagtctggtgactcacagccggcacagccatgaactacccgctaacgctggaaatggacctcgagaacctggaggacctggtgagtagacacgggtagcttcctgtcgccgaggccctgtctggaattctaacatcctttgccag

SEQ ID NO: 8433 - DNA, 2300 bp, Homo sapien
atgcagtgggacatctccctagggctcccatctcctgagaaccagatttagagggggcttgggaggggcctgtgtcttcctccttgccaagaggtatttgtctggcagcgttcagagagggtaagatgggaggaagctggtttgaggggtgctgggaattgacagcacatctcagcaggaggtgtcaaacagacgttttgggggttcgggagtggcacatgttaaagccacttcccacacataggagttctagctcccccaatctcccccaaactatggagagaggcaataaagcaaggttggctccggcctcatgggaaattgaggaatcaggaatcctgaataccatggggcatgtgctgctgaaggaagccctccaatcccatgcccagagggagcacagggcagaccatttgcgtgagcggtgtgcccattctttgacatgaaaagcttctgaaacctgaggccctcgtgcacacacacactcttgacagcaacatgcaccttgcatagacacaggtgccaagatgggccacaccagcatgtggcctagacaggcacccagcagacaacagcctggtcatgggccagggtcacatgccccaaagaaggcaagaaacacaatgaccagaatgaggctgagagtggagctagaatctagttagaaaattgctgtgagcactggggaggagcaggggctgtaacagtgtccagtattgaggggcttagcgggaggtggggggtgtaaggagatgcaaagtgcttggcctgtggtagggcccaaaatgttactcttctccttccctccactgtaggatgcaggctcctccctggataattaagtctccaagccccacctgacttctccaaataatgaggctgccccactgcccagcactggccagcatggagctcagctcacatttgctaatggggattctatgtcagcaggtgcattgggcaggggtgcctagcatgcctcagggatctatcctgggtcccctcctcttcagcactctcagcccagctttgggggcactctcaggcaacacagagttctttacaagctggaaccatgggtccaacctaaccagatgaaattgcatggggaaaaatatacaagccaggactcaggtttaaaacattacccgtccagggataagttagggaggaccaggtaacaacagttcgtcagaaagacttgggagtttgtcacctacaagcttaagatgagtcacgggagtgacgtggccagccgaagggccactgttaccttcatctaggtgaacagaggcttgtaagtgggcagctgacaccagcccagtttggttggtctggacaaggatgaccactttgttgaggggcttggaaaaccctgcccatagaggaaattttcaggtactaggggtgtagtgtctgggacagagaagacttgagtccctgagggctgatgtcaaggcttggaaagaagctccatgggcaagagggcagcaatggactcttgctatgagcttccagggggcagtctagaaggactgggcagaagctgagggggtagcgtttcagtcaaaggagggagaactttctaacagacagaactgtccagcaatgagatggtacctttaggaaggagaggaacgtttgagcccaagtgtgtgggaagagattcctgccctgggaagaaggaggctggactctgccttcaa[450 bp omitted]tgtaggtctgtaccccttaccccgtctttcttcaggaggcccacagcccctaaagaccatctgagactctggcttgccatttgtcacatctcccttgccgcacccacagccttcagggacaagtctgtgagactcctctttcat

SEQ ID NO: 8434 - DNA, 2300 bp, Homo sapien
gtgttgatgagatgaaatcacacctgttaagtccccagcagaatgccaggcccatgggagcctgtggagaggacacattttctctgtccctgctctccacatggtcaccactcttgccatcgtggaaaccagcctggtgagaacaccagatactgacatcaaatgtccctgtgggcacgagctgtaaggctgtgagcatcagtgggagggggcatcagctggtccttcttgtatctagaccacttagcccctttccctgtcctctctcctgcagattgtaatgtagcagacccagccatggcggccccacagctgggtcccggccaaaccacccaactgcccctcagcgagagcagcgtgccaggcgccccgcacggccctcctcctggccttcggcctgatgcccctgggggcgggggcgggggcgggggcgtccccggaaagcctccctcgcagttcgtatatgtcttcaccacccacctggccaacacgtaagtgcctggtgggcaggccaagtctctctctctctctgcccagcacctctcagcctggggttccgagggagccccgtgcaggggcagggtggggtgggtgagggtggggctccctcctgctcacctctctgagctgtcggtgcccccactctgtgcagggctgcagaggcagtgctgcagggccgggccgactccatcctcgcctaccaccagcagaacgtgccccgggccaagcttgaccaggtgagcgtggcgcctctgtgagcagcaggactgggtggaacgtccccttacctgtctcatgctctctttgtccttctgcaggcccctaaagtgccccccaccccagaaccgctacccctgagcacgccgtcagcaggcaccccgcagtcccagccacctccactgccgccgccgccacccccggcccctggcagtgccccgcctgctctgcccccagaggggcctcctgaggacagcagtcaggacctggcccccaactcggtgggagctgccagcacaggtggtgggactgggggcacccaccctaacaccccgacggctaccaccgccaacaaccctctgcctcctggaggagaccccagcagtgcccccggccctgccctgctgggggaggcagccgcccctggaaatgggcagcgcagcctggtgggctcagagggcttgtccaaagagcagctggagcatcgggaacggtccctccagacgctgcgagacattgagcgactgctgctccgcagcggagagactgagcccttcctcaaggggcccccaggaggagcgggtgaggggggcccaccagcacaagccccccctcccccccagcagccacccacggcccctcccagcgggctgaagaaatatgaggaacccttgcagtccatgatttcacagacacagagcctagggggccccccgctggagcatgaagtgcctgggcaccccccgggtggggacatggggcagcagatgaacatgatgatacagaggctgggccaggacagcctcacgcctgagcaggtggcctggcgcaagctgcaggaggagtactacgaagagaaacggcggaaagaggaacagattgggctgcatgggagccgtcctctgcaggacatgatgggcatggggggcatgatggtgagggggcccccgcctccttaccacagcaagcctggggatcagtggccacctggaatgggtgcgcagctgcgggggcccatggatgttcaagatcccatgcagctccggggcggacctccctttcctgggccccgtttcccaggcaaccagatacaacgggtacctgggtttgggggcatgcagagtatgcccatggaggtgcccatgaatgccatgcagaggcccgtgagaccaggcatgggctggaccgaagacttgccccctatggggggacccagcaattttgcccagaacaccatgccctacccaggtgggcagggtgaggcggagcgattcatgactccccgggtccgtgaggagctgctgcggcaccagctgctggagaagcggtcgatgggcatgcagcgccccctgggcatggcaggcagtggcatgggacagagcatggagatggagcggatgatgcaggcgcaccgacagatggatcctgccatgtttcccgggcagatggctggtggtgagggcctggcgggcactcccatgggcatggagtttggtggaggccggggcctcctgagccctcccatggggcagtctgggctgagggaggtggacccacccatggggccaggcaacctcaacatg

SEQ ID NO: 8435 - DNA, 2300 bp, Homo sapien
ttatttttttgagacagtctcgctctgtcgccctggctagagtgcaatggtgtgatctcggctcactgcaacttccacctcctaagttcaagcaattctcatgtctcagcctcctgagtagcgggattacagccatgcgccaccatgcccagttaatttttgtatttttagtagagacggggtttcaccatgttggccaggctggtcttgaactcatgacctcaggtgatccgcccgcctctaccgcccaaactgctgggattacaggcgtgagacaccgctcccggctctctgtttttcaaatggatttttttagtctgtgacattgatttaaacttactgttaaaaaatatatttctttggcctgccccctgtgcaaggaggaggttagtattttacattttatagatgaagaaaccgaggcttagagggatgtctggttcataaaatcacaaagtcagttagtggtggggctagagtgaaaaaccatccatcatttggatcatcagcttgtgtaccctctctgccttctccctaactgggtcactagactgtgtgcacatacacttacccagtgagaggggcagcagctcagagcggagcttcagagtcccggccctgggttcagttctggctctgcactaactggctgtgtaactgtgggtgaggaacttatttcctcctttgttaagtggagtgtgtgacacgttcctcccagggtgtgttgatgagatgaaatcacacctgttaagtccccagcagaatgccaggcccatgggagcctgtggagaggacacattttctctgtccctgctctccacatggtcaccactcttgccatcgtggaaaccagcctggtgagaacaccagatactgacatcaaatgtccctgtgggcacgagctgtaaggctgtgagcatcagtgggagggggcatcagctggtccttcttgtatctagaccacttagcccctttccctgtcctctctcctgcagattgtaatgtagcagacccagccatggcggccccacagctgggtcccggccaaaccacccaactgcccctcagcgagagcagcgtgccaggcgccccgcacggccctcctcctggccttcggcctgatgcccctgggggcgggggcgggggcgggggcgtccccggaaagcctccctcgcagttcgtatatgtcttcaccacccacctggccaacacgtaagtgcctggtgggcaggccaagtctctctctctctctgcccagcacctctcagcctggggttccgagggagccccgtgcaggggcagggtggggtgggtgagggtggggctccctcctgctcacctctctgagctgtcggtgcccccactctgtgcagggctgcagaggcagtgctgcagggccgggccgactccatcctcgcctaccaccagcagaacgtgccccgggccaagcttgaccaggtgagcgtggcgcctctgtgagcagcaggactgggtggaacgtccccttacctgtctcatgctctctttgtccttctgcaggcccctaaagtgccccccaccccagaaccgctacccctgagcacgccgtcagcaggcaccccgcagtcccagccacctccactgccgccgccgccacccccggcccctggcagtgccccgcctgctctgcccccagaggggcctcctgaggacagcagtcaggacctggcccccaactcggtgggagctgccagcacaggtggtgggactgggggcacccaccctaacaccccgacggctaccaccgccaacaaccctctgcctcctggaggagaccccagcagtgcccccggccctgccctgctgggggaggcagccgcccctggaaatgggcagcgcagcctggtgggctcagagggcttgtccaaagagcagctggagcatcgggaacggtccctccagacgctgcgagacattgagcgactgctgctccgcagcggagagactgagcccttcctcaaggggcccccaggaggagcgggtgaggggggcccaccagcacaagccccccctcccccccagcagccacccacggcccctcccagcgggctgaagaaatatgaggaacccttgcagtccatgatttcacagacacagagcctagggggccccccgctggagcatgaagtgcctgggcaccccccgggtggggacatggggcagcagatgaacatgatgatacagaggctgggccaggacagcctcacgcctgagcaggtggcctggcgcaagctgcaggaggagtactacgaagagaaacg

SEQ ID NO: 8436 - DNA, 2300 bp, Homo sapien
ggaagaggaagtgacctgagtggtggagagagcttctgaggactgaggggtcctgacacccaggagaaaggggatttgggaccctgtcgtctcgggcgctgtatctccctgagccagaggccaaggatctcgttcgccctgttgtccccagcagggtcctgggctttcacgtcatcacagggggccctggcagctcaggagcatgaaccctccaaaacatttcctcactgcctctttggggtggttttgagctaggcagtgacactgctgggccagctggtgagccaagcagaggctcccaacgtgggggcagctaggagcaggcaggttgccactggatgtgtgaacgcctgccctacctgtggtagttgtgtgtggagcagagccggtgtgtcatacctggaggctctgggcatctgagccttcctcagctccctcccccagctaggatcaagtccactttaacccttagcaacccttaggctgctagctcctaccctcgcgtcactcggggtgggggagcggatggatatctcaggccctttgtcaagccgcctcttccgctcctccgattcattctcctggtatgcgcctggccttccactcaggtgactcgcacctgctccctgtttgtgagcttgctacccctccccacctaaccccctaagagggaggcacggtgacgtgttcccagagccccatccctttgctttctcgtacctcaagggcccctggcctggtactagcaagcccccttcactgggtgctttaaaattgcattgggctgggatcagccctcttggcttcccatcaccaggccttccaggtgtcttcggagactgtgagtgtgtggaggaggaggggtcttcgggagctggggcagactcttgaggggcaaaggggggaggtgtgagatgggaaagtcctgactcatccacgcttgactcagctcgccctgcggcggggtgggagagagggggtggagtcccggaggggagggtgactggaagagtcttctggggaggagcctaggcctgaacggccactggagaggactgattttctaatagccccttcccaaattcttacaggttctcaatttttgaggctgtgaacataggtagtgagtggcccttgccctgcccctccccccttatgggggacctgggcactgtggctggaatgtgggaagcccaactatctgatgcaggctcagaggagcagtcatggctggcgtggggaggtggggtcactgcagtgtctggaatgagggtccgtccccacactgccacatactggatatgtgactcaaggtcacgccacttccttttcccagacctcagtttcctcgttgaaatggggtcgatccttttgagaatcagcgagctggtgaagggagagcctgagatgcatgccagccaggagcctgctcagagccctggtatctcagtgactccagcctctgcctctgctcttccctggttgtgatggagaagctgggggtggcgggctgcttcccaggcaggtcctggactttggaaccttcccccaggagccttcctccccagagacacggctggagtggcgaaggccaatgtgccctagggttaagttggggttagactcccgcagggtggcaggtggggccccctcacccccaggtccccgcccagcctccagcagccccgcagggagcatcaggagtgtgcaccggtgtctggccgggcctgtcaccgggacgaagctcctgggcccaagactcctcccctttgaccgggatcggctgctggagggctgctggagggcgggtaggggaggcgaggggggagccagggctgggggcggttgggtgaggcctctgtgtttgtgtaagtctgttgctgtatctatggccctgtgcgtgtttctttgtgactaccaggctcaactttcttcggctctcttgtggccggcctcagtcttttcatctgttcaatgggtccggcgctcccactcagccctcgggcagccccggtgtctgcgcgtgccccaggctgtctccgcgcctcccgctccggcggcgcttccctggcctcggcgcgcctctagcttcctgggctccgtgcgtgtcttgtctccctgtccacgtgtgagctgtgagtgtgtgtgagtcagagttcgggtgtctgtgggtctctgagcctctgctggcagcacccggggctcgccaagctcttgccggctggcgcgcgcccagcccctggcgggacttgtccgtgtgtctgtccgcgcgcggggcctggagaagcacgctgcagtcc

SEQ ID NO: 8437 - DNA, 2300 bp, Homo sapien
actagaaatgcagaattgattgggcacggtggctcacacctgtaatcccaacactctgggaggccaaggcgggtggatcacttgtggtcaggagtttgagaccagcctggccaacatggtgaaacctcatctctactaaaaatgcaaaaattagctgggaatggtggcacatgcctataatcccagttactcaggaggctgaggcaggagaatcgtttgaacctgggaggcagaggttgcagtgagccgagatcacgccactgcactccagcctgggtgacacagcgagactctgtctcaaaaaaaaaaaaaaatgcagaatttcaggcttcaccccagacccactgcatgactgcatgagaagctgcatcttaacaagatccctggtaattcatacgcatattaaatttggagatgcactggcgtaagaccctcctactctctgcttaggcccatgagttcttcctttactgtcattctccactcaccccaaactttgagcctacccttcccaccttggcggtaaggacacaacctccctcacattcctaccaggaccctaagcttccctgggactgaggaagatagaatagttcgtggagcaaacagatatacagcaacagtctctgtacagctctcaggcttctggaagttctacagcctctcccgacaaagtattccactttccacaagtaactctatgtgtctgagtctcagtttccacttttctctctctctctctctctcaattttctgagacagagtttcacttagttgcccaggctggagtgcaggggcacaatctcggctcactgcaacctccacctcctgggttccagtgtttctcctgtctcagcctcccgagtagctgggattacaggcacacaccaccgcgttagtttttgtatttttggtagagatggtgtttcgccatattggccaggctgatctcgaactcctgacctcaggtgatccgcccacctcggcctcccaaagtgctgggattacaggcatgagccaccacgcccggctgatctcttttctattttaatagagatcaaactctctgtgttgcctaggctggtcttgaactcctggcctcgagtgatcctcccaccttggcctcccaaagtgctgggattacaggcatgagccactgtgcctggcctcagttctactacaaaaggaagccagtaccagctaccacccagggtggctgtagggctacaatggagcacacagaacccctacccagggcccggaagacgtcctgactcctctcccctccctctgctcagaactcctctgcttctttctgatgtagcccagggctggaggaggcagtcagggaagttctgtctctttttcatgttatcttacgaggtctcttttctccattctcagttcaacaaatggttgctgcccaaggctgactgtgcccacccccaacccctgctggccagggtcaatgtctgtctctctggtctctccagaagtcttccatggccaccttcgtccccaccctccagaggaatctgaaaccgcatgtgctccctggcccccacagcccctgcctctcccagagcagcagtacctaagcctcagtgcactccaagaattgaaaccctcagtctgctgcccctccccaccagaatgtttctctcccattcttacccactcaaggccctttcagtagccccttggagtattctcttcctacatatcagggcaacttccaaactcatcacccttctgaggggtgggggaaagacccccaccacatcgggggagcagtcctccaaggactggccagtctccagatgcccgtgcacacaggaacactgccttatgcacgggagtcccagaagaaggggtgatttctttccccaccttagttacaccatcaagacccagccagggcatcccccctcctggcctgagggccagctccccatcctgaaaaacctgtctgctctccccacccctttgaggctatagggcccaaggggcaggttggactggattcccctccagcccctcccacccccaggacaaaatcagccaccccaggggcagggcctcacttgcctcaggaaccccagcctgccagcacctattccacctcccagcccagcatggcacccctgctgcccatccggaccttgcccttgatcctgattctgctggctctgctgtccccaggggctgcaggtctcttccatctctggcaggggtgggaagggggctgggggcctggacagggagcactgtaccttccagggctctcaaagagaggtctg

SEQ ID NO: 8438 - DNA, 2300 bp, Homo sapien
aggaaggaaagaaagaaagaaaggaagaaaaagaaagaaagaaagagagaaggggtacatatacagcacggtacatatacatcatggaatactatgcagccataaaaaagaatgagatcatgtcttctgtgggaaccgggatgaagctggaggccattatccttagcaaactaatgcaagaacagaaaaccaaatgccacatgttctcacttgtaagtggaagctaaaagataagaactcatgaactcaaagaggggaaccacacagacactggggcctacttgagggtggaggatgggaagagggagaggagcagaaaaaaataactcttgcgtactaggtttagtacctaggtgatgaaataatctgtacaacaaacccccgtgacatgagtcatatgtagcaaacctgcacatgtacacttgaacctaaaagttaaaaaaagaagaaacatcacttctgtagtattcttgccaaaaatgcatactctaattaagaggaaacattagccaaatccaaactgagggccattctacaaaacaaatggccagtgctcttcaaaaatgtcaatgttatgaaagattataaagacagagagcccgggtgcggtggctcatgcctgtaatcacagcacgttgagaggctgaggcagttggatcacttgaggtcaggagtttgagacccagcctgggcaacatggcaaaccctgactctaccaaaaattagctgggcatggtgtcgcacaactgtggtcctagctacccgggaggctgaggtgggaggattgctggagtctaggaagttgaggctgcagtgagccgattgcaccactacactccagcctgggtgacaaagtgaaaccctgtctcaaaaaaacaaaaaagtaaagatggcttgtctgatggtagtgggttatcagaacttattattaataacattagtgtcactaaagttggtatacaaccccctattgctaaatttggctttaaaaaaaaagagaaagaaattgttccagattaatggagagtaaacagacatggatattaaatgtattgcatagtgctaaaagggataacggccagaaaaaaaaatttacataaatgacattgttgggacaattggtaaaatctgaataagaactgcatattaaatataacattgaatcaatcttaaattttctgatttctgattttctggatacataaaacaatatccttgtttttaggaaatacagaaatatttttgggtaaagggacacgatgtctgcaaattactctcaaattgttaagcaaaacataatgtatttgtagtatatatggaaataaaaatataaatgtgataaaatgataataattggtgtaattggtcaatctgggtgaaaaagtatacaggaattttttgtagcattcttgggatttttctgcaaatctgaaattattaaaaacaaaatttttattttaattttattgtcccccaggctggagtgcagtggcaccatctcggctcactgcaacctccacctcccgggtttaagcgattctcctgcctcagcctccctagtagctgggattacaggcgtgagccaccacgcactgctaatttttttgtatttttagtagaaacggggtctcaccatcggtcaggctggtctcaaacttctgacctcaggtgatccgtccacctcggcctcccagagtgttgggattacatgcgtgaaccaccgcatgcggccaaaagacaaaaaaaaatttttttaatcaaatcaccatccaatgtaattccatctccaccatctactacagatgtgatcgtggataaaccataaacctttcataacttctagaaagtaactactaatactattatggtagaaaggatcaatgttaaagcaaaactataaaaataaataaatacgatcacttgaccatggcgccttttcaatgaaataaggggcaaggggcttgggcaaacgaggatgcgtaagatgatctggggtcccttccggatccccaggtcctcgacccccggcatgtaagggtagagtcaaggagggtcttcttaagcgttcctcggcgcggtcctgaagagattaaaggcgtcaaatggaccgctccacacctgagctgccgccaagctaactcaatccgagccggcgcatttgagaaggcgcctgtgagggtcgctcctcagccgccgcgctcccactccgcgtccccactccgcgccgccgcgcctctgccagccccgaaggtggacgtgaagctccaacacctcgacttctgggcccgcctccatggcca

SEQ ID NO: 8439 - DNA, 2300 bp, Homo sapien
acttttttgtagagacagggtttcgccatgttggccaggctgctctcaaacacctgggcgcaagccatctgcccacctcggtttcctaaactactgggattacaggcatgaaccactacacccagcctccaggctttaacttggtggtgtcattcactgggaggatgaaaataggggatgtcctgaagaggaagatgttgagttccatttgacacaagccgaattccgatgccagctgactacttggtggtggagaacttcagtgaagcagtttcataagcaaaactgctgaaggcttagacgttactagaagttgaagcagatagtggtgtagactactctgaccagctttggaacacatgagggaagcatgcctgggttgatccaaaattggggtttgacagaacgagaggtcttggaaggtcaagtgaagtaagaagttgccttgagagggcagctgaacattcctgagatccaatgacgaaactgaagcaagaggatctaagacctagaccagtgcttctcaaatttgatcccgcatcagtatcccctgaaaagctcataaaaccacagccggctgggcctcaccctgagttctttttttttttttgagacggagtctcactctgtcgcccaggctagagtgcagtggtgcaatcttggctcactgcaacctccgcctcttgggttcaagcgagtctcctgcctcagtctcccgagtagctaggattatgggcacacgccaccacatctggctaatttttctatttttagtagagacggggtttcaccatgttagccaggctggtcctcaactcctgacctcaggtgatccaccctcctctgcttcccaaagtgttgggattacaggcatgagccaccacgacaggccctcaccccaagtttctgattcagtagttctgggttggggcccaagaatgtgcgttactgacaagttccctgatgctgatgctataggcccagggggaatggggaagcacacttcgaaaacccctggtggagagtaaagcatcagcagcaggcagacgttgaatcatttccagagtgaatggatgaaaagaggcgtcttcttcaggaagagaggtcttcctgtagtcaaagactaggctgacggtaaggccacatcggataacttaaggtggtaggcagagccgaacttcagagtctggattcagagacgaagcaatttggggggacaaggtcgaggactgaccctgccaggggaatgataggagatcaaggaattgggtgttacaagggtattcaaaatgaattatttctggcagaggctacagtctagaggacagttccaacaggaagtgaagatctgaagggttggaagtagctacgccgggcctgaattctgtagcgctgaccgtgggcaggccctacagacagcaagcagtccatccacgttagtgcaccagaactagcaacaaaatctacgggaagtgtgcgatccctcagcaacaacgctgcacgctgtgtagcctcccttacagctttataggaaccacggcgagcacaccctgtgggggcgattgagtttagttcgtggtcccctccagcaggcattcccctccaaccgccgtactgatgagtgacggggatcaggtgctgaccgcgctacttaacacccgtgcaaccctcctcaaagctccttacctcctcatgcctcaggtttcccgcttaaaaatgcgctaatagcagtaatagtaaaccacacaacctcagcgagatgacacagtgaggtggttaacgtaaagctctggacacacagtgcgcacctatacatcagttattaagtgtcctgttggctactacaggtcctggccaatgctcagagttgcgtgtggcctatgagcctcacgttgcggcgggcgcgcgtccccgcacatctgcaggacggcgccatcctcctccttaacccgcccagctctgggatgttgttgcctgggcgggactagaggcccgggaggagtctgcgcagccgcagaagggcttgcagtggcgcctgccgggcgctgagggccgcgggagccgccgggttagccccaccccgaggggtcagggtcagaggccgccggatggcgtaggatcggccgctggtggtggtgataccgggtacccgggctatggcgccggcgcagcgctgccctctgtgccgccagaccttcttctgtggtcgcgggcacgtttacagccgcaagcaccagcggcagctgaaggaggctttggagaggctcctgccccaggtgcggaggcaaggctagagatgg

SEQ ID NO: 8440 - DNA, 2300 bp, Homo sapien
tggaaactgagttcaaggaaatagaagaaactgattaaaaaaaaaaaattacagtgtggttgaagtccagaaatttctaggcagctggctgggcacagtggcttgtctgtagtcccagcactttgggaggctgaggtgggaggattgcctgagaccaggagtttgagaccagaggaaaagaaaatgacaatgtggaattgtaaaaaaaaaaaattttttttttttttgagacggggtctcactctatgtcgccaggctggagtgcagtggcatgatctcggctcactgcaagctccacctcctgggttcacgccattctcctgcctcagcctcccaagtagctgggactacacacacccaccacctcgtctgggtaattttttgtatatttagtagagacggggtttcaccgtgttagccaggatggtctcgatctcctgacctcgtgatctgctggccttggcctcccaaagtgctgggattacaggcatgagccatcgtgcccggccaaaaatttttatttatttgaggaccagagagaagttttgtgctttagcagactcctccgtgttttcttcttttcaccctgttcaaagtttccaggtattggctttttttttcttgctgtttttgagacagggtattttgctctgttgcccaggctagagtgcagtggtgtgatcacagctcactcctgcctcaaccttgtgagcttaagcaatcctcctgcctcagcctccccagtagctagcactacaggcaaatgtcaccatgcttggctaatataattttttttttttagagatggggtttcactatgttgttcaggctggtcttaaactcctgggctcaaatgatcctctgtctcagcctccaaaagtgctggaattacagtcatgagccactgcaactgaattgcctttttttttttaaagagacattcttgctatgctgcccagctggagtgtagtggtgggatcacagctcactgcaggttcaacctcctgggctcaagtgatccctcaggctcaggtgatccccctgccttagcctccagagtaagtaggactataggctagcctccagagtaggtaggactatatgcccagctaatccagataccctttttattaaaaatctgaaaatcaggctgggaccagtggctcacacctgtaattgcagcactttgggaggacaaggtgggtggatcatgaggtcaggagttcgagaccagcatggccaatatggtgaaaccccatctctactaaaaatacaaaaattagctgggcatggtggcgcatgcctatagtcccagctactcgggaggctgaggcagaagaatcacttgaacccaggaggcggaggttgcagtaagctgagatcgtgccactgcactccagcctgggcaacagagcaagactctgtctcaaaaaaaaaaaatctgaaaatcattatggtatgtcatctacccttattataatgctaaaatgatttctgataaaatagttcctaactcaactagaaaactataaagaatgaaagaatgagcagagtactcatgatgcctttgagtaaaatcgaaacatcatagagcgtgatctaatttccaaatcaataggcagtattgtaacattaaaggaaagctattccaatcacttagaaatacttgctaagtactgctttttacagttatgacaactgtttctatgcatatgaaccaagcaaccaaatatctataaccatggaaatatctgattagaaatatttctaatttgggccgggctcggtggctcacgcctataatcccagcactttgggaggccaaggcaggcggatcacctgaggtcgggagttcgagaccagcctgaccaatatggtaaaaccccatctctactacaattacaaaaattagccaggtgtggtggcatgcacctgtagttccagctactcggaaggctgaggcaggagaatcgcttgaactcaggaggtggaggttgcagtgagccaagatcatgccactccagcctgggcaacagaacaagactctgtctcccaaaaaaaaaaaaaaaaaagagagagaaatatttctaattattggccgggtgcagtggctcacgcctgtaatcccagcactttgggaagccaaggtgggtagatcatttgaggtcaggagttcgagaccagtttggccaacatggtgacaccctatctctacgaaaaatacaaaaatcagccccttttcacaagatggcaccaaaagctaagaaggaagctcctgcccctcctaaagccaaagcaag

SEQ ID NO: 8441 - DNA, 2300 bp, Homo sapien
ctttggacaggtggatctcttgagcccaggagaccagcctgggcaacatggcaaaaccgcatctctatttaaagaaaaggaaaacaaaaagacagagttctctcagaggtgcccagaatggtcttaaaactccttggctcaaatgatcctcctgctttggcctcccaagtagctagaaatacaagggtaccactgcacctggctccagaattgcttaatctgacgttcggtaaccgagaatcctagtttttaacgatcatctatccttacttttcctttaaattagggctccattatcttccaccccccccccctttctgagacagtcttttgctgtcactaaggctggagtgcagtggtgtcatctcggctcactgccacctccatctcctgggttcaagggatcctcatgcctcagcatcctgagtagctgggattacagacgtgtgcccccacgtccagctaactttcagtagagcaggttttcaccatattggccaggctggtctttaactcctgacctccgttgattcacccgccttggcctcccaaagtgctagaattatagacgttcagtcactatagttagctgagccttattattgtggaattatggtaatcagaccatactactgagtagaccgtactaaatttctggttttaaaatttaatacatcaacaaaatatttaccataaaggttttaaacattttcaaagttgtttcaaaatagtaatctaattatttcaaaaacggttgtccctgtaattctatgcatccatttactcgaaacataaaagatccttgggcttcactaaactgccacagggtccacggcacaaaagtggctaagaaccctgagaattcatctcaggatcaggagtaagacgtcagaattacattactaacagccaatggtcaagccacgctttttttttttaattctgcttttccagcaaaaccactgaagatgcttaacatggtcaagacaatttaacctacaaaaacacacatgtaggatacacccctcacctttactaaggagctcctgaagggctgccctggccagggagcctcgaatcttcagtctctcagagaccacagctggggttataagtttatagttgggaacttccttacagagtttatcataggtagctttgtcaaacaagactaagttattgagcttgtcccgaactttgcctttggaccacttctgctcaccaaaacaaaacagaaacaagttagtatttctggcagaagcaccctttccctctcgagtaatctgcgtcagagaaatctgttccaccgttatcaaggataaattacacattactaaaacaaaaacaaaaaaaaaacaccgacacgtttttggccttcaaacaggggccgagccccactagatcagttaaaaataacacagcaggcacagcggcagacacttcgcacaacagacccattttcatgatcctaatgggaaaaagaacgagtggtgacgggaagataaactctcacattttgactctagaaatctacacctgaaaaaccacttactatacaagttacctattactagaggattacgagagagttacccctagtctctttcagagaggtcttatttctaccttctttttggccttgcccccggatttgttcactgggtctttgtctttcttggccgactttccagcgtccttcttcttcttgtcgtccttaggcggctgtaggagggcagcgggaatgcaaccaggtcctcaaatagcgccaaagtcccctaatactgcgccctcagcccccgcaaactccaccaccagagcacatgggccaagcaataaccgcgcccgccctgcaaccgaggccggcaggccaaggagcgctcccgccgaaggctctccccactgagtcctcaaacccaagaacgccggcgacttcacacccctgaagcttaccattgcgaagctcggagaatagcagcagacaccgcagcctcgtcaagatgtcggacaaaaaggaagcgctgctcagaaacgggcccaaaaaccaccgtccgctgtgagtacttccggggcaaaaggcggagccaggcagaagaagtcccacggcgaagcgctcgccctctagcctgaggcggaagacaggaagtggattctagttcccaagccgcaccgcctaaatactgccggagtctgcgctagttgtgacgcatactatagcgctgttttcctgcactgataaacgaaaagcaatccaccaggtctcggcagctaactttccggcactacttatgcccgagcgtgtc

SEQ ID NO: 8442 - DNA, 2300 bp, Homo sapien
acatttcaaaaaaaaaaagaattgtgccaggaaaagcacaccccctcttcttgcttaccaaaggtgtctttggtcaaccccctcctcccaccttctccaccacactcctctggcccacctggagatgcaaacttatcagtatctcttccccaccttctccatcacactcctctggcctccgtggagatgcatacctgtcagtgtctggtagcagtgcaatttgaatgtgtctgtctccagcatctcaatgcctgagcttccctgttcaggagacagctgggagccgatggcaaagagcctatatgcaaaggaggcaaagttgctctaaggaaggagtgcttctcaaacttccactgaagtgtccctatttgctgaggagttcacattacagcctgggacagtcaggagaagtagtgtgaactgactggcagtagtgtcaaaatttctaagttcatttgaattctgtgaatattttacattcatactttgttacaagacattttacatctaaaactttgggtaaaatgaatactctaggaatatgtgccacgcttactaagcttgtgtttaagcaaaggccggcacatctgatatcacaattgagagcagaaaaagtttaaaggtcatttagttaaactggctttctttaaatatgaagaaactaaggctcagagaagagaagttgactttaagtaagatgacacctcggccgggcgcggtggctcactcctgtaatcccagcactttgggaagccgaggcaggtggatcacctgaggtcaggagtttgagaccagcctggccaacatggcaaaacccctctctactaaaaatacaaaaattagctggtcgtggtggcacgcgcctgtaatcccagctactcgggaggctgaggcaggagaatcgcttgaacctgggaggcagaggctgcagtgagccgagatcccgccactgcgctccagcctgggtaactccgcggcccctccccacccagcaaaaaaagatgacaccactgccgttattacctaaaatctagatctggatcggttgcgtttttcataacaccagaacgacgatttaagaaaaggtagacaaattacaagcgctgccgttcaggagacgggggacttacgagtggaacatggaggccagcataagcttctcattagaagtgaggcggggccggccaaatcgaatggacaccgggtaattagcagggttacccagatactccagcacctctttcccgtcggccgtgtacctgccattcacgtccatgccattgatggccagcactgcatgacccactgcagaggtgaagctaacggtcagcgaaggtgcagcccggggattccgccgaggggacaagggacccgacacaaccccttttcccccaaccccgcacctacaaccagcccacttctacagcactggggccctcccacccccgcacccgccacgggcccgagcctagcccacctcggatgccgtcccgctggccgaaagcaaccaacacacgctcatcgtgtagcttgagcagcagatccagcggataactgaaagttttctcagcctcagcccgtggcgcgtagctgtccaactggtaaatcaagccgccagctttgttcaccacatacacactaaaaatcgccatcgctgccttgccgctcggaaactggtattcagcctctacccgacggcccctccccggaaccgcatcacagcacttgccgccggccccaccccagcctcctcctcctcctcctcctcctcccgcgccccccgtgcagccacctgctgcacttgcgcactgggagcgacacgctcgggcataagtagtgccggaaagttagctgccgagacctggtggattgcttttcgtttatcagtgcaggaaaacagcgctatagtatgcgtcacaactagcgcagactccggcagtatttaggcggtgcggcttgggaactagaatccacttcctgtcttccgcctcaggctagagggcgagcgcttcgccgtgggacttcttctgcctggctccgccttttgccccggaagtactcacagcggacggtggtttttgggcccgtttctgagcagcgcttcctttttgtccgacatcttgacgaggctgcggtgtctgctgctattctccgagcttcgcaatggtaagcttcaggggtgtgaagtcgccggcgttcttgggtttgaggactcagtggggagagccttcggcgggagcgctccttggcctgccggcctcggttgcagggcgggcgcggttattgcttggcccatgtgc

SEQ ID NO: 8443 - DNA, 2300 bp, Homo sapien
gattacaggcgtgagccactgcgcccggccgagtattacttttaagtaagacacaaggaaaggccggtggctcacgtgtgtaatctcagcactttggaagacggagagggtaggatcacttcagcccaggagtttgagatcagcctggacaacatagaaccccatctttacaaaaaaaaaaaaaattagcctggtgtggtggcggacacctgtagtgccagctattaaggaagctgaggcgggaggattgcttaaacctggaaggtcaaggcagcagtgaaccatgctcgtgccactgcattccagcctgggcaacagaacaagaccgtgtctctaaataaataagacaacagtagctgggtgcagtggctcacgcctgtaatcccagcactttgggaggctgaggcgggcggatcacttgaggtcaggagtttaagaccagcctggtcaacatggtgaaaccccatctctgctaaaaatactgaaaatacaaaaattagccaggtgtggtcgtgtgcacctgcaatcccagctactcaagtaggctgaggcaagcagaatcgcttcaatctgggaggaaaaggttgcagtgagctgagatcgtgccactgattccagcctgggtgactatttagagaaaacagactttccttggtgtttatgtcatttttgtttgtttgtttgtggggttttttttgttgatgtttttttttttttttttttttttgagactgagcttcactcttaaccacccaggctggaatgcaatggtgccatcacggctcaccacaacctctgccttccgggttcaggcgattcttttgtctcagcctccggagtagctgggattacaggcacctgccaccatgcctggctaatttttgtatttttagtagagacagggtttcaccatattggccaggctagtctcaaagtcctgacctcagctgatccgcccacctcagccttccatgatatatgttgttcttcaagcagtttcccctggcttaagtggggagaaagcctcaggcctcacactttttttcctcaccctgggcccggcttaggtgtgagctctttgaccagaacctgaagctagctctggaggtggcagagaaggctggaacttttggacctgggtcataggctgaacctgttatggacccccaaattctgagagttcctgcaacaagaatactgctgttgacactccagtggaaatcccagcagccttgttagtgcacttgaaagtgggagaatgctgaccctgatgacttgtactgattcctgagccttaacactgtgctctttccttctgtatataccatggtcttactttccaactctgtacagatttatttatggaggagctaggtccataaatgttgtaataaatattcctttgatcttggtgtttgcaatctgtcttaatcgatggttttgggggaaagatacaggaagtgagtcaaaaatggttagggaattctgggaagatgattatgtgctagtaaaaaacataacaaatatgtgttcattaaataaatgaacataagattttgaagcatgagcattggatctagtcccagaattgctgctgatttcctggggtcctggggtggtggcagcagtggtggtggctgttatgatgatgatgatgatggaacatatttcaagcacttacagccaggcattcctgctttatctcacttgatcttcaccctaactccagggggtacattctgttacagataagagatttagcagactttctgcctcaaagtttccaagctagttactgacagtctgggtttgaaccaggctttctggctacacactcagtaaaccactgttacacttcttccctccatcaagttatttaatctgtccacaacccaatagctttatctctaaaataatcattgaactattcaatgttcaggtgaaggcagaggaggcatgagttttaaaggagtccatctacacttcagcttccccattccagggaaatgaagtctttccattttggggtggaaagagcaggtattgacaatatttcccaaggaagctgtctcactttgaaaaaatgaatcactgacagtgttcagtatcaaatctagttttaatcttctataacaagtcaccttttcttcccacctatatccaactgcgcctagtggtacagtgagaatgatggcctcctctctttccctggagtctgaggtattggcaacagcagtcacccactgctgagaggacttaggacccagcagaagtcaagggtcattagtgccctgcagctg

SEQ ID NO: 8444 - DNA, 2300 bp, Homo sapien
caatgatctaccaggctggtaggaaacgggagctcatagagattaaccaaggtcatacagttagaatgctgtgggtctaggactagaatttgatatttactccaggccccgtctctgtccccaacaatctaaccacaagttaaaattccaaattgtgggctgggcgcggtggctcacgcctgtaatcccagcactttgggaggccgaggtgagcggatcacgaggtcaggagatcgagaccatcctggcaaacacggtgaaaccccgtctctactaaaaatacaaaaaattacccgggcgtggtggtgggcgcccgtagtcccagctactcgggaggctgaggcaggagaatggtgtgaacccgggaggaggagcttgcagtgagccgaaatcgcgccactgcactccagcctgggcgactgagcgagactgtttcaaaaaaaaaaaaaaagaaaaaaagaaaatactgtgtgttcctacaacacctttcccagactgtgagcaacttgggaacaatgattatcaccttagtgttcggtgtgttttgtagaggagggcactcactaaaaactggtttgttgaatgcaaccacttaagaattggacatgccgtgcccagcccctaaggggcgctatgctcgttcgtccaaggagcagcgtgaccagcgggagggagtaagtcgacgtccccggcatgtggggcggggaactccactggccggcaagcgaagcagcaggcgaagaccacgcccccgccggccgcgcttgcgcagccttcgctagccccgccccgtcctattcgggctcccgcctctgttcaggtaggaggcggtatgcgggggaggggagtcacctgagggcggggatctcaggtcttggggagccattgttggcgaaccccaacttccgatacgacccggagctgttcctgcagttccagagacaattcatgggtcttggggccaccgaggcgctgtccctgaccaccagcacgagacccctttctatcgcgccagtcctgtggtctccgcacctctccagctcctgcacccccggcccccgtggttcccagccgcacagtagcgtgtcctgggtagcgtgaggacccacggggctgggcaggtgccacgagcccgccgcctcttcgccgcccgccgcctctcctcctctcccgcccgccgcctggccctcccctaccaggctgagcctctgggtgccagaagcgcggggcctccgggagaatacgtgcggtcgcccgctccgcgtgcgcctacgccttctgctccagttgctttcccaattgagcggaaaagccggggcatgttgccggggccctgggcgggacggttgtgccctgcagcccgaagcccgccggggcaccttcccgcccacgagctgcccagtccctctgcttgcggcccctgccaacgtcccacaggttggaaaccagaccctgcagcccccagctagcccgaaggaagcccagactgacgtcgcagggtaatggggacccagaggtagctctgtggggccccatcaggacctcagcccttagcggggctttctgtgtgacaccgtgggacctgaactggggaggtcccccttgcacagaattacaaggggcaactgtaggaaacaattaaatctattatgtgctaagtattgagagttccacggattgaggccctctctagaaggcttagaagtggggtagccggggtatgtgtctgactttgtgttttggtgcggtggtggtgagtgggtgtagaaactaatagtgccaagtgcagtgcctgtcaactagtaagttaataaaccttccgtgaatgaatgagaaggttctgtgactgagggagcagggctagagagggcatctctgctcatcccacccctgcctcccctgggctcaggcagacaaaagtaattaggttgaacctttaatcaaagctggtttcacaggcaagcagacatgatagaggaggtaaaggcagaaatcctggggacacagggtgctggcctggctcacaggcatgcctccttccgggacctcctccaccccctacagtttggcgctcagtaatctcttgttttcttgtctccctcaggacactgggtccccttggagcctccccaggcttaatgattgtccagaaggcggctataaagggagcctgggaggctgggtggaggagggagcagaaaaaacccaactcagcagatctgggaactgtgagagcggcaagcaggaactgtggtcagaggctgtgcgtcttggctggtagggcctgctcttttctacca

SEQ ID NO: 8445 - DNA, 2300 bp, Homo sapien
ggagtttgagaccagcctgaccaacatggagaaaccctacccctactaaaattacaaaattagctgggcatggtggggcatgcctgtaatcccagctactcgggaggctgaggcaggagaatcgcttgaaccccagagaaggaggttgcagtgagctgagatcactccacttccaaaacaaaacgatagggctgttaatttaggtggtggttacacgggtattaacatgtgtaaaaaatcactgagttgtacatgtaagattcctgcactttttgtattttattatgtgtatgttaaatcttaaaaataaaagcggagaaaaacctgatggcttcctactcctctattaggtaaagtaagaatctgctctggtttggtttcggaggaactgtttcctggtccttggatctacctggctgaaagcacagtgcctggtacaaactaggctcctccccgattttgaattaacgaagttcagtgacatcgtcatcctatttttttttttttttttttgagacaggctctcgctctgtcacccaggctggagtgcagtggcacgatctcggctcactgcaacctctgcttcccaggtccaagaaattctcctgcctcagcctccccagtaactgggattacaggcgtgtgccaccaagcctggctaattttggtatttttagtagagacagggtttcaccatgttggccaggctggtctcgaactcctgacttcaagtgatctgcccgccttggcctcccaatgtgctgggattacaagcatgagccatcgcgtccggcctgtcatcctattttatctcatctcctcctcctcccttccctgaccatcttctctggagtaaaagatctttgctctcaattttggaacacttacaattccttcagccactcttgttaggaagatataagggaagagagcgagagacaggaggcaactcaacggccaaacaggtttattcacaggaataagcctgcaaggagttccagtcaggagtctggctgagaccctgatcgcttacaagctgaggcttttataatatcgtttctattggggagaggtcgggaagtgctggctgattgggactgttggggactttgttaggctatgttaccttctgttgaagctatgggcagggttaacatttgctctgtttctgagaacacagtcatcattgttgtaaaatagcatcactactgttactcctcacaactcttaactgggatcagtgaaaaccattgttgttgagaactcttatagaatttctgagctcttatctaaatcatctgttgagtcttcacaatgatctaccaggctggtaggaaacgggagctcatagagattaaccaaggtcatacagttagaatgctgtgggtctaggactagaatttgatatttactccaggccccgtctctgtccccaacaatctaaccacaagttaaaattccaaattgtgggctgggcgcggtggctcacgcctgtaatcccagcactttgggaggccgaggtgagcggatcacgaggtcaggagatcgagaccatcctggcaaacacggtgaaaccccgtctctactaaaaatacaaaaaattacccgggcgtggtggtgggcgcccgtagtcccagctactcgggaggctgaggcaggagaatggtgtgaacccgggaggaggagcttgcagtgagccgaaatcgcgccactgcactccagcctgggcgactgagcgagactgtttcaaaaaaaaaaaaaaagaaaaaaagaaaatactgtgtgttcctacaacacctttcccagactgtgagcaacttgggaacaatgattatcaccttagtgttcggtgtgttttgtagaggagggcactcactaaaaactggtttgttgaatgcaaccacttaagaattggacatgccgtgcccagcccctaaggggcgctatgctcgttcgtccaaggagcagcgtgaccagcgggagggagtaagtcgacgtccccggcatgtggggcggggaactccactggccggcaagcgaagcagcaggcgaagaccacgcccccgccggccgcgcttgcgcagccttcgctagccccgccccgtcctattcgggctcccgcctctgttcaggtaggaggcggtatgcgggggaggggagtcacctgagggcggggatctcaggtcttggggagccattgttggcgaaccccaacttccgatacgacccggagctgttcctgcagttccagagacaattcatgggtcttggggccaccgaggcgctgtccctgaccacca

SEQ ID NO: 8446 - DNA, 2300 bp, Homo sapien
aggtggggggccagcccccgcacggccagccgccccgtccgggagggaggtgggggggcgcctccgcccggccgccgccccgtccgggaggtggggggcgcctctgcccggccgccccttctgggaggtgaggagcccctctgcccggccaccaccccgtctaggaggtgtacccaacagctcattgagaacgggccatgatgacaatggtggttttgtggaatagaaaagggggaaaggtggggaaaagatagagatcggattgttgctgtgtctgtgtggaaagaagtagacatgggagacttcattttgttctgtactaagaaaaattcttctgccttgggatgctgttgatctatgaccttacccccaaccctgtgctctctgaaacatgtgctgtgtccactcagggttaaatggattaagggcggtgcaagatgtgctttgttaaacagatgcttgaaggcagcatgctcgttaggagtcatcaccactccctaatctcaagtacccagggacacaaacactgcggaaggccgcagggtcctctgcctaggaaagccagagacctttgttcacttgtttatctgctgaccttccctccactattgtcctatgaccctgccaaatccccctctgccagaaacacccaagaatgatcaataaaaaaaaaaaaaaaaaaaaaaggaagaatagactctctctgggactgccaataatttttccttctaagcatagacaccggaccactctccacctaagcatcacgaaaaatgtagagaaaggaagagctaagagctccttaaacaagttcaggcttgacacaaccctggccctgacagccagggtcttcaagcgggcctttctgtgaagggtggccaggcatcaacttagtaggagagaaaacagatgacttatttccatccacacttaaggaaaatgcagtctccaaggactgcgtacatttctttttcgagaaggagtctcgctgttgtcgcccaggctggagtgcagtggcgcagtctgggctcacagcaacctctgcctcccggattcaagcaattctcctgcctcagcctcgtgagtagctgggattacaggcacccgccaccacgcctggctaatttttgtagttttggtagagacggggtttcaccatgttggccaggctggtctcgaactcctgacctccagtgattcgcccgccttggcctcccaaaatgctgggattacaggcgtgagccaccgcgcccgggcgactgcgcacatttctatggagctgtaagttaaaagagaaggcagtgaggtgcttctgtcattctatgacagaaacagctaaagagtagagaaatgttcacaagatttaatagaacagaaataggagaaggtgcacacaagctcaaccaactatagcctcacaaataaaagtgtcttttgtgtgtagtacttaagtttggaatattctttcttatacaaatgagtggggcttaacctaagaaatcctggccagattctgcgacgaatgcatcggttatctctgacccatcagcaaacatctttttctgtggcttcagtttcctcagtaaaacagagggggttgcgacggactcagtccgagggacagccattctccaacgtctatccaaagcctagggcacctcaatactaaccggcaggccagcgccccctccgcggggctgcggacaggacgcctgttattccattcctcggccgggctctacaggtgaccggaagaagagccccgagtgcgggactgcagtgcgcccgacctgctctaggcgcaggtcactcccgaaccccggcagcaaagcatccagcgccggaaaaggtcccgcggtcgccccggggccggcgctggggaggaaggagtggagcgcgctggccccgtgacgtggtccaatcccaggccgacgccggctgcttctgcccaaccggtggctggtcccctccgccgccccattacaaggctggcaaagggagggggcggggcctgggacgtggtccaatgagtacgcgcgccggggcggcgggggcggggccgggcgcgcagcgcagggccgggcggccgaggctccaatgagcgcgcgccgcgtccggggccggctggtgcgcgagacgccgccgagaggttggtggctaatgtaacagtttgcaaaccgagaggagttgtgaagggcgcgggtggggggcgctgccggcctcgtgggtacgttcgtgccgcgtctgtcccagagctggggccgcaggagcggaggcaagaggtagcgggggtggatgga

SEQ ID NO: 8447 - DNA, 2300 bp, Homo sapien
tttgaagcctgttgcccacgctggtcttgaactcctggcctcaagggatcctcctgcctcagcctcttaaagcgctgggattacaagcatgagccagcttgcctggccacattgcttcttttaacatatattcttcataggcttaacaactgacatattaacatactatctaaacattctgatgaccagtatggaatatgctcagtaggtgaaagtgggttcaacccgctcccatttgtgcttctgcccaacagttggtatcctgaaacagttgcaatgaattggagatatcctgtgtgatgaagaggaaagaaacttgagttggaagtcaggaaatctgtgtgcatggtggtggctagagtttcttcctatcatttacctcttcagacaaatggacgccacctgcccatcaaccagattgaggagaggagtggataagaggagaggcatccacaccacattcattccttcaaccaaacatggaacttctaccaggctctgctaggcctcgttcacagttacggtacaagatgtagcccccgctctcagggaactctggctggtggaaatacagcatcaaatattctgaaataagttgggggagggccgggtgcggtggctcacgcctgtaattccagtacttgggaggccgaggcgggtggatcacccgaggtcaggagttcgagaccagcctggccaaaatggcaaaaccccaactctactaaaaatacaaaaattagccaggcgtggtggcaggcagctgtaatcccagctactcaggaggctgaggcataagaatcgcttgaactcgggaggcggaggttgcagtcagctgagattgtgccactgcgcttcagcctgggggatagagagagactctgtctaaaaaaaaaaaaaaaaaaaaagaaaaaagaaaaaaaaggaagttgggggagtgcaaacaataaacttcacaaataccacagggtcacttttccatatgtccctaccatctcaaaatgatgctatgtcacttctgtctataggttctcatggcacacaaacagtaaacctgcagtagttgtccatgaggatagatcttgcttggattcaaagatggtttagccagagttgggagtggagaatgatcatgtaatatcttggacacctgccacttctcattaaaacactcagctctcaaagctgccacttccaggtttttgctcagttctatgtcccctaccctgccactatgaaagggggagaaagcccagggccttgggaattcctgccccaccagtatttcccagtttcctttttttttttttgagacaaggtcttgctctgtcgcccatgctggagtgcagcggctcgatcacagctcactgcagcttccaactccggggctcaatcgatcctcccacttcagcctcccaagtagctgggaccacaggtgtccaccaccatgccaggctcatttttgtattttttgtagagatggggtttcaccatgttgcccaggctggtctcgaacacctgggctcaagtgattcccccacctcggcctcccaaagtgctgggattacagacaggcatgagccatcgcgcccagcccgtttccttaagaaacgttttgagcgtctgttaggtgtcatacgctctgacgggggaaacaaaaacgaatataaaacattgactatggttcacaatctgcgtggtggcagacacaaacttctaattttatttctcctctcatacagccgaaaacctggtttaacatacactgtttcatttatgccccaaaacagtcctgtgaggtcaaaacgtcattcacttacgcacggcgggtgacagttcacaaggcacatgacatccctcatcttgatctcccggtatccgcgcattttaggaagaaacatgctcaaagggatgaagggtccgctctcaagcattttagctagcgaagttacagtcacatccggcaaactcgcacactgcagatctaggactaccccgcgcggccccgcccactttcccagcagcgggacgctgtcaccccgactcaggagctcctgggcccgcgggctcccggaagctgccgaccacgtgattcgctggctcagctcacgtgacaaagctcccggaggtgggagccctgggccaaaatggcggcctacctgcagtggcggcgcttcgttttcttcgacaaggagctggtgaaggagccgctgagcaatgatggggccgctcccggggccacacctgcttctggatccgctgcttccaagttcctttgcctccctcctggcatcactgtctgc

SEQ ID NO: 8448 - DNA, 2300 bp, Homo sapien
ctgtctaaggtggccgggcgcggtagctcacgcatgtaatcccagcactttgggaggctgaggcgggtggatcacgaggtcaggagatcgagaccatcctggctaacacggtgaaaccccgtctctactaaaaaatacaaaaaattagctgggtgtcgtggcgggcgcctgtagtcccagctacttgggaggctgaggcaggagaatggcctgaaccccagaggcggagcttgcagtgagccgagatcgcaccactgcactccagcctgggtatcagagcaggactgtctcaaaaaaaaaaagtttgtctaaggctggggtgcagtggcatgtgcctgtgatcctatccctttgggagaccgaggtgggaggaatgcatgagcccagtctgagcaacatagcaagaccccatttctaacaataaataaataaataaaatttaaaaatatggctgggcgccgtggctcattcctgtaatcccagcactttgggaggccaaggcgggtggatcacttgaggttaggagtttgagaccagcctggccaacatggtgaaaccctgtctccactaaaaaaaaaaaaaaaaaaaaaatacaaggccaggcgtggtggctcacgcctgtaatctcagcactttgggaggctgaggcaggtggatcacctgaggtcaagagttcaagaccagcctggccaacatggcgaaaccccatctctactaaaaatacaaaaattagctgggcatggtggcgggcgcctgtaatcccatcttaaaaaaaaaaattagctgggtgtggtggcatatgcctgtaatcccagccactcgcaaagctgaggcaggagattcacttgaacctgggaagcagaggctatagtgagccaagatcgtgccactgcactccagcctgggcaacagagcaagactctatcaaaaaaataatagtagataataataataataataaataaataaattgccagggggcagtgactcacgcctgtaatccaaacactttgggaggctgaggtgggcggatcacgaggtcaagagattgagaccatcctggccaacatggtgaaaccccgtttctactaaaaatacaaaaattagctgggtgtggtggcatgcacctgtagtcccagctactcgggaggctgaggcaggagaatagcttgaacccaggaggcggaggttgcagtgagccaagatcgtgccctgcactccagcctggcgaaatagcgaaacttcgtctcaaaaaaataataataaaaaaaggccgggtgtggtggctcacacctgtaatcccagcactttgggaggctgaggtgagtggatcacctgaggtcgggagttcgaaactagcctgaccaacatggagaaaccctgcctctactaaaaatacaaaactagctgggcatggtggcacatgcctgtaatcccagctactcaggaggctgaggcagaagaatcgcttgatcctgggaggcagaggttgcggtgggctgagatcgtgccactgcactccagcctgggcaacaggagcgaacctccctctcaaaaaaaaaaaaattaattaaattttaaaataatgtaaaagaaagagaacaaaaatacaacaataaaacaacaacaaaatagtaataatataaaaagaaacctgtttggcctcttccccgttctctttagaattcctatttttagccaaatttaagaagcagtgctctggagccttgttacccagtgtggtccacagtctagtagcaccgatattacctgggactttgttagaaatgtagaatctcaggccccactccagatccactgaaatagaatttgcattttgagaagatctgcaagtgattcctgtgtacatgagctggagaagtacactgattcagatgctatcgggtgcacatgtctccctagaaccattggaaagttggagccatcctacgtgatccgcaagtttctggatgcccagcgcattcacaacctgactgcctacctgcagaccctgcaccgacaatccctggccaatgccgaccataccaccctgctcctcaactgctataccaagctcaaggacagctcgaagctggaggagttcatcaaggtgcaggatgttgttggtggggaagtcttggaggccccactgagcatgaggtggctccaccgggacttgttcgtttcagcaagacatagggagaggaaagggctgaccttatttagaggagtggctgttcctgttagttcggtgccatctcccctcttgttttatgattctagaaattcccatggtatct

SEQ ID NO: 8449 - DNA, 2300 bp, Homo sapien
ataataaataaataaattgccagggggcagtgactcacgcctgtaatccaaacactttgggaggctgaggtgggcggatcacgaggtcaagagattgagaccatcctggccaacatggtgaaaccccgtttctactaaaaatacaaaaattagctgggtgtggtggcatgcacctgtagtcccagctactcgggaggctgaggcaggagaatagcttgaacccaggaggcggaggttgcagtgagccaagatcgtgccctgcactccagcctggcgaaatagcgaaacttcgtctcaaaaaaataataataaaaaaaggccgggtgtggtggctcacacctgtaatcccagcactttgggaggctgaggtgagtggatcacctgaggtcgggagttcgaaactagcctgaccaacatggagaaaccctgcctctactaaaaatacaaaactagctgggcatggtggcacatgcctgtaatcccagctactcaggaggctgaggcagaagaatcgcttgatcctgggaggcagaggttgcggtgggctgagatcgtgccactgcactccagcctgggcaacaggagcgaacctccctctcaaaaaaaaaaaaattaattaaattttaaaataatgtaaaagaaagagaacaaaaatacaacaataaaacaacaacaaaatagtaataatataaaaagaaacctgtttggcctcttccccgttctctttagaattcctatttttagccaaatttaagaagcagtgctctggagccttgttacccagtgtggtccacagtctagtagcaccgatattacctgggactttgttagaaatgtagaatctcaggccccactccagatccactgaaatagaatttgcattttgagaagatctgcaagtgattcctgtgtacatgagctggagaagtacactgattcagatgctatcgggtgcacatgtctccctagaaccattggaaagttggagccatcctacgtgatccgcaagtttctggatgcccagcgcattcacaacctgactgcctacctgcagaccctgcaccgacaatccctggccaatgccgaccataccaccctgctcctcaactgctataccaagctcaaggacagctcgaagctggaggagttcatcaaggtgcaggatgttgttggtggggaagtcttggaggccccactgagcatgaggtggctccaccgggacttgttcgtttcagcaagacatagggagaggaaagggctgaccttatttagaggagtggctgttcctgttagttcggtgccatctcccctcttgttttatgattctagaaattcccatggtatctaagcccagggtggtggcactggggaagtcctgtccctagcggtgtccctctaatggtaggggcagaggaaaactttagtcagaaactcccacaggctgagtagcataatattttcaaagtgtgaacgttatgatatcaccttaggaatctgaaagtcaggtgcctgtttcctctcccttctctatctccctctgtgtaaatgattttgtctcatgtctccctggcagaaaaagagtgagagtgaagtccactttgatgtggagacagccatcaaggtcctccggcaggctggctactactcccatgccctgtatctggcggagaaccatgcacatcatgagtggtacctgaagatccagctagaagacattaaggtaggtgagactgtcttttttccccaagagacagggtctcactatgttgcccaggctggagttgaattcctgggctcaggtgatcctcccaccccatcctcctgagtggaggtgagactctcaacttgggcagagccctgtcgtttttgaagacatctccagaatggtgaaagtgcttcctggtggctgaggcaggagtatacactattctgccctttacttttccacagaattatcaggaagcccttcgatacatcggcaagctgccttttgagcaggcagagagcaacatgaagcgctacggcaagatcctcatgcaccacataccagagcagacaactcagttgctgaagggactttgtactgattatcggcccagcctcgaaggccgcagcgatagggaggccccaggctgcagggtgaggctgcagggaaaagagcttcagactgtggggatcaccttaagggcttcctgtatatcacgcccactcattcagcctcctttttcctctcttgccatcctaggccaactctgaggagttcatccccatctttgccaataacccgcgagagctgaaag

SEQ ID NO: 8450 - DNA, 2300 bp, Homo sapien
ctgaggtgggaggattgcttgagcccaggaagttgaggctgcagtgagccttgatcacaccactgcactccagcctgggtgacagacaccctgtctcaaaaagtaaaaaattaaaaaacagtggcagtattgtagctgctatgctatgagtagactttgcatctactgagctgggtttgaatcctagttgtgctgtttgacttaaggcacatcttaccttctcaacatgttttttttttttttttgagatgtatttttttcagtgggtttttggggaacagttggtatttggctatgtgaataagttctttagtagtgatttctgagatttggtgcccatcacccaagcagtgtacactgtacccaatgtgtagtctcttatccctcaccctgctcccaccctttccccctcaacctgtgtcttcatctgtacgttagggattataacacctatgctgtgtggctattatgaaagcctaaggatcaaataggtgttcagttctttgtacagtgctgagcacatgggtgattttttttttcttcttaagacagggtctcaccgggcgcggtggctcatgcttgtattcccagcactctgggaggctgaggtgggcggatcacctgaggtcaggagttcaagaccagcctgaccaacatggtgaaactccgtctctactaaaaatacaaaaaccagctgggtgtggtgggaggtgcctgtaatcctagctactcaggagggtgaggcaggagaattgcttgaacccgggaggtggaggttgcggtgagctgagattgcaccattgcactccagcctgggcaacaagagtgaaactccatctcaaaaaaaaaaaaaaaaaaaaatgggcgtctcactctgtcatccaggctagagtgcagtggcaccaccacagctcacagctacctcgacctcctgggctcaagcgatcctcacacctcagcctcctgaatagctgggactacaggtgtgtgccgccacacctggctatttttgtattttttgtggagatgaggttttcaccatgttgcccagggtggtctcaaactcctgggctcaagcaatcctcctgccttggcttcctaaagtgctgggaatataggtgtgagccactgcacctagctgggtgattattaataatcatgattgttaattatgttcatgattacaggcgcggtggctcacgcctgtactcccagcactttgggaggccgaggtgggcgaatcacctgaggtcaggagttcaagacctgcctgactaacatggagaaacctcatctctaccaaaaatacaaaattagctgggtgtggtggtgcgtgcctgtaatcccagctactcggggggctgaggcaggagaattgcttgaacccgggaggcggaggttgcagtgagctgagatcgtgccattgcattccagcctgggcaacaagagcgaaactccgtctcaaaaaaaaaaaaaaaattatgttcatgggaaagcacttttcctaacaagcccttttctcactacatgtagcgtttgtgctcccacttcagttacttgtctttaggcatgacctttaatctctctgaaccagtttcctcattttaagaattgaaatgctggctgggccagtggctcacgcctgtaatcccagcactttgggaggccaaggcgagatgactgcttgagtccaggagttcgagactagcctgggcaacatagtgaggccacctccccgctgtctctataaaaaaatctagaaattagtcccacgtggtgatgtgcgcctgtagtcccagctgcttgggaggctgaggtggggggatcgctgaagccgggaggtcaaggctgcagtgacccgtggtcatgccgctgcactctagtctggggacacagtgagaccccgtatcaaaaagaaaaatgctgcctatttcaaggttgtagcaaagctaagtttgaacagagcaaaggaagcgccatagaagctgcactacttgctcatgtcacagctggggaatggggtggtcgaatggggaggtccactgtcgcaatgttccaattcccgcccagagggagggacctccccttcgagggagggcgccggaagtgacgcgaggctctgcggagaccaggagtcagactgtaggacgacctcgggtcccacgtgtccccggtactcgccggccggagcccccggcttcccggggccgggggaccttagcggcacccacacacagcctactttccaagcggagccatgtctggtaacggcaatgcggctgcaacggcggtgagtgctg

SEQ ID NO: 8451 - DNA, 2300 bp, Homo sapien
accctaggcaagtcacctcatcccttgatgccacccgttgcttctgtaacatggtcccaaaggtgcctgtcttgtccacctgataggatttttgagacgacaacaatatgcaaaagcaatagcttcaacatagaagtgctcagtgttttattttttaatgaaacggtttgacttggatatgctgtgcacattcaatgaacttaaggaattgtttgaacctagtagttctgggaccttagagtcctttctgtgggctccctgtggcccagaattttggtggccacgtttaatatcaagcctagcctaatttgcaaagggtctcccagggttaatttattggagtgatcacatggagtagaccagagtctgagggcagaaagctgtcacctgcttcggcaatagaggccccagatgtctgggtgcaaaagaactccatagcaccccgaccaacatggtgaaaccccgtctctactaaaaatataaaaattaggccgggcacagtggctcatgcctgtaatcctagcactttgggaggccgaggcaggtggattgcctgagctcaggagttcgagaccagcctagggaacacagtgaaaccccgtttctactaaaaatacaaaaaattagccgacgtggtggcatgcgcctgtagtcccagctacttgggaggctaagacaggagaatcgcttgaacctgggaggtggaggttgcactgagccgagaccgcgccattgcactccagcctgggtgacagagcgcgactccccctcaaaaaaagaaaaaaaaaaaaaatatatatatatatatacacacacacacatattttagctgggcatggtggtgtgcgtctgtagtagtcccagctacttgggaggctgagtcaggagaatcgcttgaacctggaaggcagtggttgtagttagctgagaacatgccactgcactccagcctgggcaacagagggagactctgtctcaaaaaaaaaaaaaaaaggaactacataggatgaacatcccagatcagggaatgttgactgtcgacagtatcagtatctacagtggctactgtctgatgtagaaagaaatgggatcaggctaggcgtggtggctcacgcctgtaatcccagcactttgggaggctggggcaggaggatcacaagttcgagaccagcctggccaacacagtgaaaccccgtctctactaaaaatgtgaaaattagctgggcatggtggaacatgcctgtagttccagcttgaacccaggggtggaggttgtagtgagcctagatcacgccactgcactccagcctgagcaaaacagtgagactctgtctaaaaaaaaaaaaaaaaaaagagagaaatgggacctccgtcttagactgaagaattcagttctacgtgcttagcagtgaatacttttgtccaaggtactctggcaggaggaagaggcgtgtcctcttgagttcttgacttgggctctggcctgttaatatttccatgttggtgaaaccagaggcagcactctaggtgcacgaactttaggcagcgcagcctcctagtcttatggaacatctgaggcagaagaaacctgagtccaaccttttcattttatagatgaacaaacagatcctggtgggacagtgtacccaaggtcacccagccaagaggctgagcaggactgtacgtcagatccgtttacctcagtccttaatgcatgcagtccagccagattaagggacccttaatactgtcagctttccccactgtgggatcttcatcctcttgacttcttttgtagccagacatctgggcctcttgctggagaaggtggcagcttgctgctcttagactctagtctactccatgtggcatctggatggcactgaaattttctcaagtgccttgtctgttgtagataatgaatctatcctccagtgactcagcacaggttccccagtgtggtcctggctgccctgcccctgccagctgcaggccccacccttcctgtggccaggctgatgggccttatctctttacccacctggctgtgcacagcactcccactgacaactgccttggtcaaggtgggcttcagggctcagtgtcctggttactgcagcggcagcaacagcaggtcctactatcgcctccctctagtctctgcttctctggatccctgaggagggcagaaggtactgaggaaggttaaagggaccagccttggagtatttccccactctgagactcagctggccacaggccaggttctgaagttcctttcttccaagccagtgattctg

SEQ ID NO: 8452 - DNA, 2300 bp, Homo sapien
tatcttccccccgcagactcaatatcaagacaggcaaactggagatgagctattccaagttcaagaccaagagcctctctttcttgggcacctttattttaaaggtaacagggtaacaaggaggtaaggccctaggctgccatcctgaccttgaggaatggggaacctagtcctacatcagatccaaggggaacttgaaagcattaaatagatccacattcctaaagcataggtattagctgaggttctcttcacctctggtccctccaggtggcagagagcctccagctggtgacagtacaccagagtgagactgaagatggtgaattcactgaatgtaacaacatgaccctcatcaacttgctacttaaagtccttgggcccatacatgagagaaacctcacattgctcctgctgctgctgcaggtgaggatgggaatcgagtttatacctccgtgtctccctttctgcgtgattcttactccagtccatttctccttgcagatcctgggcagtgccatcaccttctccattcgatatcagctcgttcgactcttctatgatgtctgagtcccttgatcattgtcctttacctcacagtctctaggattcctgactcaggctgacctctctctctggtcccagactgcctccttgcccaggcctctctcactcttcatactcctccagattttgttctcagcattttcctttctctgtgatcattggcatcctgggcgtttcttgccctctgctgactactgattggattttacctatggctttctgcaacttgctactctctccctctccatcccatctttgcagcctcatagggtgggatacagcagctttttttgcagttatccacactcacatttcagagtcctgactctcaaggaaccactggtttttgggatagaacttgggccagggctaggaacacaggctccacggtgacatgtcatttgattgtaaattaagtgttctgattagtaagaactaagcagggggccacatgctctcaatggagacaataaagtgttgtctttttcttattgtttatgtaggtatatttcctatatgggcatttttgggtagattgggaggggtggtgggggtacttcctccaacaggatgcctatctctctgccccatcagaccccgtctaacaagaagtgaacagaactgagaccaaacagaacatattgaataaatatttaaatcctgatactagaggtggcatggagggccacaaaattgaagttatcctgtttcctggcatgggaacaaactttcaaagagtcaccgggtgcagtggctcatgcctgtaatcccagcactttaggaggctgaggcaggaggattgcctgagcccaggaattcaagacagcctgggcaacaaaacgagactccgtctctacaaaaataaaataattagccaagtgtggtggagcacttgtagtaccagctacgagggaggtttagcagggaggattccttgaacccaggagttcgaggctgcagtgagctgagatcacactactgcactccagcctgggtgacagagccagtgacacccggtctattaaaaaaagaaagaaagaaaaaaaagaaaacttttaaggggtctaatttcttcacttttccattctccctttgtcaggtaggagaagggagtagggagtgactggacctggaaaggagggctgcagtagctataatattgacccctttcctttaaaaatcctacgccggcacagatttcccagacgctctctaggtggcctcagactccacccctttggtcttccgcttctggtttccgattgtagtgtttaaatctcgcgcgctttacaaggattggctacatcagcggatagttggcagtctgcgtgctacccctcctcctcgccttttctccccgggcaaaaggttttcaaattcgaccaatcagcgggcgcgctccctcagccgagccgcgacacccaagggttaaccgcaaccaaccggaggcgggtattggagaaaagagccaatcaggagggcgcagaggtgtgtcctgggggcttataaaggcggcctcgcggcgcgcgcgcgacagcagttacactgcggcgggcgtctgttctagtgtttgagccgtcgtgcttcaccggtctacctcgctagcatgtcgggccgcggcaagactggcggcaaggcccgcgccaaggccaagtcgcgctcgtcgcgcgccggcctccagttcccagtgggccgtgtacaccggctgctgcggaagggccactacgccgagc

SEQ ID NO: 8453 - DNA, 2300 bp, Homo sapien
tcagactcacaggaaatcagttgtgggtctgattcctctccctcctcagctctttccagagcctcagcctggaaatctccatctcctccttgtgggagctaggtacaatgcagtgatccacggccaagctgaagtctcgagttaaatccaagacctgagggtactcccaatccctcagtgaagtgctgcgctgggttgccgggcaactaactgctacagctggggcagaaggtgggtgggatgctgagaaaaaaataccagaatcgaggacaagaaaaacagagtgggaggggcttttcaaggatctacgctttagaatttacaccatccttccaaatcgtagctttgtttccgggaactgagttgtgtttaccttggcttccgactatgttggcaacaggtttcctgcaagaaacaggcgcgtctccacaccctcgtccctcctccccaccccctgcctttcaatagccatcttcctggagccggaggcatcccagattaagggagaggtacgggccctttaagcttgacctatggaggcggacggagctaaaactgacgtggaaccggaatgtgagcggtgtcagacacgtggtacaaggaggcattcatcttggaaccgggcaattggcatttccgctctgggtagtacatctttaacataatgttagggaagtatccgttcttggctgcctttctttaattgcgtttccagtactctctcggtgattctactcttgaacataggatgaaatttggaatcacacttctcttccacttccatccccaccctctaatgcccatattaaaaatggcggccgccgccttccgcagtaatggttgttcagcgaacaagatccgggcggaaacagtagataggcgggtgcagcggggcagaacataggttgccttagagaggttccccggtgtcccgacggcggctcaagtcagagttgctgggttttgctcagattggtgtgggaagagcctgcctgtggggagcggccactccatactgctgaggcctcaggactgctgctcagcttgcccgttacctgaagaggcggcggagccgggcccctgaccggtcaccatgtgggccttctcggaattgcccatgccgctgctgatcaatttgatcgtctcgctgctgggatttgtggccacagtcaccctcatcccggccttccggggccacttcattgctgcgcgcctctgtggtcaggacctcaacaaaaccagccgacagcagatgtgagcagcggcacacgggtccgggcagggggcaagggctaaggaaggagtggctagggcaggggcgggaaccggggtgcttgaccacacgtgaagactcagaactaacccaggcagcctggaactcggagaggtgatgagcagaacttactcgcattggggaaaggatgggtagggacccttgggtatatctgggactctggcagtggtgctttcctccctccgcccccctcaccacttaccagaataaaaaaccgggaatgagaagaccactttgggttactgtaacacctgcactagtgagtgaccacgccccctttcctcttccccctcgcccccttgctgctgggccacagcccagaatcccagggagtgatcagcggtgctgttttccttatcatcctcttctgcttcatccctttccccttcctgaactgctttgtgaaggagcagtgtaaggcattcccccaccatgaagtaagtgggttcgtgggggtgattgcctgtggctgggacctgggaggtacctgagagaactggggttatttgggcttgtggggaggggctaagaaattatcagaaaagacaggaattcttaaaaggtggaatgggagcaggcttgagtcatggacctgcccgagcctcccccagtttgtggccctgataggtgccctccttgccatctgctgcatgatcttcctgggctttgcggatgatgtactgaatctgcgctggcgccataagctgctgctacctacagctgcctcactacctctcctcatggtctatttcaccaactttggcaacacgaccattgtggtgcccaagcccttccgcccgatacttggcctgcatctggacttgggtaggtagtcctaccactgctgcccctatggcacctacttcagggaacccttcctggtgctccacattctcctccaagtgttccttttttgtctctgtgtcttcccagatcctttctggtagcccttcatcctatcgtccgtcctcaccacttttctaaaaattcttaaatcctcctcccc

SEQ ID NO: 8454 - DNA, 2300 bp, Homo sapien
ctcagtatactcgtcatcaacaagataactgaatgctgcctcctctgggatcccacaagctcctcctttccaccagcttctggtgtctcactgtcgctgcctgtgaaaggtccttctactcttataatctactgaaatgatacttctcttcctcaagaccacttactctggtcacaactaattgctccctccatatgcacctattgccctcagtcctcctttcagcctcagcctcattatgtgtgatgatgccttccttgtacacagatgtctgtgttcctagccccatggggacaccctgtggaagagaaaacacttgcctcccgggagtttctagtttaaaaggggcacacgtgcatacacacaacacacacagaaaaataatagcagtgggataagtactgaaaatctggtggaatactagcaagtaaattacgaaaatttatgtattttatacatatctgggtttttgttgttgttaattagagccattttcaagtagaaaagccatttcacatctgatttagtttgtttgtttgtttgttttgagacagtttcccctctgttgcccaggctgggatgcagtggcatgatcgcggctcactgcaacctcctcatcccaggttcaagcgatcctcctgcctcagcctcctgagtagctgagattacaggcatgtgccaccacacccggctaatttttgtattttcagtagagacggggtttcaccgtgttggccaggctggtctcgaactcctgacctcaagtgagccacccaccttcgcctaccaaagtgctgggattacagacgttagccactgcgcccggcctcacatctgattttgagggaaagaagaaactatcttcggcttaaaaacggtcaacatgaccctgactcctggaacatgccatagagggaagagtggacaaagcgctaggctattggagtcctttccctaactcactggtggtgacttcctctctgacaaatggaaatcatttgccgcctaagagcctgtcggggaatgaaaggtaataaagatgctggtgaactggctgggcgtggtggctcacgcctgtactcccagcattttgggaggccaaggcgggcagatcacctgaggtcgggagtcccaaaccagcctgaccaacatagggaaatcccgtctctactaaaaatacaaaattagccgggcgtggtggcgcatgcctgtaattccagctactgcctgtaatcccagctactcgggaggctgaggcaggagaatctcttgaacctgggaggtggaggtttcggtgagccgagatcgcgccattgcactccagcctgggcaacaagagcgaaactctgtctcaaaaaaaaaaaaaaaaaaaaaaaaaaaaagctggtgaattgttgtttgcaggggaacaggccaagcaaaatgcacagcaacctgcaggaggccaagcaaaatgcacagtgacctacaggaagaaacctgactgggagttcctcagactcacaggaaatcagttgtgggtctgattcctctccctcctcagctctttccagagcctcagcctggaaatctccatctcctccttgtgggagctaggtacaatgcagtgatccacggccaagctgaagtctcgagttaaatccaagacctgagggtactcccaatccctcagtgaagtgctgcgctgggttgccgggcaactaactgctacagctggggcagaaggtgggtgggatgctgagaaaaaaataccagaatcgaggacaagaaaaacagagtgggaggggcttttcaaggatctacgctttagaatttacaccatccttccaaatcgtagctttgtttccgggaactgagttgtgtttaccttggcttccgactatgttggcaacaggtttcctgcaagaaacaggcgcgtctccacaccctcgtccctcctccccaccccctgcctttcaatagccatcttcctggagccggaggcatcccagattaagggagaggtacgggccctttaagcttgacctatggaggcggacggagctaaaactgacgtggaaccggaatgtgagcggtgtcagacacgtggtacaaggaggcattcatcttggaaccgggcaattggcatttccgctctgggtagtacatctttaacataatgttagggaagtatccgttcttggctgcctttctttaattgcgtttccagtactctctcggtgattctactcttgaacataggatgaaatttggaatcacacttctcttccacttccatccccaccctctaatgcccatat

SEQ ID NO: 8455 - DNA, 2300 bp, Homo sapien
ataaacaatcagctagactctaaggcagaatgtaagtgctagaggtctaagtaatggaagaaagaaggaggactaggctgggcacagtggctctcacctgtaatcccagcactttgggaggccgaggcgggaggatcacctgaggtcaggagttcgagatcagcctggccaacatggtgaaaccctgtctctactaaaaataacaaaaattagccaggcatgatggcgcatgcctatagtcccaactacttggtaggctgaggcaggagaatcactcaaacctgggaggtggaggttgcagtgagccaagatctcgctactgcaccccagcctgggcaacagtgactttctgtctcaagaaaagagaaaaaaaaaaaaaaaaagagggaggactaactagggagactcatgtaactaggtagactcacagttcagatactgaattgtgaagcagtatctggcagcataggaccaagcactcagtggagaagttgagggaataaatcaaagaagtcagagaatggagatcactagggggtctgagggttcctgaaggattcttgggggaagagggtcttcatagggaaagcttctacctggacaacttcctgcataacctgctcccctaaaccctagctgctcttcccactgacagcttcctcctgcatccctggttctggccctgagttctctcctcccttgatttcatgtcttctcctccctttgagattagaaacccagactctaggaatctccactgatttggcagtccagtgacaatgcatgggcagggccacaggaggttacctcattcacccccacctctccccatcattccttacagggaaatctagggaggcccaggctaccccaccacctcctctggctcagacaaacctgttgctgacctgtcagtttctgtctagccctgccatcccacacttcagaaggcattgtttattctcttattctcatgtgctcattcctcagacaactacttgggtttgggagaaagatacttaacacctttccatcctacctctttaagaaagggactgtgtgccaaagaccttcccacatgtatgaagaaggggctcttgggagaatgtgaattcccccaggattcctttgaatccttttgcaggtatttccttcccctgtcctcagcaagcattgatgagccccagtcctgtagaggttgaatcaactccttgagtctaggaaaagatggcttctgaggccagaggttgggcagtgtacctacagcaccatttcttgggagcttgttgggatatcacatacttagagtggcaaggtcttgtggctgaatctattgatagtccagtgctacattgccagctcccttgtcattaccaccccctctacacgtgctccataggcaggagctgttactatggaaatacattatttttaaaaacagacacacagcctgggcttgggaatctccagaacaaacctacacgagcaaggaggttaatggggctgtttctgggtccaagctccaagaggaaggagggtgatgatggtggggggaattcaaattcggtgttctactctcaacctctcccagcttcaggttctgctttctctctgttgacatcagctggacctctgccagacacttctatctgggagggacgctctgcgtctccttaccctgggcctagcttcccccaggaaatgggaagctagaagtcgctgagtctgggggtgttgggagaagggggcggtgatttccacaggggtcacctccttcttaacctcacaggcgtccgacctgtggaaatctaacaagcataggggaaagcaaaggcagcatcttaggtaagtgaagttactcttgccttgagctgagtgtgggagcaccgcgattgcaagatggggcgaggtgatcaaagatcccgcctattttcaaccccggaacctcctccgctcgctgctagccctcccgccctcctccagcgagggagcgccaggctgtcctggccccgcccggcgcgggtgcggctcctttaagggcgggtgggggcggggcgccggcggtgttgtcagtgtcagctctgcgcacgcagccctcccggagccggtgccggcccgcgagccccagcgtctctgcagaccagtcccctccagggtccggcggggcccgcgcggtgggaggagtcgggcactggccggcgactaacgggtccgactgctgaccaagctaggagagacccggaccacggagacagagaccccggcatcgcgacccccgaggacctcctctcctcgccctg

SEQ ID NO: 8456 - DNA, 2300 bp, Homo sapien
tccctaaaagaatcagataaatgccaaagactcctctccccagaaaaatgcatataaacacacatccaacattttgcacataacttcaatgggattctcagacttcctgaaaccaatccttagatccataaggcattcacagactccaggttaagaacctctggactaaagggagcccttggggtcagtccttcttggaccccaaagagggcagtgcccatcagacccttaccatggtatgctcagattggtctacgcaggtcacatgactgatgctggctctgggtgggagttggggcacctcctcaaaggcgatttggatggagctctgagggagtaatgtgggcattggatcaggtctctggagctgccccccacagggttggcctgctcagttgctggctggactctgccactgcggaggcctcagctgcaggctggcttctggcccctccttggctcagggctttaagacaggaggtagtcccctcaaggcctgcctctccaggggcctgtagctgctaggagccactgagcaatggggaggtagtccacctcagagactagatcaccttaagctgaagaccctggcttcctcctggaataccaagagcttccttcttcttctccctgcaatccctttcatcccctaccctaccccctaaaaaaacaaataacaaacaaacaaaaaatcctacatagaaaaaagttaaggtgctggttgccacctatatataatagctgggcagagggaaagggctaagccccggtaaaggtggtagagccaccttgttcaagataagagctgcagaaatgaagctaagccttcttccaaataaataagatgtggaggcttcaagagtatgatgcttcatattcttggagatgaagatgagcatggccttggggatccgtaccagggggactgggaagagatacaagctcagaggacccaagagtccaggggcctggctaattcctcaaggcagatagcaggacggtattagagagcagaaagctgcttagatctcaaaagagctgctccctaattcgtccacagtaatggaagcaacctaccgcagccccacctggagagcagtgcggacacagaattgaggaaggggcacagaattggctggcaactcttccttgggtcttgagatggaggaaacaaatccatagggttcatttgcttggcaaaccaggggaagccaactcctttgctctggtagctgtctcattcaaaggctaggccaaggaagatggggagatggatgcttgaaacctcaatctccccaccctctgcaagggaggccaatgtccagttgagtcagctatcctggggagttgcttctgaccgagggacaaggtacagggagagttggatgaagaggtgggttcaaggtgtaaactgacagatgccatctggcttttagccagccagctggacagagtaaatagagcaatttcttgtggacatttctgtttccggcatctggggaactagtaaggtaaagcctccaaactcatagtggctggaaatagagaaccctctgagcaaggagctgatggactgtgagagcaaggagagattgctgggtcaggatgggagggagctccagaaaagagagacttctacctcccaccttatctccatctcatgaccacgcttcctgccccacttcctgggaggccagatgcccatggtgcaatgggaggaagtaggctggactggtttgtgactgaccctcaaggggcagttccaagctcatctactggtaggggcactgtcaatctgctctccacctgaacactccccaacccccagtgaaccacaggccagcatggaggagaaggatgtgtttgactgtagcagtgaaattactgtcgggtaggggggtgattcaggctccttggggatctgcctgaccacaccagggatttggggcatgaaatgttaaatgggtgtggtggcatgagaagcaggcaaattccttctgcaggtgcacctgtctcccatgccccaacacaaccagcacccaggcaaggcggaagtgccctcaggcacagggattagcgttgctatgagaacagcaacttgtgcatgggtttggaaccagagtaccttgcccacagaaatggaagtctggggacccagttggatttctacaacctccagccttagcggcacccttttctctgatccgggaggggaagagaagccatagggttccccagtttatgcccaccctcgtctggcctcctagcacgagcagtcagtccctcccctggaaggaaag

SEQ ID NO: 8457 - DNA, 2300 bp, Homo sapien
cacaagaaattgctctatttactctgtccagctggctggctaaaagccagatggcatctgtcagtttacaccttgaacccacctcttcatccaactctccctgtaccttgtccctcggtcagaagcaactccccaggatagctgactcaactggacattggcctcccttgcagagggtggggagattgaggtttcaagcatccatctccccatcttccttggcctagcctttgaatgagacagctaccagagcaaaggagttggcttcccctggtttgccaagcaaatgaaccctatggatttgtttcctccatctcaagacccaaggaagagttgccagccaattctgtgccccttcctcaattctgtgtccgcactgctctccaggtggggctgcggtaggttgcttccattactgtggacgaattagggagcagctcttttgagatctaagcagctttctgctctctaataccgtcctgctatctgccttgaggaattagccaggcccctggactcttgggtcctctgagcttgtatctcttcccagtccccctggtacggatccccaaggccatgctcatcttcatctccaagaatatgaagcatcatactcttgaagcctccacatcttatttatttggaagaaggcttagcttcatttctgcagctcttatcttgaacaaggtggctctaccacctttaccggggcttagccctttccctctgcccagctattatatataggtggcaaccagcaccttaacttttttctatgtaggattttttgtttgtttgttatttgtttttttagggggtagggtaggggatgaaagggattgcagggagaagaagaaggaagctcttggtattccaggaggaagccagggtcttcagcttaaggtgatctagtctctgaggtggactacctccccattgctcagtggctcctagcagctacaggcccctggagaggcaggccttgaggggactacctcctgtcttaaagccctgagccaaggaggggccagaagccagcctgcagctgaggcctccgcagtggcagagtccagccagcaactgagcaggccaaccctgtggggggcagctccagagacctgatccaatgcccacattactccctcagagctccatccaaatcgcctttgaggaggtgccccaactcccacccagagccagcatcagtcatgtgacctgcgtagaccaatctgagcataccatggtaagggtctgatgggcactgccctctttggggtccaagaaggactgaccccaagggctccctttagtccagaggttcttaacctggagtctgtgaatgccttatggatctaaggattggtttcaggaagtctgagaatcccattgaagttatgtgcaaaatgttggatgtgtgtttatatgcatttttctggggagaggagtctttggcatttatctgattcttttagggatttatgatcctgaaaacatgaagtccttaggaaaacggaagtggggaggggtctgctgaactattacagggcagttcaaagcagggtgagcacccttcccccacatctgacccacctcgccggtctcaggtgctgcgttgccagctctctgctgaggaggtgcggttcccagtctctgtgacccagcagtcccccgctgccgtctccatggagacctaccacgtcactctgacactgccaccaacacaggtagaaggggatgtgggaaactgagttgggcaggggcggttccattggctcagcttcttccatttgtttcctctctgggatggaattcaggaagggagagtcctcgaattaggagtccttgggtaaatggggcaagtcagcccagtcactttgttcctgtctgtagttggaagtcaacctggaggaaatccctggtgaggggctgctcatatcctgggccttcactgatcgcccagatctcagcctaacggtgcttcccaagcttcaggccagggaggtaaggaggcagagctggcagagaagaggcagaacggggagggaggcagaggtgggggatccacctccttgttgttcccttcttctctctgcagagaggtgaagaacaagtggagctctccacaattgaggaactgatcaaggatgccatagtcagcacccagccagccatgatggtcaacctcagggcttgctctgccccaggaggcctggtgagttggcacccaaagcaaaagatttgcatgcaccttgttcctagggtgctatgtcaggattcttgctctttggaccttcttctgc

SEQ ID NO: 8458 - DNA, 2300 bp, Homo sapien
tcttttagggatttatgatcctgaaaacatgaagtccttaggaaaacggaagtggggaggggtctgctgaactattacagggcagttcaaagcagggtgagcacccttcccccacatctgacccacctcgccggtctcaggtgctgcgttgccagctctctgctgaggaggtgcggttcccagtctctgtgacccagcagtcccccgctgccgtctccatggagacctaccacgtcactctgacactgccaccaacacaggtagaaggggatgtgggaaactgagttgggcaggggcggttccattggctcagcttcttccatttgtttcctctctgggatggaattcaggaagggagagtcctcgaattaggagtccttgggtaaatggggcaagtcagcccagtcactttgttcctgtctgtagttggaagtcaacctggaggaaatccctggtgaggggctgctcatatcctgggccttcactgatcgcccagatctcagcctaacggtgcttcccaagcttcaggccagggaggtaaggaggcagagctggcagagaagaggcagaacggggagggaggcagaggtgggggatccacctccttgttgttcccttcttctctctgcagagaggtgaagaacaagtggagctctccacaattgaggaactgatcaaggatgccatagtcagcacccagccagccatgatggtcaacctcagggcttgctctgccccaggaggcctggtgagttggcacccaaagcaaaagatttgcatgcaccttgttcctagggtgctatgtcaggattcttgctctttggaccttcttctgctcttaggtacccagtgagaagccacccatgatgccccaggctcagccagccatccccagacctaaccggttattcctacggcagcttcgggcatctcacttgggaaatgagctggaaggtgagagctggaagtggctgcgggactgccaaggctatggttggttgcagatgctctctgcccctctgccaagggtacagcctctttattctgcagtgacttcccatctctgatctgagcatcttctaacttctggttcatcacaggcaccgaggaactgtgctgtgtagctgaactcgacaaccccatgcagcagaagtggaccaagcccgcgagggctggatccgaggtggagtggacagaagacctggcactgtaaggagtaaccctgccccgaccccatgctccagagcagagaggatcaaacctttccagcacagtccttgcaggaatcagctctgttttcagtagcctttggcgtgagctcctattgtatgccaggccctggcgtgggtcttagggatacagacttgaccaagatacagcccccacccctgggtcaatgacaagcttgaggcagagacaggtgtacataaagaagatggtaaaaccgctccagttgaggtttatgtaatgtgccgtcagagtgcctaggtgggggggagattaattcccatgagggaataaggatcagagtaggcttcatggaggagatgacatttaaaccacactttagagcaagagtaggatttcatcagagtgtgaaagtattctcggcagagggaagagctggagcaaatgaaagagggtggcttgcaactgagagactggcaagacaggaagagcaggaccagggaggatttgaatgcatagctgagaagcatggtttccactcaggccctgtccctttctcttgggacgagagagaatttggaggccaggagaatctgattggagcatttatgccgttttatttatgtacacagctctctgcctctggcctgtgatccactcaagtgtgggttcagcttgctaattttctccttcctgccccatctcctcttgtcccacagggatctgggcccccagagccgggagctgaccctcaaagtgctgaggagcagcagctgtggagacagtaagtgaggggtgggaggggcacccctgggtgggtacagagtggggtctggccatgggcccagctcacagtgccatccctttccccagccgaactcctaggccaggccacactgcctgtgggctccccctccagaccactgtctcgaagacagttgtgcccactcaccccagggccagggaaagccctgggaccagcagccaccatggcagtggaggtgagaagctgacccctggggtaggtgggaggacacaggggatgggcagtctccgaggctctgtctcttctctctcccacccctgggcagcttcactatgaggagggctct

SEQ ID NO: 8459 - DNA, 2300 bp, Homo sapien
tctctctctgttgcccgggctggagtgcagtggagtgatcttggctcactgcaacctctgcctctcaggttcaagcgattttcctgcctcagcctcctgagtagctggcactacaggcacccaccaccacacctggctaatttttgtattttttgtagagatggggtttcgccatgttggccaggctggtttcgaattcctgacctcatgatccgcccgcctcggcctcccaaagtgctgggattacaggcatgagccaccgcgccctgcaaaaccctattttaaaatagggaccaagttataactcactgttgttaaaaccaaaatttatgcacaagtatgactttactatcttaatggcattttaaattttattttatatatattgaacatttaatgtgttttctgattgtacaaattatataggtttatttttagattagaagatacagaaaactacaatgcaataaaatatcagtcttaaccaactttattaaggtatattatttaacaagtatgtcttgaacccttactgagtttcagccactgggctaagtgagtgatgggttttttgttttattttgttttttgttttgttttgagacagagtcttgctctgttgcccaggctggtgtgcagtggtgccatctcagctcactgcaacctgtgcctcctgggttcaagcgattctcctgcctcagcctcccgagtagctgagattataggcgcccgccacgatgcccagctagtttttgtatttttagtagagacggggtttccccatgttggccaggctggtcttgagctcctgacctcatgtgatccactcgcctcggcctcccaaagtgctgggatcacaggcgtgagccacgacacccggcccactgatggagttataaaggtgaagaactagtctagtgaagaatgcagactgagagtaaacagacaaatacaatgtgactgagctgtattgttaaatacaagaaaggactatcaggaagactttttggaaaaagaagcatctacactgagaccataaaaattagtaggagtcagtcaaataaatgtgggaggaggagaaagggattattccaggtaaagaaaacaagttcaaggcttgagaggtaaaaggtggcttggtgtggtggaaaaggtgaaagaaatttgcgactggagagcaagaaatatggtcgagaaggactaaaaaaaagtagacagggagagcccagatgctgaagggtctagaaaacctcagtatggttttggagctttgccctgaaagcaatagaatgcctttgaattgtctgaagcagatggtaacttgatcaggtctgctttttgcaaagtggagaatgctttggaaggaagcaagtgtgcacgcagcgggacccattagactaatgtataaatcctgcctggaggtcatcactggacaggggaggtgggggaggcggtgaagataaacaaaaggggataaatttgaaatatcctgttttaaaaggaggtagaatccacagaacttggcaatggattggatgtgagaagtgagaggaatcagtgatgactgccagctttctgacctgaacgagtggatgaagggaagccgagttttggggggaaagagaaacatataataccaacatttaaaacataataagactaagaggctgaaggaaagggtagaaccttcaatctgagccgagcggggccgacagcgctgggcagcatcccacgcctttttctccgcgaggcccacgcaaccagccaactaaagcgaagaaccacgtgagggagaccccactgcgcaccaggcgcgagccctgcgcatgcccgttgggtcccggaggccgagcctgcgcagttaggggaactcaggcccataggctccccgcctttgcgttgccctgagcagcgaggcgcggtcacgtgctaccttttgcacgtatcctgtcgcccctctgtccgcccgggacgcctagccccacccactgttcccgccccttccgtgttttggtgcgcacgggttccgccagacacagctaccattggctgtcagtcggatccgagaacgacgattggctttccttgaccgtccctcaagcgcctctccggagatggtctgaggtgggagaagagctgaagagacctggagccgacagacggtaagctggggtatgtgctctgcaggggctgcaggaggccaagctcttcccgagccacctcggcgagtattcttgccgcttggccacgctggtctgccctggtccggtcccctcaccccgactggaacctccctgctt

SEQ ID NO: 8460 - DNA, 2300 bp, Homo sapien
acgggttccgccagacacagctaccattggctgtcagtcggatccgagaacgacgattggctttccttgaccgtccctcaagcgcctctccggagatggtctgaggtgggagaagagctgaagagacctggagccgacagacggtaagctggggtatgtgctctgcaggggctgcaggaggccaagctcttcccgagccacctcggcgagtattcttgccgcttggccacgctggtctgccctggtccggtcccctcaccccgactggaacctccctgctttctagtctaggggcttcgctgcggctgagactcggtcgccgccacgccttagcgtgaaggattccgggaagcctgcgggactgcgagtggagaggttttgcccaacgggacggtctccttccttctgtccaaattctacctgtccttcgaggcgtggtgcgggccccactgcttaggggagacttccttttcgcctgaccgcggaggtgtctctctgtcctggtctccctcatcgggtactttgtttcggtcgttgtcttcacgtatcagtcttatctttttggccaaattatgagttcttaggcgtttaggaccctttttttcttgaataccacagttcattcattgtcttgcgttacagtatatgccctcttaagtgttaagagggtagagtgaagatcatgcccctatctcctcagagtagaaacaagagacacagaaagagaaattaaagaagacaggaggacagtcagagagcgtcagggagttttgcctaggtttcagatcattctgtatcgccagctagcttgcctccttggacttacccaccagtctaacagcaggtgtatgtttagaatatttgtgctcggcacagtgtagggacacgggcaggtgtgatatggtttctgctcagaagcttcttatagtccaattgggtaaacgagactagaacacataaaacgaccatggcaacatgaaaatagggttgaagttttatggtgtcagctgtgccagccatagaactaaggagcaagagtagattcagggatggggtagtttaggaaggcttcccggaatgtgattatctcctgatatttattgagtacctggggtgtgcaaagctctgtgctgaatctgagaatgagaagtgaataagtgatggccactgtcctgagaaactcctagtctaggggaaacaagtttcattgcattgatagcaaagatgtgtgtggatgccgtgggcaagagatgggatatgccagctgtacctggatgaattgggaagggggtcatcaaagagaagactttggggtttgaaaggcgaatagaagttgcataggtaggcctgtcgcggtggctcacacctgtaatcccagcactttgtgaggccgaggcgggcggatcacttgaggtcaggagtttgggaccagcctgaccaacatggcaagacctcgtctctactaatactacaaaaattagctgggcgtggtggtgcgtgcttatagtcccagctataatacttcggaggctaagtcacgagaatcgcttgaacctgggaggcggaggttgcagtgagcccagatcacagcactgcactccagcctgggcgacagagcaagactccatctccaaaaaaaaaaaaaaaaaaaaaaagaacttgcgtaggcagagagttttaggagaatgtagagtattcagagacaaagatgattgaatcagaggaagagggaatgaagtatgggtgaggaagccagagaacagcatcatgtgggagaaagagcatgatctttggattggaatgagggtgctcttacatcagatgaagtgtagagaggactcaccacagggctgacacactgtagcttctcaatagatgttcgtttccctacctagaactggagaagtaaaattgagaccactttgagaagagccttgcatttcatactgtaatagtcagaggaggtgtgggattttatgacttttgaagcttttttctacttttcttaccacaacattataaaagcagtcaatattcaatatttctttcttcttttttttttttttgacagggtctgggtctgccgcccaggatggagtacaatggtgtgatcttggctctttgcaacctctgcctcctgggctcaagccttcctcccacctgaacctcccaagtagcgggactgcaggtgcatgctaccacatcggctgtttttttttttttttttttttttttgagattgaatcttgctctgtcactaggctggagtgcaatggtgcgatctcggctcactgcaacct

SEQ ID NO: 8461 - DNA, 2300 bp, Homo sapien
aaagccactttttttttagagacagagtcttgctatgttaccaggttgatcttaaactcttggcctcaagtgatcctcctgcctcagcatgctgagcagctgggactataagcataagccactgcatctggcaggaatacatttttcttttctttttttttttttttgtgggagtgcagtggctcgatctccgctcactgcaaggtccgcctcccgggttcatgccactctcctgcctcagcctcccaaatagctgggactacaggcgcccaccaccaagcccagctaatttttttttgtattttttagtagagacggggtttgactgtgttagccaggatggtctcgatctcctgacctcgtgatctgtctgcctcggcctcccaaagtgctgggattacaggcgtgagccaccgcacccggcccaaaatgtggttgatagttcactgaactgatttcctaacccactagtgggtcacaacacagtctgaaaaactctattctacaggaaatatggaggcagctctccttctcccaccccaaattctgttttaagtctgatgactatgaaccataattgatagtttcaaaattcaagtcatatttatacaaaggcaaaattggggaatgattatattttctaaagtatctgtgtttcaaaacaagttaacttatataaagcgctgaaaatacagtgcttagggatgctagagagataggaaatggattggaagagttgatggggccttcttggagaaggcagatcttgagcaaaacatgaggggaaggaggagtggtggttttacaaggagaagtgggaggtgtcagatcgagaggcagcatcttcatcaggaactgcagaaactcaagtcagaggacttgcgtgccggccatttctgctgtctgtttctggcataggccttgcacacactctcacctctgcctagaccacacttcttcacctatttacagatactcatccatcgtacttcagagttcaacatggggacgtttctcagaacaccatgtcaaatgacctctgtttaatgcttttatagcaccatgtatatccccgctttgtaacactcatcactggttgcagttttatatttatagatctgattatttgatgaatatgctttctccctgactgaaagctatgtgagggcaaggagtgggacactttttacttgttatagtccctctaactggcacacaatttatggtcattaaatactggtatttgctaaatgaaccctggtaatttggttagagtccagcctcctcacgagtccagcctcctcactctctgtttagtgctgcaggtggaaggtgacctgagccttggaaagtgtcagactcttccttttaaacccctttctacagaggaagaattctcctgcttgtggcaggaatgtggcttttgttctctggacagttctgctgacctcatccgccatgtctacttccactgctaccacaccaagctgaaacagtgggggctgcaggccttgcaaagccaggctgaccttggcccctgcatcctggacttccagagccggaacgtcatccctgatatccctgaccacttcctgtgtctgtgggagcactgtgaggtcagcaggcagtgccagtaattggggtggaaggaagctgggggtcttaactctgatgccttgtccctttcagggatgccttatatttccaagattcctgctagtatctctcttccatttcttttgctcttttaaaatttgtttattttttacacacaggctcttgatctgaagcccaggctagagtgcagtggtacaatcatagctcactgtaaccttgaactcctgggctcaagcaatcctcccacctcagcctcccaagtagctaggactacaggcatgtaccaccatgccctgctaacttctaaattttttgtagagacaaggtctgggtgtgttgcccaggccggtctcgaactcttggcctcaagtgattctcctgcctcagcctctcaaagtgctgggattacagggtttagcaaccgcacccggccactcctccatttctgtgcagtgcctttcctcaaaatttcccatccccatcaagttaatttgggagagagccaagaattcttcgggcacataggggtgagtccctctacccaccctcagtcctcaccccaagttgcccctggcacagaattccttcgacaatcctgagtggttttatcggcatgtggaagcacacagtctgtgctgtgaatacgaagcagtcggcaaggacaacccggtggtgctgtgtgg

SEQ ID NO: 8462 - DNA, 2300 bp, Homo sapien
ccagctaatttttgtaatattagtagagatggggtctcgccatcttggccaggctggtctcgaactcctgacctaaagtgatccacccaccttggcatcccaaagtgctgggattacaggtgtgagccaccatgcctggcctatagtctactcttgagaataaaaaatcttaatctgctgagtgtggtggctcatgcctgtaatcacagcactttgggaggctgaggcgggaggatcacttgaggtcaggaattcgagaccagcctggtcaacatggtgaaaccccatctctacaaaaaatacaaaaattagccgggtgtggtggtgtgtgcctgtagttccagctactcaggaggccgaggcaggagaatcgtttcaacctgggaggcagaggctgcagtgagctgagatctcaccactgctctccagcctgggtgacagaacgagactatatcagaaagaaagaaagaagcaaagaaagagagaaagagagagagagaaagaaagaaagagaaagaaagaaaggaaagaaagaaagaaagaaagaaagaaagaaagaaagaaagaaagaaagaaagaaagaaagttgtgtgccaaagaataaagctgggtggcattaagacatggaggttatctcaggaggatgaagagcctgtctagaaaatagagggagacagtccatttgggaataaggttctgagaggcccaattagcagggtaaaatcagggactttgggattcaagccctgctttgccaccaactattgcttaacctccctatgcctcagtttttcatctctaaaggggggttgtaaaacctgtcgcatagggatattgtgaagattaaataacataatgcctggtacaaagtagttaataaatgcaactgttgggggatggggaggtctatagtagctgatgagaagttgacttggagaatggagggtccatctggagaacaggaggttggtcctgaggaatggtggtgatgtggggcatggagttgggggaagataggaaagactggatccaaaccccacacaaacctcagagtaacagggcggggcctagagaaatcctccagggatcgccagcttttagggctgtggagaggtggttgggaggggggccagcaggggagaggtttgactgctagtaaccctcaactgctgcagtaaggagaagcctcagcggtggcagtcacaccagcagcctcagagccttccctccccatcgtctctgctgtgtgacaggtgggaacttaaaagctcagatcacgtgtcttggctagctaacctacttaccccttgaagacatagtggctgggacaggcaagggccaagaggaattggctgagaaaggggcagagcaggggaaagccccaagtgtgttctggggacctacatttgaaggctttgggggcaagggagagaatgtgcaggtgcatgagatgcccagggcatgtctgcgagccctgtgcatgccctggcacacaggtccctccaggatatggcatgtgcctgtcttgaaggcctgtatctggctaggtgactacagtcggagcaggctgagcactgggttccagtttaactctggagctactgcaggctctcccaaagctgctgccattttcccttctttattagtgtcctaactcagagaaagtgtgaatggggagacaggaggatgttccaatgtcccaaggctcctgcgtttttgaaagcctttgcacctcgtttggggattcctggagggaggcctgcgctcattcatgggctggaactgagggaaattgttgggggactggtatcgtgtgtgaagacagactgacacctttacaatccctccactttcccccacccccaacacccttgcctaatctgtcttccagggacttgtccccacggagtgactccagctctcctttcctcactgcctccaagtcggccctttgccatcaacccccagtcctgagttcacccctgcacctcctccggcccccgcgccgcaagcgctgctctctcctttgccgtcctcgccccccgcgggctgccgggcggcgcgggccctttaagaacggcgggaccggcgagcagtagctggtaggagagcgcagtcgccccgcgggctcggaggacacagcgtccgggaccaggctctgggaagcgggtgtgcacagcccagcagagtcagggcgcgaccccaaccgcctctcaccatccttgccgtctcctccgagccgagggccggccctcctgcctcgcctgccccgccccggccccgccccggcccgggccgcc

SEQ ID NO: 8463 - DNA, 2300 bp, Homo sapien
cgattctcctgcctcagcctcctgagtagctgggactacaggtgcctgccaccaagcctggctaatttttttgtatttctagtagagacggggtttcaccacgttggtcaggctggtctcgaactactgacctcaggtgatccacccacctcggcctcccaaagtgctgggattatagggtgagccactgcaccgcatcctaggtcagacaacagaggacatgcccacggcatgactcacagtacttctgtctgcaagaggccagtcaaagtatatgttattaataaaacctacatggttgtcgtacccatggggaaggtgacaggggaggaaaacagattgctctgagctgtgtccaggaactgctgccaggtgactgtcttgcatggctaggtaagtggaatgaagctagaggagattaccaggcccaaactgtcacccatgagactacattcatggggttcctatacttcccctcccacatcctattctactccccttgaagaacctcttttaaaatgcaaatgtgttgttcaccctgctgctgggatgccctgcctttcctttctctgatttatttatttattgagacagggtctctctctgttgcccaggttggagtgcagtggtgcaatcttggctcactgcaacctccgcctcccaggttcaagcaattctcctgcttcagtctcctgagtagctgtgattatgggcatgtgccaccatgcccagctaattttttgtgcttttgtttttatttttgagacacggttttgctttatctcccaggctagagtgcagtggcatgatctcggctcactgcaacctctacctcccaagttcaagcaattcttgtgcctcagccttctgagtagctggtactacaggcccatgccaccacgtctggttgattttttttttttttttgatacagagtcttgctctgtctcccaggctggaatgcagtggcgtgatcttggctcacggcaacctccgcctcctggattcaagcgattctcctgcctaagcctcctgtgtagctgggactgcaggcatgcaccacccagcccggctaatttttgtatttttagtagagatgaggtttcaccacgttgcctaggttggtcgtgaacttctgagctcaggcaatccgcctgccttggcctcccaaagtgctaggattacaggcatgagccaccatgcctggccaatttttgttatttttagtagagacgggggtttcaccatgttggccatggtgacgagtttgagctggtcccaaactcctggcctcaggagatctgccctcacccccagccttccaaagtgctgagattacaggtgtgagccaccgcggctggtcctctgatttattttttcagatccagtacaaatgttacctcctctgcactcccttttccagactctcctaatgccttgcctctgccactgaagtacatcatttgtttgtctgttttttatatttttattttctattttcattttaaatagagacagggtctcactatgtcacccaggctggtctcaaactcctggtctcaagtgatcctcctgcctcggccttgaagtacatcatttgtaaatgtggtagttgattccattaaagtgaggtgcctgccttgctgtggttggcagcccagggcctagtgctggacctggcttgtgggggtgaggtgctcagtgctacccaataccacagtacaacgaatgaacaaatgtctaaatgaaacatccacattgttttcagtaagtcctcttcccagccctgccctggagagcctctctgtgggtgccctagtgcacagctctgttgtgtgaacatcgtacactcatgcttgcatacgaaggcgtgccctggctgtgggtggtgggtggctcctccttctgggctacgtgagcccagggtgtgtaagtgtgtggaagtgtagggataagggtgggggctttgggaactgggaagccccagggctaggccatgaatgggtgtcagacccgaagagcaggttggggtgcaagttgtccttcagcccccattcttccttctttcttaaccaaggttaccagcagccacacacataggtctgggctctgaagaggaccggatacataaggcagaacccaaggaagccttaggctcaggtctctgcctgaaggtaggctggggaggcggagagggacagagggaagaatcccctggacaccgcgcctcagggaggcccaggggtaaggtaggaagactcaggcccgggatgttgttctggctcatccacttcctaact

SEQ ID NO: 8464 - DNA, 2300 bp, Homo sapien
tccaggaactgctgccaggtgactgtcttgcatggctaggtaagtggaatgaagctagaggagattaccaggcccaaactgtcacccatgagactacattcatggggttcctatacttcccctcccacatcctattctactccccttgaagaacctcttttaaaatgcaaatgtgttgttcaccctgctgctgggatgccctgcctttcctttctctgatttatttatttattgagacagggtctctctctgttgcccaggttggagtgcagtggtgcaatcttggctcactgcaacctccgcctcccaggttcaagcaattctcctgcttcagtctcctgagtagctgtgattatgggcatgtgccaccatgcccagctaattttttgtgcttttgtttttatttttgagacacggttttgctttatctcccaggctagagtgcagtggcatgatctcggctcactgcaacctctacctcccaagttcaagcaattcttgtgcctcagccttctgagtagctggtactacaggcccatgccaccacgtctggttgattttttttttttttttgatacagagtcttgctctgtctcccaggctggaatgcagtggcgtgatcttggctcacggcaacctccgcctcctggattcaagcgattctcctgcctaagcctcctgtgtagctgggactgcaggcatgcaccacccagcccggctaatttttgtatttttagtagagatgaggtttcaccacgttgcctaggttggtcgtgaacttctgagctcaggcaatccgcctgccttggcctcccaaagtgctaggattacaggcatgagccaccatgcctggccaatttttgttatttttagtagagacgggggtttcaccatgttggccatggtgacgagtttgagctggtcccaaactcctggcctcaggagatctgccctcacccccagccttccaaagtgctgagattacaggtgtgagccaccgcggctggtcctctgatttattttttcagatccagtacaaatgttacctcctctgcactcccttttccagactctcctaatgccttgcctctgccactgaagtacatcatttgtttgtctgttttttatatttttattttctattttcattttaaatagagacagggtctcactatgtcacccaggctggtctcaaactcctggtctcaagtgatcctcctgcctcggccttgaagtacatcatttgtaaatgtggtagttgattccattaaagtgaggtgcctgccttgctgtggttggcagcccagggcctagtgctggacctggcttgtgggggtgaggtgctcagtgctacccaataccacagtacaacgaatgaacaaatgtctaaatgaaacatccacattgttttcagtaagtcctcttcccagccctgccctggagagcctctctgtgggtgccctagtgcacagctctgttgtgtgaacatcgtacactcatgcttgcatacgaaggcgtgccctggctgtgggtggtgggtggctcctccttctgggctacgtgagcccagggtgtgtaagtgtgtggaagtgtagggataagggtgggggctttgggaactgggaagccccagggctaggccatgaatgggtgtcagacccgaagagcaggttggggtgcaagttgtccttcagcccccattcttccttctttcttaaccaaggttaccagcagccacacacataggtctgggctctgaagaggaccggatacataaggcagaacccaaggaagccttaggctcaggtctctgcctgaaggtaggctggggaggcggagagggacagagggaagaatcccctggacaccgcgcctcagggaggcccaggggtaaggtaggaagactcaggcccgggatgttgttctggctcatccacttcctaactgaatcaacctgcacaagtcatttcacccttctgagcatcagtttcttcatctgtaaaatgggcctaacaagcagcccagcctgggaggtggttagtgaggtcactgggtgtcactggcgcttgggaacctgcagagggcagtactagcggcagtgcccgcggggatggaggcagggaggggggacgatggcgggacgggtggcgccggggttccagccctgcgcctgctccggagcaccgggcccctctcgctgaccccctcgtcccaggaccccgcaggcccgagtgcctgggctcgtcctctttcgcgcccgctgccaggtgccagggccgcgcaggcgggcggaggtgggc

SEQ ID NO: 8465 - DNA, 2300 bp, Homo sapien
ctgggtgatcaccggagaactgccctcggccccgcaagtcccgtcttgactcagtggccctagatccgaggttaaaccggaacctaggctttctcaggcttctggagccctctcttaacccttccgcagcccctgggacgggccagcacccagccagctcctccgctggttggccctgctaaggcaggtggcccaatgcagccagttctccttaagcgtaccctgcccaagaagccccgatctcagtggaggagaccaggtgccaaataggggcacattccatttaagtgagttcagaggcctcagaaaagacttcccagggacggagacttttgagcaggatcttaaaagattggttggggcccgagtggtggctcgcgcctgcagtccccgcactttgggagggcaaggcgggcggatcacttgagcccaggagttcgagaccaccctgggcaacaatggtgaaaaccccgtctctacaaaaaccaaagccaaaaattagccaggtgtggtggcacaccactttagtcctagctactcaggaggctgaagcaggaggatggcttgagcccaggaggtagaggttgctgtgagctgagatcgtactactgcactccagcctgggcaacagagcgagagaccctgtctcaggaaaaaaaaaaaaaaaaaaaaaaaaaaaaaaaaaattggttgggactctaacagaggaaaaaggtcattccaaactgggaagagtgtatgaacaaatttaggacagcaagagcaagaatccggtgagcctggggtataaggcacaggctgggacaaactcagaaaaatagcttgtgggagcccagtgtttggactctataagtaaccttggacttttcgggaggtgcttggtgcttggggtgagggattagaatgggatgagactgaaggcagaaaggctggtgaggagatcgggtccaataaatgctggtcggggcagcaactggctggcaaagcagtggggaggaattgctaggactcttcacactgcctaaaggagcaagggaagaaagatttgaagagagaggtcaggtttctaatgtaaggcgtgggtgggaagatttgcagcaaggtaaatgacaagaggaggggaatgatgagttcagttttacatgggagaagtttgaagcagtggcaggttgtccatctggagatgtcaagtgagaagttcattcatttatttattatttatgtcagcctcaaaggctgcttacataaaagtcacagagaacataaaatgatgaagccattaaaactcagctaaaaggatctgatatctgcggaagaaaggcagagtggggtggataattattactggaaaatctaggcacagaaaagccactgaaaatgaacacaggactcctatctgagcttgctggtggccaagaaggaaaaaggacacctaaataaagcagtttaccagggtggaactcagggaaaggtgttcgtgaagcttcaggggagaggcaagacgtggcaggaaggccaggtgtgatggctcacacttgtaatcccagcactttgcaaggccaaggcaggcagattacctgaggtcagaagttcaagaccagcttaaccaacatggtaaaccccgtctctactaaaaatacaaaaattagcccagtgtggtggtgggcgcctgtaatcccagctacttgggaggctgaggcaggagaatcgcttgggcccgggaggcataggcttcaatgagccacaatcatgcctgggcaacagaggggcactccatctcaaaaaagaaaaaagaaaaaaaaggtggtaggagataaaatgggattcctcaagctggagtttgggagagggacgagagctgaaaaccaggccagggcttcagcagggccaacatttgaggaagggctgatcctctcctgggaggaaggtccctccttggctggaatggggttaggggtgcaggggaggagtggtggcagtgatccattcgtactattcttcttgcaggacagaagtcggtcctaggccccccaggctctgaccttctttcccaggatgaggtggggccaccatttgcccagggcctcttggggctctggttttagaagagcactccagcgaccaggtgagcaggaagcaggggtttctgtttttacctctttcttgctttccagggtccacatgatgcctccaagacagcagggatccagacaccaggtgcactagtctcagctccgtggttctctagctgttgaccttgagcatgtcgcttcaccttcctcagctgcctttttcccaac

SEQ ID NO: 8466 - DNA, 2300 bp, Homo sapien
aaactacaaaaaaaaaaattaaccaggtgtagtggtgcacacctgtaatcccagctagttgggaggctgaggcaggagaatcatttgaaccgggaggcagaagttgcagtgagctgagatcgcaccattgcactccagcctggacaatagagtaagactctgtctcaaaaaaaaaaaaagagagttggactagatcatcttcgagagtctcttgtagctacataagtctaggaacttgtctgattttactttacatacaacagagatttactgagtgcctgccgtaccgcagacctggtgttaagttctaagtaaataattgtgaacaaaaacagacgtaaaggggacaaaaaaattttaaaacacccaaatgtgatccctctcatggaggagagaggaatgaatgttaatcgaataatcacacaatgaaatataaaattgcaaaataactgctgcaaaggggcagtacatgctgctatgagagcaaatactggggggtttgatgtagacatgggttctgtgtattgcatgggatctgcagatgctatttcttccttctctctgtagatgatcgtatccccttcctgatccactggagttggccccttcaaggggagcgtccctttgggccccctaggtgaggcctgggtgtcataccttaggactagtctgggcacaacagagcagactgggaagggtcaggacttggggctagcttgatctcttggggaccttggggaggggcttggtcctttgggggtgggaggacagtggcagctccaaggcctgagaggaagttggcttagatcatctgtggtagaaggcatagtagtcagtggagggaggaccctgtgggaagtgggtggagcctcacatggccagcctgagttccaggcgggcagtcagcagtggggtctggagggctagggctaaggcctcagcacctgggaagggtgtgagagtcagacaagcctctaaacttgggggtccagtgtggggcctttatctcaggaaaccagaagtctagcagtgcagataggcttggacccagagcctgtgaaggggctgatccaagttacaagtcccagctcatcccctctccttgttcccagggcctttatacgccaccacggaagctcggtagatagcgctcccccacccgggaggcatggacggctgttccccagcgcctctgcaactggtaaagggactggctgggaccctggtcagggggtgtggtgggcagacggggctggaaggagaagcagggtgagggaggcatagaggatccactgccatcttccatcggtggtccctcctcctctctctctctccctcccatccgtctatgtatcccttcctgcaatactcttgcaatgcacacttatatgtacaaagcgctaggagagccataccatccctatgctcaacaaagttgggtcaagcaggttaagacggcacataggtcactgtgaaaccagtttgtccagtggcttcccactttctgacataggggttccagactttctggacagtctatattttctcagggagtcttgtgtgcccaccattgtgggccccagcatctatgccgtgatgtcccagcctgacctcaccaccgccctgattggccctaagctacatctccaggcccctttccctgacacatttcccttatcttcccactcagaagctatacagcggcaccgccggaacctggctgagtggttcagccggctgcccagggaggagcgccagtttggcccaacctttgccctagacacggtccacgttgaccctgtgatccgcgagagtacccctgatgagctacttcgcccacccgcggagctggccctggagcatcagccaccccaggccgggctccccccactggccttgtctcagctctttaacccggatgcctgtgggcgccgggtgcagacagtggtgctgtatgggacagtgggcacaggcaagagcacgctggtgcgcaagatggttctggactggtgttatgggcggctgccggccttcgagctgctcatccccttctcctgtgaggacctgtcatccctgggccctgccccagcctccctgtgccaacttgtggcccagcgctacacgcccctgaaggaggttctgcccctgatggctgctgctgggtcccacctcctctttgtgctccatggcttagagcatctcaacctcgacttccggctggcaggcacgggactttgtagtgacccggaggaaccgcaggaaccagctgctatcatcgtcaacctgctgcgcaaatacat

SEQ ID NO: 8467 - DNA, 2300 bp, Homo sapien
gtcagtggagggaggaccctgtgggaagtgggtggagcctcacatggccagcctgagttccaggcgggcagtcagcagtggggtctggagggctagggctaaggcctcagcacctgggaagggtgtgagagtcagacaagcctctaaacttgggggtccagtgtggggcctttatctcaggaaaccagaagtctagcagtgcagataggcttggacccagagcctgtgaaggggctgatccaagttacaagtcccagctcatcccctctccttgttcccagggcctttatacgccaccacggaagctcggtagatagcgctcccccacccgggaggcatggacggctgttccccagcgcctctgcaactggtaaagggactggctgggaccctggtcagggggtgtggtgggcagacggggctggaaggagaagcagggtgagggaggcatagaggatccactgccatcttccatcggtggtccctcctcctctctctctctccctcccatccgtctatgtatcccttcctgcaatactcttgcaatgcacacttatatgtacaaagcgctaggagagccataccatccctatgctcaacaaagttgggtcaagcaggttaagacggcacataggtcactgtgaaaccagtttgtccagtggcttcccactttctgacataggggttccagactttctggacagtctatattttctcagggagtcttgtgtgcccaccattgtgggccccagcatctatgccgtgatgtcccagcctgacctcaccaccgccctgattggccctaagctacatctccaggcccctttccctgacacatttcccttatcttcccactcagaagctatacagcggcaccgccggaacctggctgagtggttcagccggctgcccagggaggagcgccagtttggcccaacctttgccctagacacggtccacgttgaccctgtgatccgcgagagtacccctgatgagctacttcgcccacccgcggagctggccctggagcatcagccaccccaggccgggctccccccactggccttgtctcagctctttaacccggatgcctgtgggcgccgggtgcagacagtggtgctgtatgggacagtgggcacaggcaagagcacgctggtgcgcaagatggttctggactggtgttatgggcggctgccggccttcgagctgctcatccccttctcctgtgaggacctgtcatccctgggccctgccccagcctccctgtgccaacttgtggcccagcgctacacgcccctgaaggaggttctgcccctgatggctgctgctgggtcccacctcctctttgtgctccatggcttagagcatctcaacctcgacttccggctggcaggcacgggactttgtagtgacccggaggaaccgcaggaaccagctgctatcatcgtcaacctgctgcgcaaatacatgctgcctcaggtgggtggccctttaccccaggttatcactgctgcccgttgactcgccccctaggtcctgggttactttaactcctggtcccttcacttcccagtggtgcgaccctgagcaagtcagtaacttccccagccttctgttcctttctttttgagttgctctgatcaaatggggtactgcatataatattagcacagcggcctggatcacagcaggtgttcagtaattgctagttataactgttatcctcatcaatgtcttcatccttggacactccgtcttcaggggtcccctgggaatagaagcagtcaacaggacactaaggtctttcttaactctcaaccatgctcttcccaggccagcattctggtgaccactcggccctctgccattggccgtatccccagcaagtacgtgggccgctatggtgagatctgcggtttctctgataccaacctgcagaagctctacttccagctccgcctcaaccagccgtactgcgggtatgccgttggcggttcaggtgtctctgccacaccagctcagcgtgaccacctggtgcagatgctctcccggaacctggaggggcaccaccagatagccgctgcctgcttcctgccgtcctattgctggctcgtttgtgccaccttgcacttcctgcatgcccccacgcctgctgggcagacccttacaagcatctataccagcttcctgcgcctcaacttcagcggggaaaccctggacagcactgacccctccaatttgtccctgatggcctatgcagcccgaaccatgggcaagttggcctatgagggggtgtcctc

SEQ ID NO: 8468 - DNA, 2300 bp, Homo sapien
agctgctgcgagtggagggcgaggtcagggccctcctggagcagctgggaagctctggaagctgagacactggcggcaggcacctagctatgtgaccactggccctaaaccttttccctctgtggcctcctggcttgcactgctccctctagaaagattccttcaggtctggaggcagaggaatgggcatagctgagccagttgccctcctagggcatgtttgaccaggactgagtctggaatctccaagttaaagatggtgaatcaatgcttcgggcttggagatggaacatgcctcctctccattcagctagaaggaccaaagcatgtggcatttggatggccagagtgccctgaagcaccactaccaaccttgcctccccctcctctcaaagagcctctgactgtgtcaccaaggggctcacatcttatgtctgccatgccaggggtgtcgccatccagatgtgttggaagcttcccctcctgccttatgctcacctgtggacaccgaggatgccctcacattggtgctttctcctcatcctcatgccccctttgccacaatggtatgatggcttggtagcccctcgaggcagatgcacctgacttgctgctattaaaaagccgtgtgccttctaccaattgtggcctcttctttactgcctggtgcttccaagaaagggcactgttcttggtctttctggttaaactaccaaccatgatctattgcaagtggttcttgggcactaggttcagaggcagtggaggctggaagggcccatgaacaagatattggcatgggggttggccatgctgggctgtattagtccagtctcacgctgctaataaagacatacccaagacagggtaagtaatttataaaggaggctgggcatggtgactcacgcccgtaatcccagcactttgggaggccgaggtgagcggatcacctgaggtcaggagtttgagaccagcctgaccgacatggatagacctcgtctctactaaaaatacaaaattagctgggtgtgatggcacatgcttgtaatcccagctactcgagaggctgaagcaagagtattgcttgaacccaggaggtggaggttgccgtgagccgagatagtgccactgcactccagcctggagaacaagagtgaaactctgtcaaaaaaaaaatttataaacgaaagaggtttaattgactcacagttccacatagctggggaggcctcacaatcgtggcagaaggcaaatgaggagcaaagtcacatcttacatagcagcaggcaagagagtgtgtgccggggaactcccctttataaaaccatcaaatctcatgagacttattcactatcatgaaaacagcacgggaaaacctgcccctgtgatttaattacctcccaccgggtacctcccatgacacgagggagttatgggagctgcaattcaagatgagatttgggtagggacacagccaaaccatactatgggccatagaattatcacccttttcacacttaccccccaggcttggagttagtgaccagcaatctgcctttctctgcacagaggggcaactgggtcagattcagggtctccagaaaaagttggggcccagggatagattcaggaggaacccacacagttttccagaggataagactctcagcggggcacggtggctgacgcctgtaatcccagcactttgggaggccgatgagggcagatcacctgaggtggggagtttgagaccagcctgactaatatggagaaaccccatctctactaaaaatacaaaattagccaggtgtggtggtgcatgcctgtaatcccagctactcgggaggctgaggcaggagaattgcttgaacctgggaggcagaggttatgatgagccaagatcatgccattgcactccagcctgggcaacaagagctaaactcggtctcaaaaaaaaaaaaaaaaaaaaaaaaaaaaaaagactctcactcccgttaaccattaccccactgcttccacagcgtcttcaaggaggcgggacctgggaggggatgggtgggaggatcagtggctgtgatgaaccttgtccctaccccgggcactgggttgctgatccagctatggagaaagccgcaggtaggaggccaggagaaatcctctgcaggggactttgggacaggcagggggccgacttggaggctgaagctttgggaccagggcacacttgattttggggcttggagccctgaggcaggtaaacaagtcaggagaaaagtaatgagttgatatgtctgtcttcc

SEQ ID NO: 8469 - DNA, 2300 bp, Homo sapien
ggcctcacaaagtgctgggattacaggtgtgagccactgtgctgggccgaatggattggattttaaagcatacttcaggcagatggaataagggaatagtctgagtaacggtgatgagaaaagaaagaattggccaggtgcggtggctcacacccatgatctcagcactttgggaggctgaggagggcagatcccctcaggtcaggagttgaagaccagcttggccaacatggtgaaatctcatctttactaaaaatacaaaaattagtcaggtgtggtggcgggcacttgtaatcccagctactcggggggcagaagttgcagtgagccaagattgtgccactgcactccagcctgggtgacagactctgtctcaaaataaaataaaataaataaataaataaaaaagaaataattgtatttgatgacttggtgagtcagctagcataagacatgtgtaccagggagtagtataaaactacaaggttgtttagcttggagttagagcaacttgtcaattttattcccgaggcaatgggaggtgtttaaagtttttttgcgatgctgtctgaactatactttaggaagcctatggtggcaggatgaattgaaggcacaggaaaaggtttcaatattcaatagtccagggaaaagaaacggaggacctgcaactaggtgttggcactaagggatggagctttgcctagattttccctttgtagattcttctcttcctggatggaaaatgataaaaggaaattcttctgatagtaaattataatgttgactccaaaatcaattctagataaaggcgattaaattgcaaacccaggatgcctgtctgaatggtccctgcattcaaagatattttcccctttacaggagcaccggataaatttaactccctaatctgtcaagggctttgtggaagagcctggagggggatcgaaggcggaactgatactgacacacctgggtctgcaaactcccaaaactgaggctcagaattagtaaattagggcagggcacttccctctttggaagggaagttcctattttcaaagttcttccaacggaacttttacattagagaagtgtaattgactgagaagtggaagtgaccaggaacagcatttctgttccctgggcgggagagagaaccccctcgggcggagccagcagcaggtcagcttctgagggggccctcatgctggcggcgccgacctgtggtgcaatgctctgagtaggagaatcttaaatacatgtttgagattcaattcccagaaacgtaactagtcttcacaagccaaaaaaataaaaataaaaaataaaaaaaggaagtgatttcttttcaagaggtcaaagggcctggaagaagaggtcctggcttgagtgtctcaaggctttctggggcctaatccggctggaatgggccgcagcattcatattcctgtccttggtcgtgtcttaatgaagaattgaaaataataaggggtggagaaataactttcctttttctcccaccatcctcccacagtgtaaataaacaaataactctaagctcgatttcctcatttgtcaggggtggggaaagacttgacatcaggactcttccattccatcgccacctgtcttaatttaaacattcccatgacccaccccagaagcgccaacctcccgcccacaaggagcatggaagtcttggtttctggctactgcgcagactccaccttggacctactccccaaccccccgccgctcctttccccgtttctccagcagagggcgcaggcccaaaggttccgccgaccccgccccagcctggccccgccccgccccggcgtaggggcggggaagacgggcacagaaacctggccgcggctttccgggagctgtgggcacgcgagctgctcgaagccggtggcccggggatcgtcgctgcccagtccggccgcggccggccgcttccccgagcttaccagtaagccggtccgcctccgggacgcgccccgcccgccccgggctcgcgcgctctgaaggggcgcgtcccgcgcactcccggcgccgcccactcccctccccacggccgctcctccctccgcccggatagccggcggcggcggcggcggcggcggcggcggcggccgggagaggcccctccttcacgccctgcttctctccctcgctcgcagtcgagccgagccggcggacccgcctgggctccgaccctgcccaggccatggccggcaacgtgaagaagagctctggggccgggggcggcagcggctccgggggctcgg

SEQ ID NO: 8470 - DNA, 2300 bp, Homo sapien
tgatacgagacactcattagaaaagtattttttctatgccagagtaaaatttgtagtccttaacgataaatccctaaaaagcaaactaacaaactttagcatttgaatatcttcgatgtgttttttttaaaggagtcgacacatttaaagtttcctttacacacctaaactttctgtaaggattttattataatttctaacaataaaattagtactacaccaccaatataatcaacacacgaatacttgtgtcattaattacaataccaattatttaacatgagaaaagccagccctaaaaaggtggctatgaaaccactggcatgcactactggagtgttaattcacacacaggacttattaagcatttaaattgcacattacattggctaagtgcttcataatcattttattagcggtttctagtccaaagcaacccatgaagaactttacagaagaggaaccgaggcccagggaggaaccaaagaaaaccaaattttaccctggaggaaataacaccattctcttaaaacgtgccagatacttctaatcacttttcatacgcaatatgaattttgtcaaagtaattaattaaagaatatgaaaaataccaagaaaacgtattgaattctgacaaagcgtccgactgcttaaacagttaaatacttgagactgactacatttcatcatatagacacaactataaggaagtaaaattctcccaaatgacaaacttagtggctaaatataaaggagttatttttgttcgcacttgcaaaaagcaaacaaacaaaaaagcgtaatcaaagaagctcaacgaacaagtttaaagtcaggacctgtaataaggagtcagaaccgttaccagaaaaaaagaacccagctcaagcgatgtagtagggaggaagttattaagaagtcagaatctgctgctgcttaacaggctcagccagtccatctttcagaagataatagttctaaccagaacttgtggtttaatcagtgcatatctcagcaccagcaatggatcacatccagtgtttctgagggtaacaaaaaacttgagccggcgctagatggggaggaaagttctttccttgcctcacttaaacatcaatatgtcttttatcttcgtgttacatcttaatgagaaaggactatactctcacccagagcacagcttccctgagagctgtcctgaccccagccaggttcctcagtcagagcccatgaacctaattccctagtcagatctcacccagccaagagccccagccggtacatcactcttcctcaccccctccctgctaacctcccaggccaattccgtgacctacatccctacaccctgcacagagccccaaactccgcacccctcattgtacttccgccccactgacttcccagttaaccttcgccccagcccccactccatctttgtctggctaccccaaacgcggcaccccagcgttccccgactcccaacggcagcccctcccccacgccgccccccaccctcccggcctcgtccctgcccccacgcccccggccggtcaccccggctccgcgcctccccggcttcaccagacccgtcccctcccccgcttcctccgtccgctcgttcccctccccgcggccctccgcccacgcccaccctgcaacagcgggcgctcagccggcctttcaccttgtccatgagcttccagcacttctccaccatcttcttgtccaccgtccccggcgggtgggggctgaggtggtggtggtggtggtggtgcggctggaaggcgtccttcatgagcccaatcaggccacccgaacccgagcccccggagccgctgccgcccccggccccagagctcttcttcacgttgccggccatggcctgggcagggtcggagcccaggcgggtccgccggctcggctcgactgcgagcgagggagagaagcagggcgtgaaggaggggcctctcccggccgccgccgccgccgccgccgccgccgccgccggctatccgggcggagggaggagcggccgtggggaggggagtgggcggcgccgggagtgcgcgggacgcgccccttcagagcgcgcgagcccggggcgggcggggcgcgtcccggaggcggaccggcttactggtaagctcggggaagcggccggccgcggccggactgggcagcgacgatccccgggccaccggcttcgagcagctcgcgtgcccacagctcccggaaagccgcggccaggtttctgtgcccgtcttccccgcccctacgccggggcggggcggggccag

SEQ ID NO: 8471 - DNA, 2300 bp, Homo sapien
tgccaaccatgtccctggggtattccaggctactgcctcccaggctgactttatttctggggaaagggctaaatcgggctccacagttgcagccggtccagctccaccctgccctgctcttctagctctgggaggagtcaggggtctgaggctctgggttggagaccccaccttccacctgccctccttgtccgagagccaaggtaacaacccaggcatcccagagcccaggcagatggtgtcgagtgacatcacctcctcacagggctggcagcacgctggcaccactgacgtcactcctgcccactgcctggcccttgccctgacccctgggggagactctgacctctccatccttaccagctacctagggtggggtccgcgggtgtgtgcggagtgttcatggaggtgctgctgagggagcatgagaccggaacttccgccagagttagcccgctggggagtgagggcagggattttggagggcagaggatagagcagtggtgtcttcccctggcggtggtgacacaaaagggcctgtgtgccccagcctggcacattctttgcattcccacactctgagctcacccggagaggagggggcctggaaggaaaggggccttcctcttggccccgagcctaggttgcccctttctgcccctctaccagcctcagctggagctgttcggtgctcagtctctgctcaatctctgcttggctccaaggacctgggatctcctggacggggagagggctggcccaggtggggcgcgggtcggggtgggggtagagcgttcagaggacagggccctctgcagaccctctgagtggcaggaaaaacagctgcagcagcgctgcgaggggaggggcggacagcagccggagctgacacagctgcgggggccccgcctccctcccccaggtgtgcccggagaggctgagcagcctgcgcctgagctggtggaggtggaagtgggcagcacagcccttctgaagtgcggcctctcccagtcccaaggcaacctcagccatgtcgactggttttctgtgagtgcttgggctcctgcaagagcagcccggggagggagactctgcccctcttgtagcccaggacccttctcctcctctgtgtctcctcccattaggtccacaaggagaagcggacgctcatcttccgtgtgcgccagggccagggccagagcgaacctggggagtacgagcagcggctcagcctccaggacagaggggctactctggccctgactcaagtcaccccccaagacgagcgcatcttcttgtgccagggcaagcgccctcggtcccaggagtaccgcatccagctccgcgtctacagtgcgtgaccctgtgtctgccagcagggtagtgagggtggtgggacgtggccagatgtccccctcatttctattttcttgtagaagctccggaggagccaaacatccaggtcaaccccctgggcatccctgtgaacagtaaggagcctgaggaggtgagatgtgtggcaggtgggctgggcagctggtgcgcagccgctgagatggggcttgaagggggctcggaggcagggagactcacaccctgtgctctttaggtcgctacctgtgtagggaggaacgggtaccccattcctcaagtcatctggtacaagaatggccggcctctgaaggaggagaagaaccgtgagtagccctttctcccaaaagccacccttgggccaggtgtggtagctcacacctgtaatctcggtgctttgggaggccaaggcaggaggatctctggaggtgaggagttcaggaccaccttggacaacatagggtgaccctgtctctacagaaaataaaaaaattagccaggcatggtggtgtgtgcctgtggtcccagatacttgggaggctgaggcaggaggatcatatgagcccaggaaatgaaggctgcagtgagctaggattgcaccaccacactccggcctgggtgacagagcgagaccccatctcttaaaaagagctgtccctatggtactacacaggaactgccttatattttcattaagcttttaacttaaaaaaattatacaaatggtacttgaaaatattttcatgagaatttaaactgacaaaaaatctagaagtttcttcttgcctgagaccccccctcccagaaataatctctgctatcagggtgtgttctttcaagcctatttctatgtatttgctcatatatagaaatatttctagaatgatataggcttctgtgttttattatctaaatcagtcattcttaac

SEQ ID NO: 8472 - DNA, 2300 bp, Homo sapien
ggaagtcccgcagccaccttctctcccctggggctgccggagcactagcctctggcctctaagaagagctgagggctgatccccttcaccttccgctccctccaccctgctccctgcctccactcctgcgtcctttccgaggtcctgacccgtctttagtttggaatcccaaagtgcccacctcatgaaaccatcccaaagctatctgtcccctgaggctatgacccacttccgagcagcctagacagccccaggctactggcttccttaaaggacagtcttctgtgcttgtttggtggggcaatgcgaagggacgtcaccctgggctctaggctctgacctcatttccctttcaccgcagagacaaatcctccacccccacctggcttcactctcctccagcggaagaagaattcagaactgactgtccttggtggttagctggctttgttttcaggccagagaggcgaatgattagttaatggtgttaagtgaaggaagggggttgggcagggaagccagctccatgcccagccgggcctgccagggcaaacggcatccttcagccattcccactccagcccagcagacaaaacattctcatctagtcagctctgggcctggggccagtccatacattcactctggagggcgagccagcgtcctcctcttgttctccctgcaggctccaggctccaggcccctggcccggtgggcctgggctctgcacagcctctggctggagactaatggcattggaggaggggtcgagaaggctctgaaagacaagcctggtgtggttttccagtcatctctgcgtcatcaaaacgccaccccggagcatgctctcaagtcacctggccatctccagggtttgctggctcaccctccacctcccccagcgagcaaaggggtggccccgctgggcaacagacctctacccaaatccaggcccctatttggcactccctggtggaggcgcgccagcagatgtggaccccttttctgaggccaggctgctggggtcagagtgaggcaagagcacctccccctccctagagccttagttcaagaggccagaagacccagggagaagccggcgttttgggagaaggggagctgcagagctccccacccaagcaggtctgatttgattcttccctcagctatggacccacaatcaatagggctggggaagacatggggtgggggaagatcagcgctgccgggatcctttcaatcatcaggaacagcaacaggtttgcagggtcaggctggggaccctcgcccattaactctttcttctccctgtttctttctcttaggtgaggggaaactgagttccagggtaggctccagagtgaagagggaagaaacatgattctcaaggcccaggtctggacaagtgtgaacaccttgggcctgcgaattcagccccctccttcctttctctggtcaaaggctagacttgcaggagcttgcgtttgaagggacagcccagaaggcatcgtctgcactccccatacaggtacttctgggtctgtgggactggcgcagggttcttctcccaaagctgccagcactgaggctgaggcagtgtcaggccggcggcagcggcagtggtgcaatcgttctgggaagcgatagaggccggcctgaattctctgtggcaagggaggggagcccaagtgggaggccccttggggacaccgaggaccaggtccgctactgctcctcccccaggaggtcccctaggggctacattggctggcaggggctgagcagcggtgagcctggctggcttcgacccggggcgactccgggcatccgggacagcttctcctcgctgccacctcggccagtcagaccccgagacacctgtcactaccccctcagccttcccaagccaggagcctgggagtccggctctggcctacctccggcagcgctcctaggcgcagctcccgggctggcggcgccggggcccgccccctagggctgcggcgcgcggggcgggggctgggggctgcgcggggcggggcgggcccgggcgctccgggccccctcccccgcccccctgacgtcagcccccggcagcctcgagctgctcacttggctctcgccctccggccgggaagcatggggcttcccaggctggtctgcgccttcttgctcgccgcctgctgctgctgtcctcgcgtcgcgggtgagttcgctcgcaggggggccgcgccccggctaggggtctgcggtggagcgtgccagggagcagagccagcggcgcggcggggtcggggcgt

SEQ ID NO: 8473 - DNA, 2300 bp, Homo sapien
actacatcttccattagaaaatactgcaaggatagggcttctaggtgttcagctttctcaatatctggcttattttcttctcaatccctgggactaacattgtcaaacaatttgaactgcctccccaaagccagttggagtctttgtccctgcccaaagcaggattacctgctaggtttcctgggagtcaagggttgtggctcattaaagagggctttggattagtgagtctcaaatcactcaaaggggaggtcttggtcctaaacgaatggaaattctctcttagaggatcctgccaactctgagaaggactttacatgcttcttggtgtggaaaactggccagttaattgcacgcagtgcaggcacagcacgtttgccaagtttgactttggacatattgtgtaggaagcaccagtgggatacccatgaaccgttcatgtccaggaagcagctggagcctgaagtttgcaggacaggttcaggctgaagacacaaattcagaaatcatcgtgtatacaggagaggaggctatgatggaaacagaaagaatataggaaagggtaatgattctgaggccaagggtggaggaagtggtgtcaagtgctggaggaagattgattaataacaacatagtgttcactggacaaataagatcccttaagaggagatggtacgggcgatgggatcaactgtcttgaaagggaggtgggcacattctccaagatttgacactggcgggaggatgcgagtaggaaaataaaaacatcagcaacacatcacaacacaacaaaccataacctggccagggcctgagagcagggagagagaaagggtaggaagaagccagaggagtttcagcgactgcagtccttcctctgcactatagcgtacccctaccacgatcccaaggcctcagtaaaggtttgctgcacacctcagcttcttatcagtgatgctttggagaatgaaggactctgaggcagtgttcagggcagactgaaggaggacggacactttcaggagcccaggagtggagatggagaattcaactcaagtaggaaattcagcaaaggtgaccaggggaaagataagtccactaggagtctgctaagcatccttggagttagtagaaaacgccaggattcccaatatatttgggatggggtttcaaatatattttgactattgtttgagtattaaagaaaagggcagggccgggcttggtggctcacgcctgtaatctcagcactttgggaggccgaggcgggtggatcacgaggttcaggagttcgaggccagcctggccaacatggtgaaacctcgtctctactaaaaatacaaaaattagccgggtgaggtggtgggcacctgtactacccgggaggctgaggcaggagaatcgcttgaacccgggaggcagaggttgcagtgagccgagatcgcgccactgcactctagggtaggaaggcccagggtaggaagctgagcggtttctaaatctgtagcccctttttctcaatgacaatgaagtaatcttccgagatgttgaaaaacctggtgaggaaagtttggaatagcagtttgggaatcccctgtaataatctgctttcccttgtgaacagcaggcactgtcttaaaatttttttgtatcctcaatgcactgtaggagttcaataaatgatagaatagatgaataaatagaagagaatgaggagacggatctgggcaggctgcgaaggcggtgctattccaaagcccagcccagaggcagtgacctccgacccaagccaaaaaaaaaacctcgcgttcagaggccgggagaaagaacagctcccaaattgaggggagtccaagaccctgctcttttagagggtggggctaggagagcgtatttcgacgctgcccgccaacgaaccaatccccgcctaaagggggaggggatttaatctgtcgcctctccttccctttggaaagtaaatacgttcgggcgccattcaaacggaccaatgagtgatcgacgtttttgtggttggccttcaccgattggctggagtttgtcgtccctccctcctcgtcacgcctctggctccacccctttgcacacaagatggcggcgcccagcggagtaggggctgcgcttggggtttgctgaagctggctgcctctcccactccccttttgggtgcaaagcgccgctagcgggaagacgggggccgggcggggacaggggcacctgcgtagctggactgagagcctgcgcccagcttacatcgaccccacccggccccggcccgaccc

SEQ ID NO: 8474 - DNA, 2300 bp, Homo sapien
ccccccacctcgtctcctcgcaccatgagctggctgtgctgtttaggacagatcatggcatcagcagtggaggcttctcagccacctacctggccttcaatgccacggagagtaggtgcccctgggcaagtgggtgggggcagtagaggcacctccagggggacagacaagggctctggaccctggtcaggacactctgggggtactgggggtgtaggtatgtccccgggcactgccatgccccttgtgcctgcagacccctgtgggcccagtgagctctcctgccaggcaggagggtgtaagggtgtgcagtggatgtgtgacatgtggagagactgcaccgatggcagcgatgacaactgcagcggccccttgttcccacccccaggtgagaagcctgcccctggggaccctgagcaggctgggtgcccacctcacagaaccctactgccgtactgcacagtgtcccatcccaacctccctgagggggcggggccagctggcctcaccatcctgactctgggaccacttcacagagtcctggaagacagtcggctggtggtggcaatagtactgagtgtcaccccaagggaaatgggaatctgggaatcattggtggggcttcaagaaccagtcccttctgtcacccagagcccctttccacagcccacaccaaagatgaaggcatcctcttacacagagcagggggtttcttccagatgcccaagcagtccctgcaaacgcgggtgccccatgttccctgagattaaagacgtgcctgcatgatgcccagggctggcaagcgatgctggagcaggctctcagggatggcagggatcctcagagtgtgtacagcctgtctctttgttatcctcttgcttcctcacaaccacccccattggacccatgtacacacaggaccgagcgattcggtgacttgccacaggccacagagccagtgagcagtccccacagtggccctcccctccacccctgcagagctggcctgtgagcctgtccaggtggagatgtgcctcggtctgagctacaacaccacagccttccctaacatctgggtgggcatgatcacccaggaggaggtggtagaggtcctcagcggttacaaggtcttctgggtggagggaaggagggcgggcctgggaggggaggagcctgggagcaggtgcctgaaggccactctccctccgcagagcctgacaagcctgccctgctaccagcatttccggaggctcctgtgtgggctgcttgtgccccgttgcaccccactaggcagtgttctgcccccttgccgctctgtctgccaggaagcggagcaccagtgccagtctggcctggcactactgggcaccccctggcccttcaactgcaacaggctgccagaggcagctgacctggaagcttgtgcccagccctgaccctgaagccggcccctgccctcttcctgcccgtcctcttttgccggtcagggctggcacgcaggggaacaaaggaaggagcatcagcagggtctctacccatccttctctggggctcccagggagggggaagagaagtcctcagctggggctcatgggaccctaccaccctccctgctccttcctgtccctttaccggtcccaggctgctgactggccccacactgtgccaccggacaatcgagaccacttcccatccaggcctcttcccctttccatctgctttttcagcttctccatcgcctgccttctgaccttttccttgattcaacaaaaatgtactgagcatctattcatgtggcaggcccctgtcctaggccctagggatccaactggctgtctgcctctagaactctccaccctcatctctctgcgtatttctccctgaaatggggtctggtccttggtctctgccactgccctgcctctcctctggccctgggaacaggaggtgccctgtgtgtccgtctctcgaagttctgcctctctgtgcccagctcaagtctctctccccctcctttctccccctaaactttggccggccgccgggcgacaccacgagttatttcccagctatttcccggtccgggagctcttggcccctgaacaactggtttcctcttggagtctgggaggaggaaagcggagccggcagggagcgaaccaggactggggtgacggcagggcagggggcgcctggccggggagaagcgcgggggctggagcaccaccaactggagggtccggagtagcgagcgccccgaaggaggccatcggggagccgggagggggggtgagtctggc

SEQ ID NO: 8475 - DNA, 2300 bp, Homo sapien
cagcactttgggaggctgaggcaggtggatcacctgaggtcaggagttcaagaccagcctgaccaacatggagaaaccctatctctactaaaaatacaaaattagctgggcatggtggcacacgcctgtaatcccagctattcaggaggctgaggtgtgagaatcccttgaactcgggaggtggaggttgtggtgagctgagatctcgccattgcactccagcctgggcaacaagagcgaaactccgtctcaaaaaaaaaaaattagtaagaatggcagtgtggctttatatttgtgcaaatctctttagcatctggcttaatagaaggcagctggactcgcgtctccttcagcattcaccccaatgtcatatcacatgtcacggagcgtctggaaaacatgaatgagtgtgaaaaaggcacatcatgtcttagtgttattatgagcctagttctaagctctcaagtcctctaaaaaaaggccccgggccccactttgagaactgtcacagcagagcaggggctccttgagacgagggcaccttgtctcagtcggctccatgagcccagtgcctggccagaccccggcacagcaacctctctctcaatgatcacagcgaacgagcagcttcagaggagcagacccaagggcgtggctctcccagctcatcattctcaaagctcagcgcagggccactctgtccaggaagctgcccctgtggccaggctcttaacacacagtgtggcaggaatcctgctctgtcttgatccacccagaatgagaagtactttgtggtcagggactgtctgatcctctccaagagcacctgtccctacagctcccaaaaagtctcttccctaaagaccatgtaccattagacttccaagggtctaggaaacagcttgaccccctagacaaaagcaaactaagaccctccagggacgaatggagaaaaacttgtgggtggaggcatctcctttcctgagtgcaaggagggcagcctgtcctctttgcttccatccccaaggggttcctcactctgcccccatgtcactctgatccctctgctcccccagcatgcctcagccccaatgtggggtgaaagaggtacatcatagaaaacgtgagcctaagatctatccattcctaggctcaactctcatctctgtatcttaccagctgtgtgaccttgggaaagtgacataacctctcagaggccagcaccagcatttgtaaaatggtgacgctacctcatagttatgaaaggagagaaactgcatgtagccctcttgcccagacattctacaaatagtagccagaaatatgaggctctctccccacttccctccctgccaaactctcagcctaagcatggctaacacaaaacagattaccaatccctttcctttctccctgaggacagcagggctaggctgggattttccaagaggacttcgcccatggagaaacaggcatgaagtaatcttgtttgcagggtgtaggtttcctactgtgcaacagccccagtggctagactccacaccccaaccctccccaagacctgggcaccttctcccccttccctgtcctttctcctgcgggcttaggggtcccaggaatgagcagccagtccccctgctcatgccatgttcttctctcttgtcctggtcacaccggtgatctaccaggggccttccaaagacccggcctggccaatacccctgtcaccctggtggggaggaaaggtgggcagctggctttgtccaccccctacaccctgcttctttctcagaccacctaaggctcccttctgcctgcaacttctctcccctcccagcgaccccctaagtgctcactcagtgccttgggtgatggggtggagagctcccctcgtcacatccccgcacagagcacctagtttcctctgctgggtgttctcagccaccgcctgtgcctttaagaactgccaccctgtgccaggggcttgacctcagcatcctcagctgagttggattaagggaccatttcgtgcctttgtgaattcctcctggctgccatcccttcccccacacagagacagagtagcccataggccaaaccactctaccaaggacagcccaagaactggtctagcctggcagccttttccctcgggtagtagaggctgcccctctgacagggagtttgtggtcagcgagtgggcccttgggggtcttgggctgtcacagggactccagaaagccatgcagagccttgtgccatgaaggacttctcagatgtcatcctctgcatggaggcaa

SEQ ID NO: 8476 - DNA, 2300 bp, Homo sapien
cacattgtcatttattaactttgcagtcctggaaagtcatttgacctctctaggcttaaggtccttcacctataaaacagaggtaataggccgggcgtggtggctcacgcctgtaatcccagcactttgggaggctgaggtgggcggatcacttgaggtcaggagttcatgaccagctcggccaacatggtgaaaccccgtctctactaaaaatacaaaaattagccaggcgtggtggtgcgcacctgtaatcccagctactcaggaagctgaggcaggagaattgtttgaacccgggaggcagaggttgcagtgagccgagatcgtgccactgcactccagcctgggcgacagagcaagcctccgtctcaaaaaaaaaaaaaacaaaacaaataaaatagaggtaatagttactacagcatgatgttatagaaattaactgggataatatatataaaacccttaacccagtgcctgggatctaataagtacttaatgagtggcagttttggtttttcagcagaggataagcacaggctggttgacagcagtggtcaaagactgagggtggtgggcctgtggacaaacagccttagagaaaggctacctgaggcttcggggctggatgcaagggcaggtgctctagttgtttcaggacagaagagtgatgagatcagatgcaaacattgcttcagatggtgtagggctggcttgaaagcgtttggctggaaaggaggcttggagaaaggctgctgcagtttgtccggggtccagattcagtcagagtctgggtgaggacagtgactgtagagatcaccactcctcacatgcccactctcactgatcacaagcagactgcctgtggttcctgtcccctgccccctcctcccaccacactgctggcacacaggggagggggcaactgtccccatccctctctcattagcatgaaattgctgctttgtcggtggcctggggtactgccatacgtgtgtcctggacacagtccccatgtagctgtggtcatgtgtgcgtgtacatgtggggatgagcacaccagaaggaacagaaggagcccacagatgagtaacagcatacactgctgcctcttggagtatttttaaatgctaaaaatactggctaaaaatagccagcaagctccaaacaagatactttctctaggcagattcgtgagcttccctgttaggtggaggggtggggcatcagaaacgaaatctaaagacccctgatcttccagcatggctgtgcttgacgccagagtagaacactcgccccatgccagctgagcgcctatttccccactattgtattgctttctccccagctccccaaaacaagtcaaatttgagaatgggagagccggagctgggtaattggttagaagagaccagaaaaggttcttttcaggagccaaatgagaaggtgacctattggaccttataaaacatgagcactgcctctcttgaaagaagccaaacaggactgttttgaggagggcagctcagcccctaggccgtgaaggtccatcttcttaacctgggcacattgacctccacagactgcatgagtttgggtcttcacgaaggcctgagtacccccggaactctagacaaaagtttgtgcatatacgtatttcgccctgaagagagaagagctttcatcacgttctcaaaatggtttgcagccccctcaagagttaggaagtgtaatggtgccttgggggaagctcacccggttgccactgggtcttggggagacgtcctctgcgggccccaaagatcacttatcccgagctgagcctcaaccccgaggccggccagggcctcagggctccggtcctgcctcccccgcgggcctgcctggccgggggtcagcgggctgggggcgccggggagcgcggggaaggcccggcgggggaggaccgaccttgtcgcctcgttcgggtccgcgtgccggcgccgggggcggggtagaggcgaggtggggcggggcttagggcctggccccgccccagcgctgacgtcgcggggcccgaggcgccggcggggccgccagtcggccggagcgcgagagccgggacccgggctgttggcggcgcacgccggggaggttgaggcggaggagcgcgcgttcgggcgccgcggacgctgtcctgtagcggtctcgccggcctcggcgtccggactgtggcaccgcgcggggactccccccgcgcccccgctgccaacgttaagcgagggccaaagcccgccgcccgccccccagcatgcgcacctcgt

SEQ ID NO: 8477 - DNA, 2300 bp, Homo sapien
taataatagtggtctatctcagttgtgaggattaaataaaataatatttgtaaatttcatggcccatagagttcaataaacattgatgattatattgaatacttccacttcttattataattagtggtattattaataatagcgccttaccaggtgaaccttcctagggagaaaaggagggttactcctggggaagtgttcctttctctttttttttttttttttttgagacggagtctccgtcgcccaggctgcagtgcagtggcgcgatcttggctcactgcaagctccgcatcctgggttcacgccattctcctgcctcagcctcccgagtagctgggactacaggctcccgccagcacgcccggctaatttttttgtaattttagtagagatggggtttcaccgtgttagccaggatggtctcgatttcctgaccttgtgatccgcccgccttggcctcccaaagtgctgggattactgcactttgagccactgctcccggccggaagtgtgcctttctaatgccagagaacagtcccttggttttctgaactgaccatgtcccataactgggaagggcaaacaaggcttgccatcttcctagacgtccagtccaccaagcagagaaaggccaagcccatctgggctccttccccctttgcctagaaaaatacggcaagtgcagcttcccccaggccaccaggagaatgcttggcccctctggggtggttccactctacctgtgggagggctcaggattccagggccacagagccgggctgggcagggtcacaagaggaaggaacggggttcttagcctctctggccttggtgcacttgtctgctcccaggacgtttctcgatggctctccccgaggactgggagtacccagcctggtgcctccaccctgtcttagcacaggctactgactcagcccaggtcctaatgatgcacttcagaggacgccctcattccagtcctcattctgactccagtctgacatgcatctacagcatcaaaggagggggcctgcctcgaccttagcccaatcagctctcctttcctctgctttacgggggtccatctgggggatgttctcatgcccattccaggggaggtgagcagcccctaccactacctccagctcagtcccattctaaaggcagccaggtcaggaggtaggatgttcactcttcagggaagggctagaatgggttggctagggcttcccttgactgttgagaagttgctctctccggagcaccgcgtgcctgcttctggtttgggactggtgagaatttcaaagctgcctctttctggtttgggattggtggaaaatctccccttccgcttaattgttgcccaacccccgcccctaaccccctttagcaaactgaccggggagctttaagagcagcgagtgagctgcacgcacacgtggggagggggtttgtcagtgtcgctcaggccacataccaccgatatacacggggcacagcgaggaggacccgccaaagcagcatttccttagaatacactgatcagcacacagttggctcttcctggcaccctgggctgtcagcaggcagccctcacacaactggcagacacagctggagcgtccctgcacagccggctctctccctatatttctagtgtccactctgcccagaatgtcgtggacaccttactttctgagctccaaaccggcactgatccccgaatcccccctcccggatccccgacaggtggcacgtacctgcctcttcttggagtatggacgagtcgaaccgggcacaagcatggagctgcgggtgagtcccggctggcgctggcgcggcgcagtgagcaccagctgacgaagagggctccccggcctcggctcctgcctgactctctcccacctccgccgggggcccagaagggacctccccgggaaatcggcgccacccagcgggcagccgcctcatcgcgcctgggccggcagagccacaccccgcgtctcgcgtcactgagtcgcgtcacggctattggcttgttcctactgtggcgtcattagagcccggcctccggctggggccacccaggcaaccgatatacacagagaaccacgtggaggaaaagcacgcgagtttggagcgggtggagcaggaacagaggtggactggaatgtcacacgacggggcagctggaaggtattgggaaagaagaggcgtcatgggagaaggctcggaacttgagccctggggcgtatcaactttcagtttttagggaaggctaaacgtcccccactccc

SEQ ID NO: 8478 - DNA, 2300 bp, Homo sapien
ctgctcaaaacaaacttgtccaacccacagtatgcaggccacatgtggcccaggatggctttgaatgtggccccacacaaattcgtaaactttcttaaaacattatgagttttttttaaagctcatcagctatctttagtgttagtgtattttatgtgtggcccaaaacaataattcttcttctaccataacccagggaagccaaaagattggacaaccctgtttcaaaaccttccagtagcttcataaaagccaaagtcctcagaatggccttggggacctacaggctgggtccttctctgacctctctgatcgcgtctcccactctttccctatctttctctctcttcactccagccacattgactttgttcttcctcgaaagtggcaggtcgctcccacctcaggacctttacttttactcttctctctgcctagaacattctttccccacacttatgtgtagttcacgcctagcctccctcaggtcacttgaatgttaccttctccgaacgcacctcctccttgcttgatgtgccccatagctcttagcatcatctaacatattacatattctacttatttagtcctgcttctactagaatgtaagctccctgagggcagggattgtgcctgttttgttccctgctatatccccagtttctagaagagtgactggcatgtccaatatccatctgtaaaatgaagtgatggaatgagggccctaaggaaatataacatggtgaaaccccatctctactaaatacaaaaaattagctggggccgggtgcagtggctcacacctgtaatcccagcactttgggggtctgaggctggtggatcacctgaggtcaggagttcaagaccagcctgaccaacacggtgaaaccctgtctctactaaaaattcaaaaattagccaggcgtggtggtgggctcctgtaatcccagctactcgggggaggctgaggcacaagaatcacttgaacccgggaggaggaggttgcagtgagccgagattatgccattgcactccagcctggacaacagagcaagactctataaaaaaaaaatcggcctggcgtggtggcgcacgcctgtaatcccagctacttgggaggctgaggcagaattgcttgaacctggaggttgcagtgagctgagatcgcgccattgcactccagccttggcaacaagagcgacgacactccgtctcaaaaaaacaaaaaacaaaaacaaaaacaaaacaagagttgaaatcaagaagggaatcgtgccttggacaagaacaggggtgcctctttcactgctcctgataagaatggattcagacatgtttgtaggtagaaatttaagaattcccctcttgattgcgtctgatttctctgggaaatagaagagaaggaaggacttgaggagagtagcgatggagagagagatctatggtgaagatgggaggagttaacggcagctgcaagggttgatggagcagctgaagttgaaaacctggattcgccttggtacccagctacctggttgtgcgattttcctcatcaacatcgggggagtcgggagaaggttacataaaaggaatgggagcagcaaaaattcaagttttgtctcggctttttcttgaaaagaccaaagagaattctttcattgactcagtgcctccgtttacccactcaggcattcatcactaatcactggtcccatgaaagtaaaatgagcggagagtgtctttgacagcagagaaaaagagaagaggctgaggaacaggacctcccccagcccagtgagaaggggagtgggggacgtttagccttccctaaaaactgaaagttgatacgccccagggctcaagttccgagccttctcccatgacgcctcttctttcccaataccttccagctgccccgtcgtgtgacattccagtccacctctgttcctgctccacccgctccaaactcgcgtgcttttcctccacgtggttctctgtgtatatcggttgcctgggtggccccagccggaggccgggctctaatgacgccacagtaggaacaagccaatagccgtgacgcgactcagtgacgcgagacgcggggtgtggctctgccggcccaggcgcgatgaggcggctgcccgctgggtggcgccgatttcccggggaggtcccttctgggcccccggcggaggtgggagagagtcaggcaggagccgaggccggggagccctcttcgtcagctggtgctcactgcgccgcgccagcgccagccgggactcacccgcagctccatgctt

SEQ ID NO: 8479 - DNA, 2300 bp, Homo sapien
gcaaggccagctgcatttttcataaaatgccctagaaacctctgcagtttaccaaagtgaatagctcctttggacttaaccatctgcaaggctcattccagttagagtgttccatcaccctaaatgctgggaaaccaagcgaatctcctcccacttgcaagcttccaacagtggcttccaacagtgccactgcagtatcagaaactgcagggaaggtgccagggctgacttccatgaagaaataggagaacaggcaggcagacattggggaggcccacagaatgtcgtgatcagaattcataaagaggctggcaggatacaaatcaatcaaataaacgttagttcaaaaaaattcactacacctgtgagtgagagaaagtcatcagcactgtctctaaaaatgagcctagggcttctggtgacatccaatcggtgggttatcaggagtgccccaggtgatcaggagttggcctcgactcagtcctttttgtgctgtctcctcctctttcccagagttcctctctctcttctcccactaggcagggatgagcaagaggaatggctcacccttgagagctggggtccatagcccaggtcagttctccagctctcccacttaccagccaagacaggaggtgaggattgagatgggatgaacccagcaggcggccatgggttaaaggtcgccatgaatgtaatgtgcccagcacagtgcctgctaaaaggcaacactcccttcctggtctgaagaccaaacaagcagactgtactcaggaaagccagaagaaccttccagctgtctggaccagaaggtgccagcccaggggctgaagaagacgtaatgcccagagcaaaaagcgcctgcagccccctgaagggctgggtgctctggaatagatgagggggcgaaatggggctggggaccagggacggacagggtgggtccagcacctgcctcgcttccgaagggctgctccaacactgaaaaacacccaaccagcttcctttcagaaagactggaatattccaaaacttctcactggaggctccggaggaggtgggctccagctgaaaaggaaatgtggaggcgtgggcgctcccggcctgcatcctgcacctcttacactttggttttcccacagactcctgaagaataggtcagaagaaagggttaaagccttaaaaggggaacaaccattgcggggctcagggaggaggataatgttctttgggctgccgcaccctgatccccggggtcccgaaccctcccgtccctggccaggcctgccagccacagggtgagggcccccttccgccgcaacctgccactctcacaccaatgcgggaccgccttctcttccttccccaccccccaccccaccctgccgtcctttctcccccaatctccgcctctgattggctgagcccccggctccccgctccccctctcctccatccccggtgaaaactgcgggctccgagctgggtgcagcaaccggaggcggcggcgcgtctggaggaggctgcagcagcggaagaccccagtccaggtgggaactggagccggtgggacctggggctcggggaccgccgtcaggcgcccatgcaagacttcccaacactaggcttcgggccacggtccgagggcgcccagggaagaagggcgcagagcttagggaggggcctgctttccaggcaggggcgggagggggatgcttctgcagggcaggggccgcgtggcaccctgatgtctttcggggaaggcgctcccgggctttcgcccgctgggggactggtgtctggggctggggcgctggagaacagggaggaagggcaccaaggacagcctgtgggtctacattccacccagacgtccccaaacccagctcgcagaggcggggaggaggacggatgaaactgcggggagaggatggaggatggcgagctagagggaatctgccgggtgacctcgcggcgggctgggtgcggggcaccggaggagaaggaagccgcagtgccgcaggcggggactgggtggaaggcgggcggacgggggaggggagagctggaaaaggatgagagagggggaagggggactcatttgggaaaggagaggattggaatacggaaatggattaaggatgaggcccgccgggggcttgagagggaggaagagcagaccttctctgggtctggagccgcctgaggacacagaccagaggaaatgaatacagactgcacctccccagccgctctccacccctcccctggctcttctaccctctccagccccagaccca

SEQ ID NO: 8480 - DNA, 2300 bp, Homo sapien
aaagccttgctggtttcagcactccgatcctatccacagtaaatggagttttaaaatctcctccctccaccaccttgtgctctatcccctgacctcagatgtctaatcagagccattaattccatccaatcagagatcttgcttggcagacacagaattgccacaccttctacagtctatactcccctcccctgcctaaaagcaaggtgcttggggacccagaaattaggccaggtcctcataaccttatcaaaatagcactgctaggccttccacccagcaacactcagagacagggccaaagagtgggaaacggagcatccagggcctcagccagcagagcccagatgccttctgcagttaagatccctggactcagaatcagaaagctgttaagcaggaaggagtgcgctgccatgaagaggcagacagaagccagagccagtgtgtctggaatgcatcaggtagatgaatgggaagatggctgggatggagttggagggaggagggaagtcagcagccaggggccaggacattcatggccttaaaaagtatcctacaaacaagaagccaggttagctcacctatgaagagggacagtcttaccagatcatgtgttagagtccccagatcctggggagcgtgagaaaagtgcagactcagctggctctagtactagattaaggaggtcctaggtgggcaaggccagctgcatttttcataaaatgccctagaaacctctgcagtttaccaaagtgaatagctcctttggacttaaccatctgcaaggctcattccagttagagtgttccatcaccctaaatgctgggaaaccaagcgaatctcctcccacttgcaagcttccaacagtggcttccaacagtgccactgcagtatcagaaactgcagggaaggtgccagggctgacttccatgaagaaataggagaacaggcaggcagacattggggaggcccacagaatgtcgtgatcagaattcataaagaggctggcaggatacaaatcaatcaaataaacgttagttcaaaaaaattcactacacctgtgagtgagagaaagtcatcagcactgtctctaaaaatgagcctagggcttctggtgacatccaatcggtgggttatcaggagtgccccaggtgatcaggagttggcctcgactcagtcctttttgtgctgtctcctcctctttcccagagttcctctctctcttctcccactaggcagggatgagcaagaggaatggctcacccttgagagctggggtccatagcccaggtcagttctccagctctcccacttaccagccaagacaggaggtgaggattgagatgggatgaacccagcaggcggccatgggttaaaggtcgccatgaatgtaatgtgcccagcacagtgcctgctaaaaggcaacactcccttcctggtctgaagaccaaacaagcagactgtactcaggaaagccagaagaaccttccagctgtctggaccagaaggtgccagcccaggggctgaagaagacgtaatgcccagagcaaaaagcgcctgcagccccctgaagggctgggtgctctggaatagatgagggggcgaaatggggctggggaccagggacggacagggtgggtccagcacctgcctcgcttccgaagggctgctccaacactgaaaaacacccaaccagcttcctttcagaaagactggaatattccaaaacttctcactggaggctccggaggaggtgggctccagctgaaaaggaaatgtggaggcgtgggcgctcccggcctgcatcctgcacctcttacactttggttttcccacagactcctgaagaataggtcagaagaaagggttaaagccttaaaaggggaacaaccattgcggggctcagggaggaggataatgttctttgggctgccgcaccctgatccccggggtcccgaaccctcccgtccctggccaggcctgccagccacagggtgagggcccccttccgccgcaacctgccactctcacaccaatgcgggaccgccttctcttccttccccaccccccaccccaccctgccgtcctttctcccccaatctccgcctctgattggctgagcccccggctccccgctccccctctcctccatccccggtgaaaactgcgggctccgagctgggtgcagcaaccggaggcggcggcgcgtctggaggaggctgcagcagcggaagaccccagtccaggtgggaactggagccggtgggacctggggctcggggaccgccgtcaggcgc

SEQ ID NO: 8481 - DNA, 2300 bp, Homo sapien
atccccctaactttaggggatgggaatctctccctcatcaacagggtgaagaacataaaatcaaaacaaggtgataacctgacagctatgttcagagtaccccggactgtcctcgttttacttatttcaccgtgaaccagggaaatgagtctagcagagatctgagggtccgccctgggagcactggagagcacagtgggaacatggagtcaggagacttaagatctaatagtccagaccatgcttcaaaatatttgtctgaccttgacaaatcattacctttctcgggcctcaagtcccagctataaaatagtggggcaagccaggtgcagtggctcccacctgtaatcccagcattttgagaggccaggcgggaggattacttgagcccaggagttcaagatcagcctgggcaacatggtgagatcccatctctacaaaaaaaaaaaaaaaaaattaattagctgggcatagtgtcaagtgcctattgtcccagctactcaggaggctgaggtaggaggatcacttgagcccaggaggtcaaagcttcagtgagtggtgattgcaccactgcactctagcctaggcaacagagtgagaccctggctcaaaaataaaataaaataaaatttaaaagatgggaccactgtagtcacctctgtgattctagaaagacaatctgatgaaatgagggaatggctggcagtccctaggtcatgctaaaggactgtgtgtttttagaagagtttttatccccatatgtttctgggtgggaaaacaggagatggtgggaaaagagagatctaagagaccaacagggcagccgcagtcttctggcaggaagtcttgccttagctggattcctctaaagccttgctggtttcagcactccgatcctatccacagtaaatggagttttaaaatctcctccctccaccaccttgtgctctatcccctgacctcagatgtctaatcagagccattaattccatccaatcagagatcttgcttggcagacacagaattgccacaccttctacagtctatactcccctcccctgcctaaaagcaaggtgcttggggacccagaaattaggccaggtcctcataaccttatcaaaatagcactgctaggccttccacccagcaacactcagagacagggccaaagagtgggaaacggagcatccagggcctcagccagcagagcccagatgccttctgcagttaagatccctggactcagaatcagaaagctgttaagcaggaaggagtgcgctgccatgaagaggcagacagaagccagagccagtgtgtctggaatgcatcaggtagatgaatgggaagatggctgggatggagttggagggaggagggaagtcagcagccaggggccaggacattcatggccttaaaaagtatcctacaaacaagaagccaggttagctcacctatgaagagggacagtcttaccagatcatgtgttagagtccccagatcctggggagcgtgagaaaagtgcagactcagctggctctagtactagattaaggaggtcctaggtgggcaaggccagctgcatttttcataaaatgccctagaaacctctgcagtttaccaaagtgaatagctcctttggacttaaccatctgcaaggctcattccagttagagtgttccatcaccctaaatgctgggaaaccaagcgaatctcctcccacttgcaagcttccaacagtggcttccaacagtgccactgcagtatcagaaactgcagggaaggtgccagggctgacttccatgaagaaataggagaacaggcaggcagacattggggaggcccacagaatgtcgtgatcagaattcataaagaggctggcaggatacaaatcaatcaaataaacgttagttcaaaaaaattcactacacctgtgagtgagagaaagtcatcagcactgtctctaaaaatgagcctagggcttctggtgacatccaatcggtgggttatcaggagtgccccaggtgatcaggagttggcctcgactcagtcctttttgtgctgtctcctcctctttcccagagttcctctctctcttctcccactaggcagggatgagcaagaggaatggctcacccttgagagctggggtccatagcccaggtcagttctccagctctcccacttaccagccaagacaggaggtgaggattgagatgggatgaacccagcaggcggccatgggttaaaggtcgccatgaatgtaatgtgcccagcacagtgcctgctaaaaggcaacactc

SEQ ID NO: 8482 - DNA, 2300 bp, Homo sapien
ctgcactccagcctgggcaagagagcaagaccgtgtcccccactccaaaataaagtaatttaaaaaataaaaataaaaaagaaacacactgggatggtgacttgcaagaaatagaaagaaagcttcccagactggctcaagtgacaagggagacattgcaagggcaaggtgttggggctcttggggatagataccccaaggaaggaagggaacaacagctgatccacgcaggagcccgtatcagggagggaaacccctccctctccctctgagacttccataattgagtctatgaaataaactgacagcaggcagattaacaggagaaaagatagatgtgttttttgtgtgtacaggagcgtcacatggaggaaaactgcataccccaaacccagcgagatctagaagctgagatgcattcttcatagaggagggagaagggggatgcaggcaagttaggggagagtatacaaggtttggaaaaatgaatgggcccttaagagaataagcgacagtctaagtctgcctgggtgggtgccccctagacccccagtttcctctctctcctgtgataggagccagtcttctctggttgatggattcctggggagggactcacgacaattggcttctttttggaggacctgtctttaggcagttacagggagttcagagagagagagagagcccctgacctcatttactgtaccccaagtgctctcagtttgaggtaatcagcataccagagctgaagagctgaatattttggggtgacatttcctgaactttttttttttttcagaaaccagggaagccagaaacccaacctactttctccatctctcaaggcctccccagtagccaagacttctctgtctcaagggtctcacatcccttggggaccagcctccccagaggtaagggacagtttttcccttttaacttcagctcatgctgaaattaaatcctttctttagttcttttagcgctgccaaagacaggctggtattttcaaatataactgtatctgttaaaagctagaaaatagaaatagaaaatacaaatagcagaatcagttttccaaagggcagattctgagtgctaggaatcctggaagaagtagaaactctgttttctaaattccaagctacacaataacttttctctaaccttccaagagctgggacaattctacccctgcccccatgagatagatgcctcaggtggaatctatagaagcagaattgccccaatctttttgaggaacccctttgagaatagagcctggcacatagcaggtgctcagtaaatatatggcatcctattttccatcaagtggaacagtttagcaggatatttattccctcctgggaggaataagaaagaccccccaaaaacaaacccttctgtaaattaaacctcttggatctaagccttccctcatccccattacctaagcttcatccctaaatcttgccagtttcataagaggctggataatgtttttgaaatagtaaacctccgtgttcctattgcctggtagccctgcacccactgagtcaatgacatcgatgcctctggggagggcggctacagcctagaacaaagaagtcaattgagttgctgaatggattttttttttaactcgaggcagatgcagatacaatagtctatgggcaaagcgattttgatttgcaagagctagagcttaagagagaaacagtttagctttaaattccaagaaggcttagtttaaactcaggactgatcattgaatttctgaaagttaaccatagagtgtctgcagatgtagtaggtgtttaagtgttgattaaatcaacctttctccacgtgcaaaaatccatctatgtgactaaacttttattctcatgcaatgctttaatgagtagtagtggttaacattgtgattaccttgtgctacgtactgtgctaagggttagataactcatttaatattctcaacaacctcatagaaatggtagcacgattattcctacgctcagatgagctcatgtcgattgcctgctacccagctataacaatgcctctctttcaatcagttctctcacttctgtttccattgctccttctccatccaggttcttgtgcgtgcgcttctctctgctgggaagatccattgacaccttgtctctttggagaaatcagacccccttgttctgaggcttccagagacaagtaatcatatccttttccatgccccagctaaacctgtgcacacacaggttttctttttgcactttatatacagaacattactg

SEQ ID NO: 8483 - DNA, 2300 bp, Homo sapien
gcctgggagttcgaggctgcagtgagctatcaccacaccactgcattcatgcctgggtgagagtgagacccgtctctaaaaaggaaaaataaataaaaataaaaataattaggtaatcaaaaattccttccctaaaggtaatgaactctccatcatttgaagcattcaagtaaagactgaataaaacctgtcagaggtataaaaggagattcttacaatggatcagagttggatgtgacaaccctgaggtccttttccatgtagttcacatgtacacacatttcctcaacaagggaccatggctcaagatctcatgaaagggcttagtgactaattaaatacaacccccacaccctgtgaccacccacttagtttcacactgctagtccttctcttctcaaagaccccatctctgtttcctctccaccaccacatctcagcagctcaggctgtcccaagagacttgagtgaagacacaggcaaagacagagcaggggcttccgggctgagcctcctgcccaggtgtggactctctggacccatccagggatgaaattaacacccacagcaacagacatcggtgcagccgttgctgtgcatgaggcacaagggacctaaggagaactggccatttgagttccaactcagagcttgcagtgaaattggagggaggaagacaggatacatgatggaaccaaaaaaatcattctatttctataaaccacatgtgaaaatcagccagatttcttacatctaagtagaaaagtagtaatccaagatccacactcaacaacagatgagtggggacaggcagaggcactctggggacactgaggaaggacagtgatgttaaaaataatagagcttggcgctgcggctcagactgcggctcagtcccagcactttgggaggccgaggcgggaggattgcttaagtccaggagttcgagaccagcctgggcaacatagtgagaccctgtcctattaaaaatgataatagtagctgacaataaaaacaaaagtggacatttccagatatggtcagattgtccttgtttggccagtgtcaccagcagctgtgtccccattagggggcctgggtgcccagggaagttaagaggagataagctccctctgttcctgtagatctctgcccacctcacctctgatgagattgttatatccttgctatctataaaataggacattataatgtttgttaaaaaaaaaaaaaaaagtaactcccaaatttctgagtttcctgtgtgttggggctggggctaagaactctatgtacatcatctaatttaattctcagtaacacagatgatctcttgatgtccctttaaagctttggggtcactttcagtattcagataaaaacagttccatgccgtacagtctccaagatgcctaagaattgccaggacctggcattttcatgatttcctctcattctgatttcctcttctctctcaatcctgttctgactcttgagtttatgcaattttttgggttgttttttgtttttgtttgtttttttcttcttgttgacctacagaagaggagataccaaaaccagacttgggagacagggggagtccaggaaggcttcctggaagaagtggcagatgggatctgtctcgtcctgaattttctcccaaaatgttactaacctatggcagaacttgtaagataattttcctagaagttggggaataggagggaccttcttgaagcctaacaagtgactcgaaatttaaaaatcagacctcttgctcttgccagttcctcctgaaccagtcacatcttctgggttctgtcttcagcctctgcactccaatcccgtggctgacccccctctgccatttccgggttctcattgcttcctgctgaaatggcttttgtctttggagaagttcagccccattctttggccttcccagtttcactctggtgggtagagagctttatctgacacaatcaatgggtcattttccggaacaaagatccctgtctccctggcagcaatgaacgcctttctctagaatacaaaagcagctagagacacacacttgactcacagcaatcgatgagaagcagggatcgccatttacataagaggagactgaggcatagagcaggtaagaagtttgctgaggctgagatcacaaagctgctaagtgctgacatctagatttgaaataggtctgtgggctccagactatccctcttaactgtgacacgagctttcaaagaggtgaggcttgaggaaagcttggagggagggaacagacagac

SEQ ID NO: 8484 - DNA, 2300 bp, Homo sapien
ccttctgggcttgccctagacccgcagcctagtggctctgaccgaggccagctgtggtctctggtgccaccctgtggtggtgccaggaaccatttcccttagcctcaccttagggcctctttggcccgtggcatggccctggtttcagccaccttcccaggccctgtaaggcaagggaaggggcagtgttggccaaagaacagtactgtggcccggccccactggcacagaaagccacccacccagccttctctcctgtcccacctgcttcctttctcttcttttcacctttcctgcctcctcattttggctgtgtccacggggcatacagatttgcacactcatgttcatcatgtcggcacaggcatgcaggccctcccagcatgtgctctctgggtggcaggcttgctatgacggcaagcgtgtatgcctgtgcatgtgcccacttgtgtgtactcgacattgccacgcacgcacacacgcacatgctttcacccccatttctgccgtccttgccctgtgcttgtgccctgccatgctggtgtcttacacttataacccaggctggcagcactgccaggcccccaccttgccctgcaggcccagaccacagccaagaaccacagccctagtttctggcaccttggcagctgattggcactcacggggcatctcctgagccagtgcctgggaacctgttttccctgtgccctgcaggcagacaaaatcaggtgcagaacacctaggtggctcctggttctgggtcttggaagccaagttgatagtgttggggcagagtgactgccaggtgtctggcagaggggtatcagtgacatttgcacacgttctatgtgcaggagaagcaacgatgcatcattgctgggtggcctcaggcaagttctttaacctctgcaagcctcagctcctcagatatccaatgagaatgaatggcatacctcctcagggttgtggctgtgaatggcatggagtgggcagtgtgctgcagctggaactggcacacgtgtctcactgcaccatgaatagggattgagctgggccagcaccacaccaaggacagtggggatggaagaccctggtgctgtgggtactgccctctgcctctcctcttgcctgtctctcactccagctaccaacgctgcggcatgttagggctccaggatgggtggagtgctgcggggcctcgaactggagctgctcaaacctggggtgcagacagcctgtccttcctggcctctcctttccctgcctccctcccaccccctctacaccccaggagcacacgctgatgctgtcccctccatctcttttcctcacccagaattcccctacaccccgtctcctcccgaacatgggcggcgcgccgggccggtgcccacggccatcattgggggcgtggcggggagcatcctgctggtgttgattgtggtcggcgggatcgtggtcgccctgcgtcggcgccggcacaccttcaagggtgactacagcaccaagaagcacgtgtatggcaacggctacagcaaggcaggcatcccccagcaccacccaccaatggcacagaacctgcagtaccccgacgactcagacgacgagaagaaggccggcccactgggtggaagcagctatgaggaggaggaggaggaggaggagggcggtggagggggcgagcgcaaggtgggcggcccccaccccaaatatgacgaggacgccaagcggccctacttcaccgtggatgaggccgaggcccgtcaggacggctacggggaccggactctgggctaccagtacgaccctgagcagctggacttggctgagaacatggtttctcagaacgacgggtctttcatttccaagaaggagtggtacgtgtagccccccttccagagcctctgtctgtgaccgctcctccccagcccctccccgcacgccccctgcccaccccccacctcccactccaggagctgaacagagacttgcccagctgcccaaagccagccccgaactcctggggggccaggggagcccagggcagccacgacttggctttgtgttttatttcctccctctcctccgcccttccccatggtgttgtgttcgactgtggctttagtgttactgtatcttccctttacgggccccacctgcctgccctctgtgtagggagccctgttctcgtcttgtgtacctgggcatccctccagggtttggggagccagcctcccccgcccccctacactggaatttgtttgtgtttcttcactgggggtggagggctcaagggg

SEQ ID NO: 8485 - DNA, 2300 bp, Homo sapien
ctattgcttaccttcattcctttgctcgtgctgaccctctaccttaaatccagtctcttttatgtctctgccctccagcacttaccttggtctgatagatgactcaccgagaccctgtgttcgcttccctgaagcctttacaccaaccccaccccgggctaaactgggcactttttctgtgacccaccaaacccacacaatcccatattaaatatttgtttacgacatccgtttctatgtctgtcttcccccacccttcaactagattgagttccttcaggacaatgatgatgtctctgtatccccaagccaggcactgtgttttgacacaaagaaagcccaggttacatttgttaaatgtaaaagaccatacagtgagtgggtgagtgttcatgacaatgccagatctgactacttccgcgagaaaccgagacactccagggccggattccagacagtgggaatatggcgctgtctttgccccttctccagtgaggaaccagaatttacgtgttatcagaaacagccacttcccctctgctcctgcccgcctagagggctgggcaaagggtagagggagcagtgtccggccagggtctggggagaattcggctctccttagtgggaaactctgtctgtcttcctcccccagggggaggggatggggataggaggaccagagtaaggggaagagggaaggcccggagggcgcagtcgccttggcagaaatcctaccacacccggatgtagtgggtggtgaacgggatggggcggagagtccctgccctgccagggacactgactggacgatccactttcgcgggaatcccacaaatctctcaaaactaaggtcctggaaactggaggagagctcgttttcaggctatgtttgggcaagggcggggcgcggggtgcttcaatttttggaaaaggaacccccgaagggagcagggattagaaaagaaactctaccagaaacctcagtgggcccgtctcacccactcatgcccaccactgacttctctggcagctccccgtcgccccgcgcaccgctgcctctccgtggaacgtccaagtggtgcagaggagagggatctccggagactgggttctgttgcgagctatgccacgttccgtcccgggcggaactcttctttgggcctttgtttcctcgtctgtgaaatggggccagggtgggagcagagggcttgcagaagccctgccagctcccacgctgctagccgggattctccatcccgccctctcctccaccgccgcccccggcccggtcctaactccacccccacccgccgcgcctcggcgccgccggccgctaggggtcactgcctgcctttgtcagcggaggaggagggcagcccgcgctccagccggctccccagctggaaggcggccgaggggtagctcccgagcgagggtcctgagccggaccccgcagcccgcgctcgcgatccgcctctgcttcggtcgggaaggcgcgtgcgctcgggctccgaccgggccccggcgggcgcgcatcgaggccaggagggggttaacgctaacccctcccctctggctgacatcacgggcgagcgggtgagaggctggagctcggcgagtgagagaaagagagcgagagcagcgagcgcggctccacattgttgcggatcgccggcacccggcagagcggcggcggctgggacgcgcggcgcctccgacccgttctcctcgcgcccggccgcgcagccagagccacccgggccgccgaccgccgagccccgcgcccgccgcctgggccccgagccttctgcgccgcccgggtgcgtcccgccaccctcggaggacggccggccatggacgcctgcaagttggagccgagcgggagggtgtgagcgggccggggccaggagcccgcgccgcgcaaccgggcagccgggcgcgccgggggtgggtccctctccccagccccgctctgcgtggaagaagagggcggggaccggcgccgggaggagagcggaggaggcgaaggggcatgactcgtgcaacttgcggcgggcatctgccgagcctctgagccggcggcggcccggggcccggactgcggccgcgcggatcccacccagcccaccccgccccggccgacggctgcagctgacctggatccttcgagcgcccgccgaccgccagcgatcttccctcatcttccgggctggtttctgctgcgcgaggagcgctgccctcgccgcccctctcgccggacccccggcccccgatggctcggatggggcttgcgggcgccg

SEQ ID NO: 8486 - DNA, 2300 bp, Homo sapien
cgtgggggcggctcctctgcctctgtgttgttttttcgtgtggctgctgggagtgtgtctgctctaggaggtggtggccggtgagtcagacagtggagtgaccatccactcctccccgatgctagcctgcccaccagaccagggactcgtccacaccctcaaaggcccctgcgctaagagacaccaggccacttcatcctggactctgtggggcacagggctgggctaacacctaggagggcatttgtttattctttgagtatctgctgtgcaccaggacactgataggcgcaggtgatgaagatgaagaatgagggtctcaggcacatttctcctcttgctcaggagagagagagggaaggacagggaaagtagaagacggggaagtcgaaagagaaaggaatggggtggaggtggctgagggaagtcaagtgtcgagcagcagatctgtttgagttagggggtctgcagttgagtggcccctgccatagcagctcactccactgcctggatccctgggccatggaggccaacactgggacctcatcccctcaccttaggctgccagcagtggctgggactgaacccggaagtagcgagccagagctcaatccccaactctgcccttatcggcatgtgacattgggcaagctgcttctcttacttcctgagtctcaatttccttatctgtctcagggggatacaaccacaattgatgtatggatcaaataagaaatgggcattaatagcaccttgtaaaggtgaagtgctaggaagtgttgtgcacacaatcgtatttacaagggcttagttcaagagggtggatggctctttgcagacaccttctccaccaagagctcaggaaccgagtgaatgctgggcagggcgtcatattctctgagaggttggggaaacttggatctgcctgggagataggggaagggctatggggtgactcatctgagccccaaaagtccccagtggctggctcctccttcccacctggctcctctgctgacccgaccctctgcttcctaggtggtgaccatcgctatgtgaacaactacacgaacagcttcgggggtgagtggagtgcaccggacaccatgaagagatactccatgtacctgacacccaaaggtaagagggagcccctcaccccagacctagtgtctctcctgctgcccaggggcccccaaagtccgtgcagtgactctcagccaggttccttctgagtgggggtgatggcatgtccagtttgcctgggaaagtcctggcatctacgtgttgtcctgatgtgatgatgaacaggtctgtgttagctctcagaagtgtcctggttcgaatgagaagttacctggtgccagctcctcagaggcattcctcccgggccacacaggcagcacctctttgccctccttgccttctcacttccagcccacacctctgcttctctttccttccggaggtctcctgggctcccttctgccaggccggtgctgtgttttgctttggctcaggttttgtaggggctgagccctgtgagatggctgccgaccccaggaccattctgctcccctaggcagggagagtggtccctcctcttctgagtttcctggctctgcaccctggcccccttggccctccctctcaggccctggacagtcccagcctgcaaggtgccggcctagcacagaccagtgcctgcctgtccttgccctgtggtggcctctcacattcttgggcgccagcaacaaaccacagcaatacccgttacataagggtgggtgtgccagccctcggaccatgagggtgtgtgcctgtgcatgtgggagagggaggctgggggaggagggaggcctgggtaaggcacaggggctggggagggggaagcctccgggagctaatcagtaattcacacacgtctttcacacacacacacacacacacacacacacacactcacacacacaatgggagaggcttgggggatttggagagatgagctcaacagaaaagcacctgtgccgccccacccagtttgaaaacaacccctgggcttcttggttgttgggctttccctcctctgacattcctggtgtgggccaggccccagccggccagcctgcctcctccctgcctggggtgctgtgcctttgggcaagttctgggagtgccggccccagcacccctctcctcagaacccctacctggcctcgccctggccctgtccctcctgtctctcccttccatccatggaccaggccctggggtgccatcgagtgccctgacaggctcct

SEQ ID NO: 8487 - DNA, 2300 bp, Homo sapien
tgccgggcccagcccagcagctgtgtggatgctgccactagtatgggccagattccaaactggtggctttgcagactctagcagacgtgacctagaactgcagccatgcctggagggaggacttgcctgtcatcatggccatgctgagcagtgctgagcccagaggctggacttggcctgttgagctgggctggggacggtgggacacagtgtctctgtgactcaccagctcccttgaagtcagctcttcttctgagtcatgctgtcccctcagaggtcaactgaatcatctcacagaaaacctctgaacctgagaaacaacatcgtcaagtccttttccacccagtccctttagggcctgaagcctgggcactttccccaaggccccacccggtgtcccaggcgttgcacggggccttgagagtacagccttgttaatgactgctagacgtgaataccccaaaggaaaggacccctgattgctctccagacacagcatatgattctttgggggaggagaagggggtgagggggataaaagtgtgcagaagggttggggttcaggaggccatttgtgcaccttggcgatggcaatatcacatggtgtccctgtgaaatgtgggggacattcaatcacacacaaggacagataagccatttcagcaagacaatcatttggcttcaaacggcactcagatcccgaaatcctccttctaatgacaatagtgatgatgctaatggtgatggtgacagctgacaatgattgagtgctcgctcgatgccgggcatttcactgagcttctcacgcacattaccttattttccctgtggggtgtactgcattttacaggcgagaaggctgaggctcagagaagcatcctttcaaagggcgcactgctcggtagggggtacggcggggttgaacactctgctgttcagtctcccatgccctctcatctgagaagctgcggctggcggtggctgcagaagtggggttgaggagtgtgataatcatcgtccctggggtacaaactcggcagggcagcccctccggtgaggtccggccaggcctgggggatggcctagactggggtggggtgagccttgcagaaactgttcaggctcctggccgctcactgtcccatttctaggtcacaatgctggccacggcctctgtacaggtgtggccctgcgtcctgtacgaggtgtgtggcgaggtggcaagcaggagcagggatgggcactgctgattcagtagcccacacctgtgcctggggccgtgggggcggctcctctgcctctgtgttgttttttcgtgtggctgctgggagtgtgtctgctctaggaggtggtggccggtgagtcagacagtggagtgaccatccactcctccccgatgctagcctgcccaccagaccagggactcgtccacaccctcaaaggcccctgcgctaagagacaccaggccacttcatcctggactctgtggggcacagggctgggctaacacctaggagggcatttgtttattctttgagtatctgctgtgcaccaggacactgataggcgcaggtgatgaagatgaagaatgagggtctcaggcacatttctcctcttgctcaggagagagagagggaaggacagggaaagtagaagacggggaagtcgaaagagaaaggaatggggtggaggtggctgagggaagtcaagtgtcgagcagcagatctgtttgagttagggggtctgcagttgagtggcccctgccatagcagctcactccactgcctggatccctgggccatggaggccaacactgggacctcatcccctcaccttaggctgccagcagtggctgggactgaacccggaagtagcgagccagagctcaatccccaactctgcccttatcggcatgtgacattgggcaagctgcttctcttacttcctgagtctcaatttccttatctgtctcagggggatacaaccacaattgatgtatggatcaaataagaaatgggcattaatagcaccttgtaaaggtgaagtgctaggaagtgttgtgcacacaatcgtatttacaagggcttagttcaagagggtggatggctctttgcagacaccttctccaccaagagctcaggaaccgagtgaatgctgggcagggcgtcatattctctgagaggttggggaaacttggatctgcctgggagataggggaagggctatggggtgactcatctgagccccaaaagtccccagtggctggctcctccttcccacctggctcctctgctgacccg

SEQ ID NO: 8488 - DNA, 2300 bp, Homo sapien
agggatgttagcatccagtggcttttagttgaaccttttcatgttacagaagaaacaaacatccagtgaggaagagtggggcttgcagcgctgagacccccagctgcactgtgagagcccctggcagagaagcgtcctcatagctcatgaagacccaggcagttaatggttctttcctttcttggtaggaatttggtgcattgatgagcaattactctctccccccacccctgcccacctatcatgtcctgctggagggggagggcctgggacagtcactaggcaacttcaaggacgacctgctcaatgtatgcatgcgccacgttgagaagatgtgcaaggcggacctgagccgtaacttcattgagaggaaccacatggagaacggtaggtcccctctcgtggctgggccccaaggccatagacctttctctcccaaatcaattcctgctgcctgacatgggctggcctccagtgagcttcttctcattgttcccacccacccacccacccttcctcaggccgtttggactaggatacagggattctaaccctcctcctcctttgaacttgctgccaaagttatgcaactataggaagagacctccagagcagggacatcctgggcactggctccacaaatgcctcctctctgtgggttgtccatcaaactcagagactggtttcgttcagatctacatctaattgccgggcccagcccagcagctgtgtggatgctgccactagtatgggccagattccaaactggtggctttgcagactctagcagacgtgacctagaactgcagccatgcctggagggaggacttgcctgtcatcatggccatgctgagcagtgctgagcccagaggctggacttggcctgttgagctgggctggggacggtgggacacagtgtctctgtgactcaccagctcccttgaagtcagctcttcttctgagtcatgctgtcccctcagaggtcaactgaatcatctcacagaaaacctctgaacctgagaaacaacatcgtcaagtccttttccacccagtccctttagggcctgaagcctgggcactttccccaaggccccacccggtgtcccaggcgttgcacggggccttgagagtacagccttgttaatgactgctagacgtgaataccccaaaggaaaggacccctgattgctctccagacacagcatatgattctttgggggaggagaagggggtgagggggataaaagtgtgcagaagggttggggttcaggaggccatttgtgcaccttggcgatggcaatatcacatggtgtccctgtgaaatgtgggggacattcaatcacacacaaggacagataagccatttcagcaagacaatcatttggcttcaaacggcactcagatcccgaaatcctccttctaatgacaatagtgatgatgctaatggtgatggtgacagctgacaatgattgagtgctcgctcgatgccgggcatttcactgagcttctcacgcacattaccttattttccctgtggggtgtactgcattttacaggcgagaaggctgaggctcagagaagcatcctttcaaagggcgcactgctcggtagggggtacggcggggttgaacactctgctgttcagtctcccatgccctctcatctgagaagctgcggctggcggtggctgcagaagtggggttgaggagtgtgataatcatcgtccctggggtacaaactcggcagggcagcccctccggtgaggtccggccaggcctgggggatggcctagactggggtggggtgagccttgcagaaactgttcaggctcctggccgctcactgtcccatttctaggtcacaatgctggccacggcctctgtacaggtgtggccctgcgtcctgtacgaggtgtgtggcgaggtggcaagcaggagcagggatgggcactgctgattcagtagcccacacctgtgcctggggccgtgggggcggctcctctgcctctgtgttgttttttcgtgtggctgctgggagtgtgtctgctctaggaggtggtggccggtgagtcagacagtggagtgaccatccactcctccccgatgctagcctgcccaccagaccagggactcgtccacaccctcaaaggcccctgcgctaagagacaccaggccacttcatcctggactctgtggggcacagggctgggctaacacctaggagggcatttgtttattctttgagtatctgctgtgcaccaggacactgataggcgcaggtgatgaagatgaagaatgagg

SEQ ID NO: 8489 - DNA, 2300 bp, Homo sapien
tcacattcatctagctttaacttcttccatgcattcatccatccatccatccatccatccatccatccatccatccgtctgtccatccacccacccacaaatattctctgaacatttactctgtgtcagcctattcctaaggttcagaatctttccccagatttctggaagatgggtgcatgaactgtaagaactagcggaggccctccagggtgccccaggctcatccagcattgatgttggactgtagccagaacccaatgactttcctcttctgtttctttgtgtcctctctgttcttttctcctcaccgcctgttctctccaggttagggaaatattattagggaaaggggaggggcatgtcccaatccagcaggccaggacaggacttccttctctccttctccctccgtacctcaggcaagagcccagagaaattgggcctggcattttgagtaagtgtccccctccccagaaggcccaacaagctcttagccaattcaccagtgagttcaaacaagagggggctcctttggggcccacagacagagacctcaggcaagaggagaatccccgtcatgaagccagcactccccacgccaacaccacctcacatacatcctctcataagtgaactgctttgtgaggtgggcttgtctctgcccttgttcccaggggctgtttttgcaaaggattagctgctcagcctggtgaggcaaaggggcgggggcttcctagcttgacatggattggaggggaaggaagggaaacccattcccctccacacagcccagaacctgccacgccagcctcacctactgtctgctctgccctgcccagcctggccttggagaggcacggccctttccttaggggtttggaggcttcctaggaccaggtcaatgggtcagagcccagaagtggctggggggcatgtcctacaagagctaagggtcctggtgttccgcaggggccacggagaggaaggggatgaagtttgtttttctcacttttcttcctgaggtctgtatttatatgatagtcatatttgaacaggtgacttctgagattatctgaatctcacactttgctgacctctttttggagggcattgcctgtggcctggcccagagaggatgggcaggtgttttctgagtcacacagcagaccaagtgtggagacaggtgagagtcaagtgtttgggccctgaggacccaaccacctgggctggcattgcttggattcccctcattgttgtgccttggtcatttgaatccacgcaggtagcaataatctaaggtctatatgtatcttgttggggccattgggataggacagactctcagaagccatcttctgatgagatattcaggtgactccatgaccacccagctgaagaagggactttggcttctcaaaggcttagggttcaaatcccagctcggccacttgacttaggccagtgagttatcttcttaaagcctgttttctcatctgttaaaaaggggtaattgaacaggttttagggaagcctgaatgagctcgtaatatatgcaatacctaggaaagtgcctggaggttggcaagtagggttcaatactcagtagccaaatcaaatggaacccatccttcccccttaaggtgaaaagcagcgatacagtcccagggtggacaatctttcctctgaaactcaggcctgcaaattacaaggctatttggcttgtgtgacccagttaacagccctgtgtctggtaggcctctgcagacacctcaccttctgccccaggggcctctgggctcagtgaagcctgcccacttgtgaagacggagactccccgctccccggatgagaagcaagtgcgtcagagggaagcagcccaactggttgctgagttgtggaaaataagctgggggagaaaaaacacttcttttaaaaatcaggttagggatgaatgtgcagggcgtggttcctgtgcaattatctgctctgctggctgcggggctccctgcttctcccgggccgctgtgtcaggcttgtgcctgttgctcctcccctccactcctccccctcctcctcctccgcctcctccccctcctcctcctcacaggtgtgtctctagtcctcgtggttgcctgccccactccctgccgagacgcctgccagaaaggtcacctatcctgaaccccagcaagcctgaaacagctcagccaagcaccctgcgatggaagctgcagatgcctccaggagcaacgggtcgagcccagaagccagggatgcccggagcccgtcgggcccca

SEQ ID NO: 8490 - DNA, 2300 bp, Homo sapien
cccaaagtcttttggctaataatcaactttaatatccaagtcttgctatcgttgattgatgggggcaggtgatcctctgatttttttctatcttgaaatgcctccatctacctctctcttctcacccctcagacagatttaccctggatcttgtgtgaagtgtgaacaccttactaactgtccattcacaaactgcacttgcctttttcttcagttgtaagtacaactgatggggcatgatggtggctattggccatacagatgctgggtaagacccgtggtagggatagtgatgctaccagtagcaccctggccatagcagggagttgattatcaattgtactgggaaggcagagaggggtactgtaaaaggatcttgggccatgagtgttgagtttggtcctgaatctgctgcataatcattatgagacctaatacaattctaattatcactctaaacgtcagtttcttatgtgtgtagttgaatgataattcacagtagtatggtgttgttctgaagatcaaacagaggagcatatatggtttgtaaactaaagttaaaaatatgagtcctcctagttgttatcagtgcctggtgaggatggcggatggtgaacctggccacacaggcacagcggttattgccagcaaccggggcagagggaagcctccggggtaattctccgagagttaaactgggtagtgaaacccacacaggaagggtatagaggtggcccaagagactatccgtaaatttgaagctgaaaagatttggaaacgtccaagtttagtcacagcgacgagggtgtatacagacaggcaggactggtctgtggtcataactggaaataagaagcccaagcgtttgagccctgtttggtcatcaaaaagtaatggctggcaggaagccagaaaaagagacggactatttccatgcgatcccgcagttcctgggggagccccaccgcatatctggtgaacagggacacttcaggcaccagcgaggcatgttctgttggaggacagggaacttcagggggcctccctgagaacttccggtgacactttacgaggatggatgaaccatcatttgttctgaatccaagcccactgaggagccaggagacctagtcagcatcccagagaagcaccatatttggcagacccgcatattggacactctctccattcatcacagtcacagctaacatgcgcggcacaggcaccgttctagcacgtgtgtgtgtgtctgccaaatatttgtgagtgtgtctcacaacagctctgtgagaaccttacatactacattgacgttatactttcttttcagtctcctggaagtttgtttatcattaatcagttcctcgaagacagactgcctctgactctacagacagaagcaagcttcggggtctgaaagcaatgaacggactacagattgtggcgaccccagccaccacatacacactctcgggggctgctcccttttgagggcctgacgtggggtccaggcaggcacccaactggacgtctctacattggctgtggacatagtggtgctagtgatggtcacagcttacccatgatgtggcacatctggtgggagcctcaggccgggaacaccctggggtggggaagggatctctgcgaagggagggggtctgcagtccaacaagtgatggcctggggcggcttcagggagtagggaggggctggaccgacgcccgaatcccacatatatgtgtaacgcattggagtctgcacttgcgtgaccctgtcaccgtcacctcctggacttctcaggaatctcctggttgctctctgtagggcaactccagctcactccaagtcaccctccacccagcagccagagggatctttccgaacataaattccctctcgccaccacctccctccttcacaccctgcccaagtcccttcagtagagagacccaggcctggagactgtacaaagccctgcaaagtctggtcccgccgccgcaccctcggagcccagcgcggagagggcgcttagtgcgtgagctaccgtcgttccccgcgactcagccgagcggcatccgcacaccctgctagcctaggaagcgcatcgagggagcccgctcaagctgaagcgctgcacgagctgtgtcttccttctctccgccgcgaatgcgggcaggatgcgagcaaaagacccggcaaagagggcgccgagggggcgcagccggggcgctgggcggacccagaggggacatggagaggaacgcggaaggtacgcggtagagacggggaggtggcgc

SEQ ID NO: 8491 - DNA, 2300 bp, Homo sapien
atggctgagggcagagctggtggcggatggggacaggacctgaaacaagggaagttaggaaatgtgggcgaggcccttaatgactgtgtgggctgactcatgtgggagacctagcttcaaggccgcatggagatccagcatcctgtcaggcgggaggccaatttcaagaccctgggcatctctagtctaaacggttgccagctaagagtgggagtccttaggggagcaatccttgtgctaatccaattattccctaacagcctgccttatctcccggatgtgaagatgaactccttaggagccaggttctccaggaaggatgctgcttgtttcagatgctctatgtttttgttttgttttgttttgttttgttttgtagagacggagtcttcctctgtcacccaggctggagtgcagtggcgcaattttggctcgctgcaacttctgcctcctgggttcaagcaattctcctaccccagcctcccgagtagctgggattacaggcgcacgccgccacacccagctaatttcttttgtattttagtagagacgggatttcaccttgttgcccaggttggtctcgaactcctgagctcaggcaatccgcccgcctcggcctcccaaagtgctaggattacaggcatgagccaccgcgtctggcccagacgctctatgcttaaacatctgccaaatacctgctgtcaaccacttatgtcgagcatcatgtgggccttgtcaaaaatgctaatcctcagttcttttccctagaatctgattccatgggtttagggattcgggaatctattttctaacaagcatccaggtgattcttcaggaaaggcaaatttggaaaaggctgacttggtagtctcttaaattcccttcagtcctaaatctaggcagcagagagcgggtagcgggaagggcccctggatgatagcaagaggccgattctagccggaccctgcagttcacatggccctgtgctggggaagccctagaagggaaggaggctgcagagaagggagttttcacccatcagtaatcaaggtcccaacagaagtgaaaatggaagtcagggaacaattggttttgagcatcttcgtggggctttttcccttgcctgggactggcaggacagtgtaggtctgagcagcttccacgatacacacggggacacttaagcccaaagaatttttaaaacgtgcctaaattccacaactaatcagaggaggcagcaatccagatctcctggtcttcacccttcttattgttggggtgcaccgcagggcacgcatgtttccttgtggcttgtgggaaagccactgtcgtggagcgccagcgtcccgagtccctggaaattctcccaagtgacctggaatccaacatttccctggattttcatagtctataatagagagaaagaaccgggtctgcggtggtgggcaggactgaggaaaggccgtgaatgcgggaagcacgggaggcaggactgaaaaggaaagaggcacaggggctcacaaaacctgagggccgcgtcccagtgggtgacctgacccatcaaggtctaacacctggccgtggcaaagctgggcgagaacccccgatccaccctcccagtgtggggcagggaaaaggcagagtgcaaagcgaggtctgattttgcagaagctttttagaaattcgctgtcagagaaactgaaagaccaaacaaaacccctaaaaatccaagcccgattatttcatccacgtggcacaaaagcaagccaaaaaaaaaaaagcggggggggggggtggcggtgcagggcgggggaagagtcacccgtcctgcccctgctggaaggaagggatttgccccgggagagcaaacttctgactccgcctgggtcgctgactccgcgcggccgggcgggagggaggtcgaggaggccgctcgcacaaagccgcggagccgctgccccctctccccgccccctgcccggccaacgccgaagtgcggagagcagccgcgggccctttaagggccgcgaggtgcgcggtctctttaaggcgggtcctggtggtttctgttttctgaaggaagtgacggggggtgggattgaatgaaaagtgcaaaacacaggctcgcagcgctggagcccggggccgcggagccgggccggggcagcgccgtctccgcctcggggccgccgggggcgccctgctgagcgctacccacgtgcgtccgcgccacctcgcgggcgaccccgcggccaaggcccccggcggagcggctcccgggcgccccgaactagccccca

SEQ ID NO: 8492 - DNA, 2300 bp, Homo sapien
ctggcgcagttgctctaggggaggggaggggacctggagaaggagccagctcaggttaaatgagggtagggcccaaactcagtcacatatttgaaacctgtcatcttacccacactaatcctaatgtgttttgagcagcacatatacttcgggcctaatgctgtgtgccctcagtacacaaactaattcacagcgcgcccttggtgggcaacactctcctttatactccacatcctatgggtgtaattagccctggatgtacataatcactggcatatctaatcataggtgtgtcaccatcccctctccctaaactggctatttgacagcccttctggtctacctcctggaagctggtattcttgccagtttctctttcacctctgtcccctagtccgagtggccaaaagctgggaagaggatgagtcacgctccaggctgcctgccttggggctgaccggatggggagggtgatactgacagatatgaagaaggtcatgtgtgatggcatcacggtggtgggcggtgggggtccctttcccctcccagcatcagggaggatagggagacacagactccaaaagtgtggaaggaggggatcctgaaggcccacagctggagccctggagggaataagcaagataaggggaactgtacagctgtgtgggtcagctcagggccgcttcgaagggacaaggacccatggaggatggaagcttgagccctgtcctgggcactgatgagtgagtgggagccagaggaagggatagtccaaagaatgctagggcccctgtgccggggggcctggtctgtgggtgggggagcaacatgggaagccttgaggtgcagtcagtaaagatgtggaatgtgcaatgtccacgttgccacctaagaacgtgtatcccaaggagatatcacagcacatagatgtgggaccgagaagctttcagggcccagtctgcccctaccctgtctgtgttagcacccttaagatttggcgtggaagcatctgatggatggaaagtctccttggggaggaaaaggcagtggaggtgctttcgggagaggcccagacttttctggagctcagagcatttcctcacaggtatttacaagaagtcgccagatggaatgaccaggctcactgacatggggctcctgggtctaatatctgtccctcctctgcgtgtgaggaattcctcctcagatcaggatggccagccctgcctgagggttcagaccccctcccgggagcttggccagcatctcccacccctgaatgctatgtccaggtggagtcctagcaaaagatcccggtaggccatgaagactgccacctgggataatggaggatcctgctgggaagctggtggggagagtgagttagttccctcccaggcttcccaaggcacagagaggtggtggagataaacttaggacagactcctgttccgctggcggagggcccagccttgaagtgaggattgcatagggtctggagatcacccattgagcagtccctcatgtcacacatgctcttatctgatcgcctggagctctcaagtgaggctgacaagatgaagcagctgatgatcccagattaggacccagggttccttccagtatatcctgactgcctgtctgccatggtaccatgagtgggctccttccagtaggctaaagaaccctggggagggaggtggaggggagaaggaggctggaaaaaaccttggtgcagaggaacaaatccacagagaccctcgtttgtacagacttgggctggaccacttcccccacgctcttacctccagtggatggagtgttggctacttggccatgcctgcaactcctctctcccctgcatggcctcttggggagctgggtgagggggatgagtttggaaaatatctcaccaaggccaggtgtggtggctcatgcctataatcccagcattttgggaggccgaggcaggcggattacttgaggccaggagttcgagaccagcctgatcaacatggtgaaaccctgtccctactgaaaatacaaaaattagccaggcatggtggtgtgtgcctataatttcagctactctggaggctgaggcgggagaatcacttgaaccggggaggcagaggttgcagtgagccgagatcacgccgttgcactccagcctgggcaacagagtgagactccatctcaaaaaaaaagaaaagaaaatatctcacagacactagtgagcaatcactatgtacgttttttcctgccacttacccactgtgtgacttggcaagtcacttaac

SEQ ID NO: 8493 - DNA, 2300 bp, Homo sapien
aggcaggagaatcgcttgaacctgggaggcggagattgccgtgagccgagatgatgccattgcactccagcctgggcaacaaggtagaaactccatctcaaaaaagaaaaagaaaaagaagcaagaagaagtttctctcctcccttcttttcgggagcgtggggaagggaggtccatgtgactggggagggtggtgtatgtggacctgaagaagcaattaagtgcttcctgttcctctggggccactgtagcacccacagaacactttctgatacctgttgtgtgcccagccctgttctaggtgctggggtgctggcactagaatgaagcaattgatcagttaccaaccagggggtaagctaagaaaaggccctcagaacctgccacgaaggctgttaagaacatggaacttaggctgggcgtggtggctcacacatgtcatcccagcactttgggaggctgaggcgggtggatcacgaggtcaggagatcgagaccatcctggcaacgtggtgaaaccctgtctctcctaaaaacacaaaaattagctgggtgtagtggcacgtgcttatagtctcagccactcaggaggctgaggagaatcgcttgaacccaggaggtggaggttgcagtgagccgagattgcaccactgcactccagcctggcaacagagcaagactctgtctaaaaaaaaaaaaaaaaaaaaaaaaaaaagaacacggaacttaaactctctaagcctcattttccccatctataaaatggcaataatcatagtacaatgtacaggttttgaggactaaacaagaactaaaggcacgaaagatgcctttcaagtgttggtcaccccagtgcttgatacacagtgaaggcacacgaaatgctgggtgttatcgtgggcatgactggagtgcacggtgggatgggcgtgccagggggaaaggacactgtaaacaaggtgtagaggcaggaaagcccaaaacctgttctgtgctcagaaagtagcccatgggactaaggagaagacatgttcatgaggagtcctgtctgggaaggaaagcgaggccctgccctcctgtctgcacacagctttctgggcttccatgcaggccatcctgtggtgacagaccacttactgggacttgaagagacgaagagaaaggggtgagcctatgatgggtgctgcaaagagcactggagtgggagtccagagacctgattccagccaggctctgtcactagggaagtgtgcacctttgagcaagccgcttccccgctctggaaggtggctgtcaccaaaagcctgggcactggtaacttccacatccatcatctcgtagagcctcacagcaacctgggacctggggcgggagactggaggggcaagcaggaagcagttgtgtgcacctggaaactctgctaataataaactgcaccccgtctaaatcccacaatgctgtgaggatgccatgggggctaggtgagcttggtcacctgctcagcccaatagggaacccgattagcacctgtcctgttttacaggtgagttaaatgagctcagggaggtgaagaaccttgtcccagccacactgctggtaagcggttgggaggcgagattccaaaactgaattctttccagcagacccccgcgacttctccaaacactccaactccttgcagcgcttacacttcgcgatctgtccagaaggaagctcgggctcaggctggagaacccgccagggcttcctaaaaagggcgagcaggaccaggagttggcgccactccgggcgcggtgaggaggtgctgccaggctgggttggagcaggcaggtgttccgcgggatcgagacccgccccggcagcacccccggccccctccccaggtccccagctccatgtatgcaaatcactgctttgcatgggcctggggccaggcgcggggctcctgccagggggcgtggccggcggcccccgccccgcgccgcgtgctcacctggggagtgtggcaatcctggcggcgccgagtgttgcccgggccggagcagcggagcgcgcgacagtggcggcgacggctccggcagcggctcccgcggcggcggcggccgggaactggaggaaggagaccctggcttcgcaggggccccggctggggcagaggcgaggggcctgggggggcgctggctttggccccgcctggggcaggatggtgaatctggagtccatgcacacaggtgaggggcggagggaatgagctctgacaggtgtcactgcgcgtgggcaggggtgaaggagagggacaac

SEQ ID NO: 8494 - DNA, 2300 bp, Homo sapien
atacctattgttagcagagtcattttcactcttttgctatgtgaataggaaaattgcttttcctattcacatagctctccaggactggagctgccgcacaaccttcctttgggtctcctgtattattggttctataacagcaaggaaaataattatttactaaatacggtaccctcagagcccagcactacgcagcatatgcatatatattaatatgcatatacaatatgctatatatatgcatctatatattccttgggagctggacagtgacacccattttttttttgtcctcagtggccacaaaatgaccacagttcctaacatggataagaggctcaagaaacacctgagagatgaatgaatggggtctaagagaattccctgttttaaccccttttcctcagctgtgtcctaaacaaccatgggcaagtacagccctttcctgtgtggtcatgaggtcatgacgcatctctgagagcaggtgggctggcaaggtggcagcagaggatgaagagcaggtggggtcccgagaaagagggagaggtgagatgcaaaatgatctctgagcaaagcctggttttgagatcagctatgatgatatatcagatctgctaggggagctgggtgcagtggctcaagcctgtaatcccaggtgggtctatcatttgaggtcaggagtttgagaccagcctggccaatatggtgaaaccccacctctactaaaaatacaaaaattagccaggcatggtgatgggcacctgtagtcccagctattcgggagggtgaggcaggagaatctcttgaacccgggaggcggaggttgcagtgagccgagatcgcatgactgcactccagcctgggtgacagagtgaaactctgtctaaaaaaaaaaaaaagagatctgctaagggagctaaagacgggaaggacccacagccgcaatagctgtgttgaaaggggtagatgaaggtaaaattgcttttctcttaaaaaaaatccctttgtgacattgtgatgttgtaacattgggttaataaggagtaatgttcaaagacttgacaaaagaacacattcattaattcaacaagtatttactaagcacagtctatgtgcaaggtgctgttccaggcactggggatacaatattggagaagaaggaagtcactggcctcatggagtttcttttctagttgagaagacataagaaagaactaagcaaacaaaaatgcactgtgctttcatttacagataattactgtggagaacaagaaggcactgtaaggcggtagagagtatctgaggctgatcagaaacaggatgacctggaagggccactcaagggaggtgacattttctctgaacaaagtgaggacccagtctttcgaagtcctgaggaaagatcatttccgatggaaagactgggtcctgaggcaagaacaggcttgcacgctgagggacaataatgaggtcagtatggctggagagagtagtgatggagagttggcatgggatctgctggttgggtcgtgataaagactgcaattttcaatccaaggaggatgggtcaatctgagagttccaagcagaggagtaacatgatctgacttaagcctttacacctgcaggggtaagagaagaggaagggagaccaactgggaggctgctgcaatagctcaagtgggagggcagcgggctggataggatggtggcagtggatgcagtgagcagggccaggatgtacttaaatggacagctgacagggctggctgatgcggggatgtggagggcagaggaaagaaaggaatccaggatgattcctagggtctgggcttcctcggtgaagctgtggtggtgccactcactacgatggggtgacttggggaagaactcaagagttatgctttcgacatgcaaggtttgagatgccaattagatatcccagaagaggtggggaaatgagtttgactcaggagaagtgttcggtcaggaggtatcaattgtgtagccctcagcttatgggtggtagctaaagccgcaggacccagtgaggtcacaaaggaactgagcctagatgaggaagaaaaaagggtcaagtttagatgatgaggaggcaccagcaaaagagactgagaaagagtgggcaggcaaatggaagaaagaccgggtaagtgtgctgccctggagtgtaagaggagaggggctttcaagaaaggagacaatatgcatttgaatgagacctagaaagtgagaaaaatagcattgtataacagtttgacttggagagggtcatcaggttt

SEQ ID NO: 8495 - DNA, 2300 bp, Homo sapien
gaagattatgaagatcatccaggggaggggtcataaaggattggcttagagttgtggcaataagaagaggggatgattgaggagatgctttgggaagttgaatcagtgcagtttgccagtggattggagatgaaaggaggagggagaaggtctagcagagagccccataagtctttgtcaaatgaaagaacaaatgatttaatgaaaaggaaggttcaaagaggactggggctttgtcctgagggtctggtctatgccacactctcctcacacaccctctccctgcaaactaagaccaaattcatgatggtttcagactaaaagacccttcactgggggaaagactcctaaacttctctctagaggtccttttaccttcttcatcataaggatacctatctgaatggtaaacccaaatatcccagaggagaagaagtaatgtttagtctacaaaaagtaaatcaaaaaggagagaagaggtggatttagccctttgagctagctggccacagtgcctggacccctaggcccagattccactctatccttgtggaatgatagatgtccttaagatcggattcattcctgaccccaaataggcacagcatggttctaggtttaagggtacgttttcctatgaaaataagctcaagaaataatatttggctgggcacggtggctcatacttgtagtcccagcactttgggaggccaaagcaggtagatcacttgagcccaggagtttgagaccagcttgggcaacatggtgaagccctgtctctaaaaaaacaaaagttagccaggtgtggtggcacacgcctgtagccccagctgttcaggagcctgaggcaggagaatgacttaagcccaggaggttgacgctgcagtgagcagtgattgtgccactacactctagcctgggtgacagagtgagatcctgattcaaaaaaaaaaagaagaagaagaagaaaaagagagaaagaaagaatatctcctagcaacccaaatgtgatcaaggtgcattttataaaggtactgattaaaatacctttgattaaaaacaaaacactttcatgaaagaaaatggtggtttagaaagtaaaatgaggcacaagagtttgacattttaggaaagttctatgaaggccatgagttattggatgtcccctgttatcttcagttaatgcctgttcaacacctcagttacctgctttatggaaaaaaacaaaaaacaaaaaaacaaagcaagcaaccttttctttgtccagttctgtgatttgtttttggaatctttgtaaacaaccctgctagctccttttatggtagaaaactgaaaggaggaagtaacctgctaagactcaaaaagtgagtcacaggctaaactcaggccacctccctatcctgcactcctgatgtttctacccagatattccagttatttgctatacatttatagaaactttaatttccacttccatgccactggaaaaatataagactccaatgtacccagggtgtatccagggatctgtcatcctctaagtgggcctattagtaaaaaaaaaaaaaaaaaaaaaaaaaaaaatcagaaaatgttatttattgatcttcgtggtggatctgcttggcgtgtttcctatcaggcatttgggcaccctgggctgccaggatcctctttagaaccccacctggaagcatcccagcatctcccagtgcccaagcatctacccagctctggaggggccgatgagcccagtgacctcgaggagctggagaagtttgccaagaccttcaagcagaggcgcattaagctgggcttcacacaggtttggttttaggggaaaagatagaagaagtctagccgagcggctggagactgggcttcccaagtgcaggtttcaagagcgaccagaggctcgatgtgtttggggtctcctcatcatgtccctgagttctctgagaatagggcacagttgccattggtagggaaactgaggacgttgctggtggaggagaatgagaggtggaaaaggggctggctctcctgagcacgtgggcgtggtccactgagagtctaaggagagaaagaaaccgattcttcaccttagagggaggagacttggaaaggagccgagcatgggtgagcactcaaagattcaggctggctgtgtgatcgatgctaggaccatgcaggatgtgggcaaacaagaggaggaggctgcctctcatgttcctccccctcggtccccacgcttagggagatgtggggctggcgatgggaaagctgtatggcaacgactt

SEQ ID NO: 8496 - DNA, 2300 bp, Homo sapien
atatatatatatatgtagtgcttggaacaatgcctggtacattaataagggcagtataggtgttatttgttattattgtgattattattctcattgctattaaattggtggagagcttcctgtcccctgctctccttaacagcccagaatttctgggggatgctaccggtgacaaggatctgatttggtggaacagggattgtggccaaagatacatacatcaacaaaatttaatcctaggtcatgaagcttgaacctagaatcccagtcaccctaggataaaggcccaatattttaggaagaactggctccttcccttttaccttaccccctcagcctttaggctcctgaaggctttagtaccctacttttgtgggaaatgatggcagcaagaagaaagtccagattcagatactagaaaaaaaatactgcaacaaaacaaatgggggaaagggtgagctctgcatactctccattcagtgaagtggagccttccatgttttacttctccagactatcattacctgttatccggtctatcctaacacatgtgtaacaggccttctgcaattcatcttacactgattttaattgagtattgctagagctggggttctcaactttggttgcacattggaatcacccagggagcttttaaattgattgatatctacacagagattctgatttacttttttcggagtgtgccctgggtattaggattttaaatagctcccaagtgatactaccatgctatcaagattaagaactacgacccaaatgtgtatacgaatcactggggaacttgttaaaatgcacattctagtttggtaggtccaggggtaggttctgagattctgagtctctaatgaactccaaggtgatgcagattttgctggtccatagaccacactttgagtagcaagggcttggagagcatgataatatgattcccttgttcaataacatcatgagcttccacataataagctctctcagcctggcatcttaggctggcatcagaggcatttaaggactctaacagcaatggttatcaaatgtgatcgtctgaatgactcctgggcaggttttaaaaaatacagatccctggaccccataccagacctaataaatcataatattcaaggtacagcctgcacagggtatttgaaaacacttcccaagtggcatagttgatcaacacactttaggaactgtgatatgcttccaagatagtttcccaggctcatttcacattaattcaacatacaaacatttattgtacctgcctcatgctaggtactagggaaacaaagatgaaaccagtgccatccttacctttgaagagttggtaagataaatgaccaaaactagaatatttactattccccaggcacggcctaaacactcacacctctgctaacggtcttctcctttgagaatgtctaggttcctcagcacccgggattgcctgtcctgatcaatcaagacagacaccgtctttaccccattcgagcctccattcttatcgctcaaacttactctgcttggtattaaaatagaaccagagaagaaaaggatttacccaaagtgaaataaaacagttggtatttatgtagtgacttccatgtgccagtcattgttcaaagcactttacacatgtaatattttaaaattctcaaaataaccatatgagataggtgttattactatccccatcctcaggatcgaggaaagggaggcaacagaaaagtaacttgcccaaagaggtaccaagcaaggttcactttcaagccttatgctttactgtcaagttggttacagggctgactggaatactgtaacttctaattctcaggcctgagcactttcctgctcatcaattcctgtttcacgacttaaattcaagcacgagggcaagaacgatgtcttacatcccccacaatgcctagtaagggtgcaagtacttagtaggtactcgataaattgattggatgagctgtcccattgaggggaggggagaagtggataatgatttaaacaaacaacaacagctaaacaagagcagcggcctccaggtctcacgtcaccgctagatccctcttgacccccccgccagagaaggaggaccctcccgcgccctttcggagcgtcggtggcccggctccggctctgcgctccatcctcccagccagcaggtgcccccagacccccggctcctcctccgccgccgtcacagcctcgtcctccgcctctggctcctccgcttcctgttgccgcgatccgggccgggagctgcg

SEQ ID NO: 8497 - DNA, 2300 bp, Homo sapien
taccatcttctgaagctttcccacagcaaaatgccttctttgctcacagctagaaccgtgggtctgtttaagtttggaaagatcttgaaagcagcttgccaagaggttttgtatgcaaggaagagaaggtgaattaggaaactttcccagtttgttttattcctgaagcttaagtattgaggcttccctcaagtattaagggaagagaggaactccaaaatgcatgatttgatgagtcattgggttcaattaattttatacttacactgtaacattattaggataggggaaaataagatatttagtacttttaagaaagatttattaagtttggggataaggtttgcattttggtcagtatatatatgtatatatgtgtgtatatatatgtgtatatatatgtatatatatgtgtatatatgtatatatgtgtgtatatgtgtatatgtgtgtgtgtgtgtatatatatatatatatatatatatatatatatatatatgaatgggattccttccggttgcatgtaaacactcaatttaagagtcttcagggtagaattgtcatgctagaatacaccagcaggtggcaatgtgtcctggtctcatcattagggaagtgccttggctaatctgcttctattctttccaaaaataaacattacaaaattagttggctgtgccttgaacctaaaaaatcgagcaataaagagtcgtctctggtctctgtttatcttttcctttttttcccccccgttctaactaacgtcagcgtgagctcatgcctctattcggggataatgatcctttcatgaactgttgcggaatgactttttgcaacagcattgttaagaggtaattgtttcctctctccacatccactgtttattagatttgatttgctacttggattccacaaaatggctgaaatcccttgtcaccaacataggtttaagctcaaaagtctgaaaatagttggataaagggaatagccactttggatgtttgcaggcagaactgaagaactgtattacatgtggtacctaaattgccaaaatactgaattattcaatcataaaactagatgggtatctaaagctctctacccagtaggggaaaaaaccgaaaaaccgtttgggaatccttcagagagaaccgtaatgctatttactggataaatatacttcattttcttctcccagttctttccacaacacgcttgttaagtcgccatggaaagcaccatgctttatcaatttggcaaataacacatttcattttgccaaggcagaaacagcctaaaagtaatatttataccgagaaaccctggctgcagtccccagctgctctcccgcagccctgcgcctccggctcatgcagcgctctccccccggagccggcaggtgcccaggtgagcggggcctgcggaggcagcgaggggcgccggccgggaaccggcagaacgcgtgcagccagaagacaggagagataatacattcccttaagtaataaaagtttccaggacaaggggggctggtaattttcaaagagcctcccggcacgatgtcctcgggatctggggggcgctctcgggcggtctctggtgaaagtcgacttagtacaaactggactcgaaggggcatgtctcggcactcaggggcccaggcgccgcgggaggtgggtgggcctcccggggctgcacgggtcccacctccctctgccccgtaggactactttgccgctctcccaaaccgggctccggcggaggcgtccgttcaagggcgagagcgcggccctgagcggcggagggatcccgggtgaggcggcttcccgaagtcagaggggagggggccataaagtcggcgggggacgggaagcgcgagctcgcgccggacgcggccagggccgggaaaccagaaccggaaccggaacccgcgcgcgcgcccgcggttgcgcggcccccacggccgccggcctcctccgctgtctgcgcgcgcgcccgcgagggcctccagaacccggcgagccggccctgcgccgggagacgccgccgcctccgcctcccggaccagggcttccaggccgggccggacgggcatctcccgcccctcgcggggagcgtcggggaggagccgccgcctctggcgattgcggaagagtccgggcctcaaagggatggggagcagtccgcggcgctgagagacccgggtccctgtcacctcgggccgcgggacctctccgccggcgccagcggctcgtcccagcaccgggagcctggtgagggcggcgagcacagaaggagcc

SEQ ID NO: 8498 - DNA, 2300 bp, Homo sapien
atatatgtgtatatatgtatatatgtgtgtatatgtgtatatgtgtgtgtgtgtgtatatatatatatatatatatatatatatatatatatatgaatgggattccttccggttgcatgtaaacactcaatttaagagtcttcagggtagaattgtcatgctagaatacaccagcaggtggcaatgtgtcctggtctcatcattagggaagtgccttggctaatctgcttctattctttccaaaaataaacattacaaaattagttggctgtgccttgaacctaaaaaatcgagcaataaagagtcgtctctggtctctgtttatcttttcctttttttcccccccgttctaactaacgtcagcgtgagctcatgcctctattcggggataatgatcctttcatgaactgttgcggaatgactttttgcaacagcattgttaagaggtaattgtttcctctctccacatccactgtttattagatttgatttgctacttggattccacaaaatggctgaaatcccttgtcaccaacataggtttaagctcaaaagtctgaaaatagttggataaagggaatagccactttggatgtttgcaggcagaactgaagaactgtattacatgtggtacctaaattgccaaaatactgaattattcaatcataaaactagatgggtatctaaagctctctacccagtaggggaaaaaaccgaaaaaccgtttgggaatccttcagagagaaccgtaatgctatttactggataaatatacttcattttcttctcccagttctttccacaacacgcttgttaagtcgccatggaaagcaccatgctttatcaatttggcaaataacacatttcattttgccaaggcagaaacagcctaaaagtaatatttataccgagaaaccctggctgcagtccccagctgctctcccgcagccctgcgcctccggctcatgcagcgctctccccccggagccggcaggtgcccaggtgagcggggcctgcggaggcagcgaggggcgccggccgggaaccggcagaacgcgtgcagccagaagacaggagagataatacattcccttaagtaataaaagtttccaggacaaggggggctggtaattttcaaagagcctcccggcacgatgtcctcgggatctggggggcgctctcgggcggtctctggtgaaagtcgacttagtacaaactggactcgaaggggcatgtctcggcactcaggggcccaggcgccgcgggaggtgggtgggcctcccggggctgcacgggtcccacctccctctgccccgtaggactactttgccgctctcccaaaccgggctccggcggaggcgtccgttcaagggcgagagcgcggccctgagcggcggagggatcccgggtgaggcggcttcccgaagtcagaggggagggggccataaagtcggcgggggacgggaagcgcgagctcgcgccggacgcggccagggccgggaaaccagaaccggaaccggaacccgcgcgcgcgcccgcggttgcgcggcccccacggccgccggcctcctccgctgtctgcgcgcgcgcccgcgagggcctccagaacccggcgagccggccctgcgccgggagacgccgccgcctccgcctcccggaccagggcttccaggccgggccggacgggcatctcccgcccctcgcggggagcgtcggggaggagccgccgcctctggcgattgcggaagagtccgggcctcaaagggatggggagcagtccgcggcgctgagagacccgggtccctgtcacctcgggccgcgggacctctccgccggcgccagcggctcgtcccagcaccgggagcctggtgagggcggcgagcacagaaggagccccgggcccgggacatggaatcgcgcgagcccggcgcgggacggccggagacgcggccaacgctgcggccacgagcagccggcagccccagatagagagccgggagggagggccccggcccttgccgcggcggggagttcgaggccccgagactccggaggaggagccgacacccgtccgtgagctgatcccgccccagccccggcgggagtcccgggtccccttcccactgcgcgcggatttccctctctgaggaagtttatccttgtgccttctggaggatttctctctagctcgactcactctggactgactcgctccctggctttctcagttcgttttgggagataacttgttttgctccaagccgcatccgttgaccccttacagtcggatggtctagatg

SEQ ID NO: 8499 - DNA, 2300 bp, Homo sapien
agttaagagtgtagtggtgtttggtttcttgtagcaagagtcctagagcagtggtccccaacttttttggcaccagggaccggttttgttgtagacagtttttcaatgggactgggagggtgttcgggggagggcagtagtgggatggtttcagggtgattcaagcacattacatttattgtctaccttattttcattattattacattgtaatgtataatgaaataattatatactcaccataatgtagaatcagtgggaaccctgagtttgttttcttgcaacttgacggtcccatctgtgggtgatgggaaacaatgacagatcatcaagcattagattttcataaggagtgtgcaacctagatccctctcatgtgcagttcgctatagggttcctgctcctctgagcatctaatgctgccactgatctgacagaagtggggctcaggtggtaatgcgagtgatggggagcagctgtaaatacagctgaagcttcacttgctcacctcctgctgtgtggcctggttcctaacagatcatggaccagtattgtctgtggcccaggagttggagacccctgtcctagagtacacagtgaaaaagtttgatagagaggggaacagtggaagattttgttagatatgtcacatgattaatggatgactaaagttttgtttggtgatctaggatgatagagatgttgagacatgaaattagttggcttcaagttctaagctgtcctgtgtgagaaattgcctcatcagccaacacaggctttgacatatgggtagcttcgtgtttcttaggatacttgggctggtcagaaagtgccaagcatcagagaaactgagacctcggtataggtggaggaagtctaatgatagccacagtcagtagcctagtctgatttgtttttagcaaatctagactattttcttaatcagtaactacttctttagtaactacttacaaggcgactgcctttgccaaggtatatgttctctgaaagctgattcttcatagatcactaactgtagttttgaggttctgtgatttccttcaaaattcacagaaccttgagctataatttatgtggatagagtgattactgggatttaacttaaaattagatgtattcaaatgttttaaggaatatgttttgtaaaacaacatgtttttcattcgttacttatatattgatcccagaaattgtgtgcctgcaaattgtcaagttgggttgatgcttcagaaaaggaaagtagaggctgagtcttcttagtatagcaatgcattttttagagcagtgtttgaggcaaattattttcgcaaaattacatggcttctagggattagattgcatgagtttgtctcttgttcctccctcattctactgtaagaggccaggctgctagttaacagaatgccagacataatgcctagggcatagtttgagacctgggaagattcacaataatcaaacacaaacagacagagtagcatgaagaaatttcaatcctcccagtcttgcttacagatttaattaggcttattggggcagaaaatatttttcctccccccatgtttaaatctgtttctcctctactcccacctcctgtcccagattctctttgaaggggtaatactagcaacaaaaggagatttttttttttttttttgtaaatcctaacttatttggtttatctggctttaggaaaaggagcagtaacaacaaccgaattttaaggtatttgagggactccattttttggcactgtatttgggaaattcccaatttaaaaatcatgctgtactcaagaagaaaattagggtttttttgtggctttataattggatcttttttgcaagtatttttaattttatgagaggtatttggcctgttctgctagagaattatcagccaaatccttgctttctttatattatatatattttcctgagtgatattctagggaaatgtatatggatgctgttctctgtctttccattagcagcgcagtgttgggcttcgaatgatgatggtagatgattgggggtgggagaagaggtggggtttcttcttatcatccctcttgtggtcagtaaaatcatctgacaaatgcctttccaaggatgtcgaatgtatatataaagaaaaagcttaggattgctaagggagtggtattttggtgaggatttcattttcttctactccatggaaacgagccttttgagcttttgcttgtctgctgatttgtccggtgatccaggtaatctactgcagtctttgttttctgggtc

SEQ ID NO: 8500 - DNA, 2300 bp, Homo sapien
gtctgttaagacctactgctcagaaaaaaaaaaagttacttttaaaatattactgcccattgacaatgcacatggtcacttaaagacttctgatggagatgtacaaggagatcaatgttgtttgcaggcctgctaacacaatatccattctgcagctcatggaccaaggagtaattttcactttcaagtcttattatttaagaaatatatttcataaggtgattcctctgattggtctgggcaaagcaaactgaataccttctgaaaaggattcattattctagatgccattaagaacattcataattcacaggaggaggtcaaaatatcaatattaacaggagtttggaagttgattccaaccctcataggtgacttcgaggggttcaagacttcagtggaagaggtaactgcaaaaaaactaggattacagtggagcctgaaggtgtgactgaatcactgcaatctcatggtatgacttttaatggataagggtctgcttcttacagatgagcaaaacaggtggtttcttgaaatggaatctactgcttgacctttctcagctttgcattaactttgcaacatggatgagtttgcatatttggaaaggttagttactcaacttgaatctaaccatcaagtgtccataaaaatattaaaaagaaacagaaaatttccttacccatgtcagcaaatcttccccaatctgatcgataacagaggtctcatttctctttcgaacagccttcatttgttcattcaatccaactaaagataaaaagatagaaaaacgttagtaacacattcagtgtagacagaattactggtagtacagagtagctaattttttttttttataaagacgattttcacagtagtacagctgcttcttatctccttaaatataaatctggacatagtgcttacacatctggatattataagctctatctgaaaaacaggtgctaaacaaaaaacatttttggaaactagcacattacatacacggtggttgcatcaaatattcattgaacctcaagactccatctataatcatgctcaaaaagaacttgaatttaaacagtacaagtaattctgttcactgatcctctcaaaatgtgttaagtgtgcaggcaatggatgtaatcaagcctgaacttgtcaatgcatgcctgtgaaacccaagattatccacaaaggaataaaaggcatcaatttagttagcagatgttgatagttagtgatgacatgaaaaagaaagataaaaaaattaagggtcatagagaaatagtgacctataaatgagaggaacatcatattactgtccacaaaagtccaagatgacttcaaccaataaaatgtcaacaaggtagaatttttatatacttattcaagtgttccaagcaacaaaacaataaaataattcctgaggccggggcagtggctcatgcctataatcccagcactttggaggccaaggcaggcgggtggatcacttgaggtcaggaatttgagaccagcctggccaacatggtgaaacccatctctacgaaaaatacaaaaattagctgggtgtggtggcgcacgcctgtaatcccagttactcaggtggctgaggtgggaggatcccttgaacccagggggcagaggttgcagtgagccaagactgcaccactgcactccagcttgggcaacagagcgagactccatctcaaaaaaataaaaacaattcctaaaaattaccgaaccatgtgattatataccatacactactatttacaaaacacatttatacgtatattattatattggatatatatatttaaagagatatatatactataattgatagaaaattttcaacggtgaatttgactattcatgtttttcaccttaggcaatgactttagactggaagccctatgttgacacattgtacatgaaagattgattgtgaggaaaaggatctagtcaaagttccaatcattcctttatttatcttacattctcacacataatctcaggaatactaacatgggtacatttacaaaattttaaactcacaatcttttctctattggaaatgttaggggcaaagatcagagctaatttctcttactatgaagttgaagaatatcttccaagtttgaaaaaattttccgtagctctgagggtgacagaattccttctctggatactcgctgatagaacacttgatcaagaaccttcagtgttcgaacatgagctctttcagtgtagaacaattctgaacaggaaagagatatgaaatgttgccttac

SEQ ID NO: 8501 - DNA, 2300 bp, Homo sapien
tattcattttcatttctgtataacattccactgtgtgcatatataatgtatttctccatcgtgctgctggacatttgggtggtttccagtttggggaaacgaaaccaccagagtgctgctatagacattctagtgcatgtctttgctaatcatatacatgcatttctgcttgataaatacctaggaatagagttagtgggtcattaggctagatgtaaagctctagtataccagttttccaaagtacttatttcagtttacacacctactaccactgcataagagttccaatttgtccacatccttgctaacacttaatgttgtctttttttaaaatcattatagtgagtgtacagtagtttaaaatttcattttcctgatgcttaatgaggctgaacaccttttcagatgtttgtaagccatttggatatcttctttagtaaagtgtctgttcaagcctttgcccattttcctattggattgtctgtctaggggttggaggacgaaactttttttttttttttttttttttttttttttttttttttgagacggagtctcgctctgtcccccaggctgcagtgcagtggcacgatctcggctcactgcaagctccacctccccggttcacgccattctcctgcctcagcctcccgagcagctgggactataggcgcctgccaccacacctggctaattttttgtatttttagtagagatggggtttcaccctgttagccaggatggtcttgatcttctgacttcgtgatccacctgccttggcctcccaaagtgctgggattacaggcgtgagtctgtattaaaattaaacattttaatactactctcccaatccaggcacctgggattagcatatccaggtgctcatcagccgcaccctcaccccagtgaagccagcagagctggctgtcggcagaatctgggtctcagtgggggccaaggcacgtgctgccttggggagaggcagctccctgcaaggttctggatttgacatcagaggcccacccacctcaggaaggaggagagggattggtagaggttgggggtggggctggttttcagcggtagtagagcagatgtggaaagcagctgataacctgggaggtgtgtgtctgctctccatatttgctaggaatggaccgctcccatctgggccagggaggacctgacatttatgtagcacctcatttaggccagaccctgagcatggtggcttctccgatgttaccttgattcttctttagttcaactccaccaggaggggttgttatagtacttttacatgtgaggacactgagccgagacacagaggggaccttgtgaaggccacacaactggcaagtggaagagctggcctgaacccagtttcctctcacacctctcctcagtgtgcagtgcctgtgctgcgtttggggaaatggagtaaccctcccaactctcccatcccttcctcttctgctcacccatggctccaattccttaagggcagatgagggttttgtttgtttgagacaaaggctcgctctgtcgtccaggctggagtgcaatggcgaatagcgcaacctcggctcactgcaacctctgcctcctgtgttcaagtctgtgacacagggtcccgagtagctggaattacaggcatgcgccaccatgcccacctaatttttgtatttttagtagagacggggttttgccatgttggccaggctggtctcaaactcctggcctcaagtgatccacccactttggcttcccaaagtgctgggattacaggcgtgagccactgtgcctggctgcgagcagatgaggttcttcatttctaatgacacgccatgaatcatccaaccacagttacagcaacctgccccatgtcggtcacagagctgaagttagaacctgagccttctttgagcccggcatgtaaggaggaaagacaaaggggcctctccggctcctgggtgtcactgggatggtggggcagctgcctagctggagcctgggactcacgtgcccccaaccccctctctcgcagagttatgtcatgcccaggccagcagggggctccatgaggattcatagaagatgccccgcgtctcggcgcctttggtgctgcttcctgcgtggctcgtgatggtcgcctgcagcccgcactccttgaggatcggtaagtgtggcccagcttggggcagtgcccccacccactatcccaggtgtccacaagggacatgagagtgctgcacaggacttggggaagctgcccagcccgtgcactgtgccctccc

SEQ ID NO: 8502 - DNA, 2300 bp, Homo sapien
cgactggctaaaaacgcaatgaaatgcacacacctttctctgccaggcttctgcaggcagtagcagcagcttccctggaagacccacacaagttccacagatgccatgtggttctattccgcagaactgggctctgggttcttttatggaatttccagcaacagtaaagacatgtttcaccctttctcgccgcccccaccctatggggccagaggactgagagtgagagggagtggctccctgcttcacagtctggagaaggtggagagtgtggatggcagggccagccaggcccaccccagaccatcagctgggagctctcgtgggcctccagttccaggcaggagccttatggtctctacagttgggcctttcctgtggaaaaggggagatgaccaaatgctcccgtccacgccctgcaagaatgccacctggaaaagggtgggcagctgtccccatctctgcaagggcagcatggttctgtgtgtgttcatgttccttttcagtttacaagcaaggcctcatacacatccatacaacaagccccgttttacagataaggaaactgaggccaaaacaaaagagcccacccaacttgcctgaggtcacagagcctgtcagctgagaggcctgagctttaagccctgcactcttaagcccagatgaatcttcctgaggaagcctgcctggtcatcctgtctgactcctccaccattcaattgcacatgcttgtttacctatgtgtcttccccatgagcagcctgtgtggctcaggacagcaggtgctggtcttatacttatgcttgtgcccttgctctgggcctggctttggaagcgagggaaaaccattgtctatcagcagattgctgttgttggtgaggctagggcggaaggcactttctctttctccgagccctcctctggccttgggagctcctattgtctcttaaagggaccagccaggccatgttatggcctgagattccccttcctcctcctctctgcatgggtgagggatgagctgttaaggtttccaaatgaatggggaaagggtaatagttactggacacctgatgtgttagatgtgtcaagcctatcatctctgaattctcccatcaaccctttcgagtagttacatgtgtttctgttttagttatgaagaaactgaagctcagagaggtttaatggcttgcctaaggttccccggatggcaggtgtagcacgggcttgaacctagatctgtctgactcctaattctgtgatctttcttgtttctgctgctgtctcttggggtggggatacgaatgtgcccttcacttaagcaggccaggctaaccggggaatggcttctagggccattccattaagaagtccaaatacatagctttcttctccttggtcttgacactccacaaagccaggtgaaattattgtcctcaaagaggctcagtttccctgtctgaaaaatggatagaattggctcccaatggactcctaggctgggaggggctatatttaggcagaaagaacagaaagagcaattgggctagatgtcagcactgggatgtatggaacaggactgaactccttagagtcctttctgtcatcctaaacctcataccaacagagccagtaagacctcagctccccgctacccactttcccaccgccactgttctcaagggatctaatcctcaccaatcacttgctaaaagaagccccggccccagactccctggtctgacccaagccatgagacaggtaaaagccaggggtaggaactatacacccagagccagatccaacagcctgagcaacgcaccttcccacctccctcctctggggacacggcaaagagactaattagcccccaagctccagtcaggaaatgaatcccccacccaccctcccattagcccccaagaaattaataaactcatcagatccaacaaagcggcttggcagctattacccagtgcaatctaattgcagaaaggcagtgggagggaaagggagattcagagccaggcgccctgggatacaggctaattgccccacccactgggcaccctcgaagccacacacgtgccaggagtgggcaggagacatagctctttcatcactgacaatctgtggctctgcctccggccaaatccctttgctccaccctgctgacacctgccccccaaacctcctgtaggaacagctgttttgtaagccgcttccacatgcccacatgtgcaggcttgattttgcttcaaataatgtctctccttggctccctctatactttctgtctc

SEQ ID NO: 8503 - DNA, 2300 bp, Homo sapien
ttccaccacccaagggctgaggagtgcgggcgcacggcgcgggactggcaggcagctccacctgcagccccggtgcgggatccactgggtgaagccagttgggctcttgagtctggtagggacgtgtacaacttttatgtctagctcagggattgtaaatacaccaatcggcactctgtatctagctcaaggtttgcaaacacaccaatcagcaccctgtgtctagctcaggatttgtgaatgcaccaatggacactctgtatctagctactctggtggggacttggagaacctttgtgtggacactctgtatctagctaatctggtggggaggtggagaaccttttgtctagctcagggattgtaaatgcaccaatcagcgccctgtcaaaacagaccactcggctctaccaatcagcaggatgcgggtggggccagataagagaataaaagcaggctgcccgagccagcagtggcaacccgctcgggtccctttccacactgtggaagctttgttcttttgctcttttcaataaatcttagtactgctcactctttgggtccacactgcttttatgagctgtaacactcaccgcgaaggtctgcagcttcactccggagccagcgagaccactaacccaccagaaggaagaaactccggacgcatccgaacatcagaaggaagaaactccagacgcgccaccttaagagctgtagcattcaccgcgagggtccgcggcttcattcttgaagtcagtgagaccaagaacccaccaattccggacacaatgctaatgatctcagtgctctgaaagccagtaattcttaaattgccaagaaaggcactctgttctctgtggaagggggagtaaagccccttcctgagcaacctaagatacaattcttggctaatcatcccctttatactcagagcagtttctttacccatgaccttctggcttttttttttcctctctaccctgtctaaccctacctatgggatatgagaaaacaaaacagaatgacaaaaataagtctccaggaactgatgatggtaaggtgctattgggtctgtcctaaataattttgtttcccccttctagaaaccaatgcagacatgcacatgcacattacatcccccacgtcttttctggcacacaccacacagaagcacatacactttatgcacaaagacatcttcatctcctagcacttcaggggacattcccatacaaggctgaattcacttggggttgagccagcaccacgcctattccatgtatgtttctgcaaaagaaatggacgaaggagtacataagcaatcacagctcaacagtcagatatagtaatactatgcatggagttggagcaatagcgtggcataaagtgaagtgcatggaccctggtgccagcctgacctggattcaaatctcaccctggtcacatttactaactgggtggtcttgggcagatcacttaagcactctgaacttgttttcaattctataaataccatctctttggagggctgtaaaaattaaaaatagcacatgcgcagtgcctgtacctagaaagtgctcaataaatgaaagctgctgttactacattggtgttggaagctcgggatgccacttgtgaagggggcacagaagaaaggtcagactgccaccataccctgagggctcatctagtatagttccctcattttatggttgaggacactgaagccagagataggaagagacttggtcaaggtcacacagcaaatcagtaacagagccaggccaagattccaagtgtttctggaaaggttcagcccaatgctcttttctgcagcccctattgtcctctgatatgacaatgtgtactcctgttctgcccctggggattgtccactcaatgggtgggcacgagaaagagcagatgaggtgtttgtggtaaagcctaagccagtgcagccatccccgtcgccatggcaaccccagcgcggttggggaggacccgctcctccggcgccccctcccattcacgcagcggacgtgacacgtgcggcggggtcacgtgttgttgttgggccgggaaagctgcttccgggtcaatgcaggacactgggctccggcggccagagtgggggactaggtgaagcggcgccgggccggggctggccgggaccaggcccgaggctgagcggcggcgacagcggtggccgggaggggggaggagaggcgcagccagaggagccgccgcagtagctcccccgcctcccgggctgaggggtgagtggagccgggcccgctggc

SEQ ID NO: 8504 - DNA, 2300 bp, Homo sapien
tttacttactgcaaattttttatcagaaggggtttatctcccccctctgcctccagtgaccctcactgggtgttagggaaggtttccaggccacagtttgagatttcccttgtggaagatcgtgtctagcgctaggtcccttgttagattttgcctggaaagtgccctgtcctatctcctgcagagcggtgcatcagagagaaaagagagggcataaaacctaaaaagtttggaaattttctttaaatacttcatgcatacctgtgaaaaaatagagtagagcctatctgtggcgactgttgaaaaccagagaaacaaaaaaagactttaatagaaaaccaacttcatttaaatgttggaggcagctgctttgtttggagttttaatcccatgctggtggatgctaattctgtaacattatacagttgccttcttttgggtacaaaggtagaaggggggttttcttttgtgtttttcagtgcaaagtgattctgatcagaaaggcccaaggtttcagctccaagtacctgacatttccatctgaatctactttttttttcaaaggggaaaaaaaaaggtctagtttttcaggaaaagaacctctctacgcaatcctgaaactgatctttagatttacttttccttaatcaatagaaaaaaacttgattgcagctcaacacttacctgtctctagtgcaggactaacttaatttttggttttaagagtacgagattcagacattatttcaggaatcagaaattattggcaacaagttgaggagaactgacatgaattcttgttttacctaattttttctggcttaccaagatttggcttaatatttctgactcagttcctccagcctctacagaacaggttagtgacatttttcataaatacaaatatctaaatgaatcctccttacttctctctgaaccggttccctaagggctctagtcttaaacttgcacggcatcttctccattaaagctgtgtgtgatctctgctaaacctttgtaccctttccagcaaaactgtctaatatttaatatgtgcttgaaattacaacatatatacttgacaactaaagatttgcaataaaactctcacaggataaattcattgcctttcccgtgaaagtttggctgaagaattgtgataacttcaaatgataagaggaaggtttttcttttttaagaatactgtcaggaggagacttcatggtctagccacacgcttgggtgatgtctaacttgagcttgcgtccgtgttctcatcgcagctttgcagagtgacacagacaaaacatgctcctgatggagggtaaagccaccatgcaaccgattgtaaactaacacgaaaacaagtttctctttgctgtgttccttctttaattaacttgctggaactaattggttgcttgtgcgctggattctatttttattgtgattccaactctggattggtccttttttattactaatgtttctatcattcatttcactgtgggaagtcagtgaacagagtagactggccctgaatctggtcaatacttcaaaatgatggatcggctccattctatggagaaggtgatggcagactctaaattctcctagctgtagaacacattgtgttttaaccaacttttgtttgattctgatggaaagctgtagtgaaaattaggaaatccaggtctcactggggtgtggtttctgctgcagagacacaacccgggacctgcatgcatctttagcgttgggtcctagttttcagcgctttatttgatgcagaggggatacctttcctttacgcataccactctcactgatcctaaataattacttgacagtttgaatgatctcattacacttccagactggcttcttctgggcatctaatttgttcatgaagtgttgaacttcggaggacctgccagcattcaggggatttcagcccgactcagcactgttgatgttgttatgtgaatttgttctatgacggttttgatggtcttgggattagccactaaacacacctggtgttctgtttactctggcaagctggggatttttttttcattttctttttaaaattccaggatgaattattcatcattccttagaatttgggtctctttcatcttcgcacttgtacagcaccaaggtgagtactacagaattccataaagctctcagttagcatgctcttgaattgataaagagacacttttattggaaccacaattgtaagggcaggtgcatgtgtgtctacagatacaagagaaaaatgtaattaaatt

SEQ ID NO: 8505 - DNA, 2300 bp, Homo sapien
ttccatgttcatgttccatccagacacataggcaggtattgtggcttatctctgaattccttggtactggctggttggtaccatagacccttgcaaacaatgaataaataaattaccctgatccatcagtgtgcctggatagaaaagacatgtaggaatgctgcaccccaggatgtgctattaatacacttatacaccacggaatactatgcagccataaaaaaaagaatgagttcatgtcttttgcagggacatggatgaagccggaagccatcattctcagcaaaataacacagaacaaaaaaccaaacaccacatattctcattgagtatgtgggagttgttcaactgtgggagttgaacaatgagaacacatggacacagggagggaaacatcacacaccggggcctgtcagggggtggagggcaaggggagggagaacattaggacaaataactaatgcatgcagggcttaaaacctagatgacgggttggaaggtgcagcaagccaccatggcacatgtatacctatgtaacaaacctgcacgttctgcacatgtatcccagaacttaaataataattaaaaaatacacttaaatttatttttaaacaagattgttctcttgaggttaacttattactactttgagttgtcaggagtgattgcaaatttcttgggaatccctaagtcaccaagaataaagaccacttgtaatagctaaggcatattcaacaataaaattctagagattcaggatatttgatgtttgcttataacatttcacttttgagcttttattcgtttaataaatgttttatcatctatgctcaataacattttaaagtgtccattcaaatcatttcattgggcaaaacaatgttccttccctaatttccctcatcagaatagccattttgtctctgtgctcagcctataccaccaattactgtttatttcctgtccttgtaataagcaacatagttatttatacatgcccatttctcccacagcacataagctttttaaggttgggaaccatgtctttgtcattattgtaacatctctttccattcccggtgttcagtacgatgtgttaaacgaagtagacactcaaaactttttaaaatttatttttatttatataatgagtcttttttaaaaaaaccacctacactattttaaattcatttgaactttgtccagtatcctatgtacatttgaagtttaactaccggaaaagtcttttgaaggcagatcgaatcatgttatttttttcccttaaaaatccctcatttctgtcatgtattccccatattatttatgtaataggtaaagtggcccagtttgccactttgaagttgctgagctggtatcacaagtcagtcccctctgttttaatctctgtttaaggaaagtcactctgaaacgacagatcttttggttccttatttctgctttcctccgtcctcttctgcctgtgaagccaccctcctctgctcagctctgtttcaggaaatcggagctgctcgattcatgtgtagcaaatcaaagccaattagatctgcgttaaccttggttttcaacaacttgtatcgtgaaaaggtttctgtccatgtttaccctcatcttgtcaccatttagacccctacatacaccggctcgcggagcctccagccattcagcgctagaaaatcggggggactacgtcttaaaaccttgagcacctgtttgggaacatctgcacctcctcccttgagggagaaaacgacccagacattcgcgtcaaaggaagtgtcgtctatttccctcaacgcagggcacccgttctaggaatgtttgtataaacaccgtaaacctgcctggtaccaccatgaatgacacaagagctagtttaaaaagaaagcaaagaaacaaacgcaaaacccgaaaccgcatcctccaccgcaaaggtactcggatggggcgcccgccctccccttagtcagaggacaaagggggcgtggccgagcgcgcggcgcccacgtgaccgcggagagctgcgcgcaggcccttcgcgcgatctgccgtcatatcagcttatggcgccggtcgctgattggctggccgctccagcctcccggcccgcttgctggctgcccagctgctaggacagtttgcagagcagtggcgtgcggagcggcggcggaccacctccaggtggggacggtgggtgggcggggaaggaagcggaatacacctgagcgggctgggccggggggcgatggaataaaagaagatggagagacttcagcgcctgg

SEQ ID NO: 8506 - DNA, 2300 bp, Homo sapien
aatacacttatacaccacggaatactatgcagccataaaaaaaagaatgagttcatgtcttttgcagggacatggatgaagccggaagccatcattctcagcaaaataacacagaacaaaaaaccaaacaccacatattctcattgagtatgtgggagttgttcaactgtgggagttgaacaatgagaacacatggacacagggagggaaacatcacacaccggggcctgtcagggggtggagggcaaggggagggagaacattaggacaaataactaatgcatgcagggcttaaaacctagatgacgggttggaaggtgcagcaagccaccatggcacatgtatacctatgtaacaaacctgcacgttctgcacatgtatcccagaacttaaataataattaaaaaatacacttaaatttatttttaaacaagattgttctcttgaggttaacttattactactttgagttgtcaggagtgattgcaaatttcttgggaatccctaagtcaccaagaataaagaccacttgtaatagctaaggcatattcaacaataaaattctagagattcaggatatttgatgtttgcttataacatttcacttttgagcttttattcgtttaataaatgttttatcatctatgctcaataacattttaaagtgtccattcaaatcatttcattgggcaaaacaatgttccttccctaatttccctcatcagaatagccattttgtctctgtgctcagcctataccaccaattactgtttatttcctgtccttgtaataagcaacatagttatttatacatgcccatttctcccacagcacataagctttttaaggttgggaaccatgtctttgtcattattgtaacatctctttccattcccggtgttcagtacgatgtgttaaacgaagtagacactcaaaactttttaaaatttatttttatttatataatgagtcttttttaaaaaaaccacctacactattttaaattcatttgaactttgtccagtatcctatgtacatttgaagtttaactaccggaaaagtcttttgaaggcagatcgaatcatgttatttttttcccttaaaaatccctcatttctgtcatgtattccccatattatttatgtaataggtaaagtggcccagtttgccactttgaagttgctgagctggtatcacaagtcagtcccctctgttttaatctctgtttaaggaaagtcactctgaaacgacagatcttttggttccttatttctgctttcctccgtcctcttctgcctgtgaagccaccctcctctgctcagctctgtttcaggaaatcggagctgctcgattcatgtgtagcaaatcaaagccaattagatctgcgttaaccttggttttcaacaacttgtatcgtgaaaaggtttctgtccatgtttaccctcatcttgtcaccatttagacccctacatacaccggctcgcggagcctccagccattcagcgctagaaaatcggggggactacgtcttaaaaccttgagcacctgtttgggaacatctgcacctcctcccttgagggagaaaacgacccagacattcgcgtcaaaggaagtgtcgtctatttccctcaacgcagggcacccgttctaggaatgtttgtataaacaccgtaaacctgcctggtaccaccatgaatgacacaagagctagtttaaaaagaaagcaaagaaacaaacgcaaaacccgaaaccgcatcctccaccgcaaaggtactcggatggggcgcccgccctccccttagtcagaggacaaagggggcgtggccgagcgcgcggcgcccacgtgaccgcggagagctgcgcgcaggcccttcgcgcgatctgccgtcatatcagcttatggcgccggtcgctgattggctggccgctccagcctcccggcccgcttgctggctgcccagctgctaggacagtttgcagagcagtggcgtgcggagcggcggcggaccacctccaggtggggacggtgggtgggcggggaaggaagcggaatacacctgagcgggctgggccggggggcgatggaataaaagaagatggagagacttcagcgcctgggactcgggtgggcgaggcggaaggtgtcctcgcagcacggcttttctccgcgccgcggttggttagcgagtgccctctgggtgctaggcgttgggcggatggtaggatcgcggtagcatacggatccgagtcctgcgccgagtgagaggagaggctggcaggtagcctggcatcccgaagac

SEQ ID NO: 8507 - DNA, 2300 bp, Homo sapien
atcttcaaatccacacttaggagactcctgtctctgttttctgctgggactctgacacttgctcttgcagagaaggttctcattaaatatatgttggaaaaaccccaataattgaatcatctacaggatgttctcactttagccatattcccttcattttcctttgagggctaaatgggagtagagatatctttgctgctggtcctgagagaccatggggttgtccattcctggtaaggtgatgctgaccagacagagctgatctagatgaggggtgggaggtgacagtggttcagtggctttcttggaggatgcatgattgtttgaattattatttttaattgacatatataagtatataataaatatatatgttatatatatgagttagagctgaattgcacaatatgagcaaggcgttcctctcagcttcaaaaccagctctgggttgtaaacaagctaccacttcctcaatccctctgaaataacatcaaagttggggtgcaggatgaaggcaccccaataataccacactggggaaagtgtggtattttgatacctgtatacaatgtataatgaacaaagcagggtggttaacatagagaatgcatgatttgcttggtggggagaactggatggttctgtaattatgttgagatggacagaaagacatcatctgacttggggagaaaatcgggtgtgggaggaggtgggagagtgcagaacctgaggcagaggtccccagcaagtctggcatggggtagggtagggtggttgaatactggcttcagggagatgaggcaagctggcctgactctggcaggttgtcagtggtagtcctaggtagaggagggggctttgctaagctacctgaaaagtactagagtgggccggggtaggaatcgggctaccgtggcttgtcggagatgaggaatgtttttagaaaattgaactgaccatcccttccttcccctgaacagcagcttgtatgcaactataaaggtagtctccctttcagccctgcttgctgtgtctttattcttatcaaaaaccaggatctgagttcagagggcagtgaaacataaaatgaaataggaaaggttgcagtagtacatagactttggctgctcccactaacctgcaaaaaaaatattttccttgggcgtaccttagcagttccatggcagaagttttatctcctgtggttcagagagtttggctcgtcaagctgaatgtagggttaaagtgtgtcctccctcctctgtgggtgtttgcctagctcctggctgtgggttgaagggactggtaaatatgtctattttactgctgaggcagggtggctcagtgcttggtcaccttggagggatcataagcaagccgccgctggggccctgtgccacgcacaggtattcatgcgtgcgtgcaagcacaccctgtatagctgtgtaataattgtccaggtgtggtgcattctttgtcagatgtacccttgtttttactgcctctgtgcaggatgtttatttgctgtgcttcaggctggggcacgtagcttgatcaagggtagtttttgctgtggcccctgcaaatacgttgtggtgcccagagtagatgaaaaactgtgagtttcccaatagagcgggttcatctggactcttgttggttgcgttctaggagctaattctgtggctctggactcttccctggaggtggggatgaggccggggccggggggaggtggtcttgtggcgctactgcgggctgtgcactcaggaaagtggccacggtttaggacgacctcgacacgaccctgtataggacgcaactaactccagagaaaacgagcgagccccatgcaactcttcattcctgcagggagaacaaggaggtgtgcccgccagggaagggacgcacccccaccggcgctcgctgccttaacttccccatccccgcgccagggaggggccggagtcgccgccgaggccgccgagcgcagaaagtgcgcgaaagggacgcgctgcgagcctcacacgtgacggcgccgcgccgaaccgagcgggacctggcggcagcggcggcgggcgcagcggggcggcccggagcggcgcgggcggcctggagccccgggagcggcgcgcgcggtcccggcccagcggctctcctggcctcgcgctgcacattctctcctggcggcggcgccacctgcagtagcgttcgcccgaacatggcgacacggagcagcaggagggagtcgcgactcccgttcctattcaccctggtcgcactgctgccgcccggagctc

SEQ ID NO: 8508 - DNA, 2300 bp, Homo sapien
cagctcactgcacctccatagaaccacactcaagtcaagcagtactgttggaaaacatcaccattccttaggtttaaacgttgaaggggaaagtcgtgattacaaagtggaacttggcttaaggctaaaagtaggaccatataatttattgtcacatcttgacacttttgagagtgaagggggtgctattcataaccaccagagacaacttagaaaccaggtctgccccagggaaacacagaggcaatggtcatccttgctagaaagatcattccaaatagatgttagttactccagagttccaagaggggcacctcaaaccccttcagtcaccaacctgtgcttgcattctgaagggtctgcaccagatagaacttgtggcagaaagcccagtacagggaagttcttccttttatctgactcaaatccttacagattcaaattaattccacttcttattaacctcagagcaagaggcaacaatggcataggaaggcagccacagagaagaaaaatctcacccttgtaccctcaccctccggttaggaattcctcattatgagtttgactgctagttctccatccttcagctgaaccaaactcaatctggctggcccagaaactcaaaagcccagggtttgggagtcactcccagtgagaacagagttcatgtccaacctgccccacatcccctggagcttttcataaaccaaacccaagaaagaaatggcacatgtacacatatttttgaaaccagaaaactttttcctcaacctaaactatagcttcaggggacctgagcactgggagggattgtctcccaccagcccccaactcccagttcccagaatgctgattcaagagcacagcagagctgggctgactgcggaggcccaatgaagaagtgggccactcctcctccttctcccaccctccatcagccccatgctggtgtcgctgttaagagcaaggaccttgatgacttctttttgttcatacacatatttgtcatatggggtggggacagggggacaaggatctgggcccaagaggaactgagcatgcaggttcctgcagcctgtggccaccattagttacatgccctggggcacacattcttgcccagggaccaatagtggagggaaatccaacgctcccacccagtcaccaccatcctttccccctttataccagatctattttattttagaaaggaggtatttcagcagcattgcataaagacagggtgactgcagtcaagcaaaggtcactgagacaatgcagacaaaaactagagagcaggccaccttcccggtatgaccttggactagtcacttcaccattccacgcttcagtttcttcaccaacaaaatgacacaatagggtgatatgtttacaaggttcgtcctggatccaagggttgaacatttaactctgtatttcctgaagaaatggctaaagtgaaattagtgagaaaaggcagaactcagggtaatcttttattaataatttctacttcaaaaggaacaatttgactctagaaaacaagtgtatttaccccctcctctggtcctactttttctcccccaccgaccttatacttttgctgatgtcaatcttaactgcaggactgggagtctcatgaggcaataacacggtcaaattaattttgccagtgctgatcctaacctacaaactccatctgcaattcctcgcagtaagtctgaccataaaagtgaaattcacgttacttatgatctaataaacctattgcctgggtagaaataaatcacttatagaataataatgcccaccaaatttcctgcagtcctttcaaatctccaagtgccatgaggggtattcctctccaaaataaagttatcttgacgggggtgggagagtcagcatcttgaagggtggggaagaaggaatggagagcatctcacacgctcgccaaaaattaaaaattaaaaattcagcctttacacacgcacacacatacacacacctcttgtctgactgtacagagatagtcgacaagctttcaggtttgcccacttttattgtgctaataatgctaagtgtggaaacccccacctcgtgctgttctgtgtaagtgtaccgcaactgcagggtgctcgcctccactgccaactgatgatacactaaagaaagcccgttttttatccagatgtaaaatgaagctgcacccctcctatacctgccggaaactacatctctctgcacacaccctggggtaatacgcactgcacccggcgagttacctggaatacgtttac

SEQ ID NO: 8509 - DNA, 2300 bp, Homo sapien
gcactgagagctctcattttccccccttgctcgggatggtgccacaggaggctgtgcgggccccgctccgcttcgaatgggtgagttcagaacgctattcgtctttacacttctatagcctccgaatcctacttcttggtcttctcctttgaaaacccgatttctatgatttttgcatgcggcatacttgccctgggggaaagagatgcctcctattttctcttcagtcatttgtgctagtcgtaaattaaagctttgaaaagacactaaatccttattgtagactatggttttaaaaacttgggcatttctgagtctgtgcatattattttccgttttagtgaactattttgcccaaatcttgaaagagttttctctgatgtactcgtgatcgtatgtgtatgtgcgtgattgtatatgcgcccccagatactgcgtatgtgtgtatatatgtattaggcttaaacggaatctcaattttgtgaaggaaaggagcttagagaagaaataccataccacctgtttgttgcatcttagttatgaacctcgaacagaaattgcctgtcattcttgttttgctttgctttgtctcaagaaagaaaacattgttgcgctcctctcagtccctgagaccctaacttgtgatgtttaccgtttaaatccacgggttaggctcttgggagctgcgagtcgtgcttttgcatcctggaaatttggtggaattttattctttaaagcaaaaacaaaagaaaagaaagtttgtctgaggtgattgagtatacctctgaggttttcattgttagatgggatcaggtgaccagagagtggcagctcctggatttctgttaaagtaggtatatattttgctttaatagcgtgttggctgctatgtgtatgtatgcatgttattgatgcctgaggcttgtggaactcatctgcctggtctattccttgagagcaacacgcagtagtatacgagcgtaacaagaacagctcagtacctggtgcttgacctcagaacatctcagctgaagtcccagcatgccccatgtctccaactttcaaactccacagttaatcttaaaattgtgcccaattaaaatgggcatgtgaatatattatatattcagtgtccacacatgtgtatcatggatggctagacagtgaacatacagacgcagataaaggcaaactaatagtttggagtaaaatattaataggttaaaattctattcttgcaattccacacaaaggatggaagttatggtattaataaaaattaagtttgtatgactttgcaagattttttaaaaataaaaggagggataccacctccttgcttggtatcttttacaaaatgttatactttatggatataaaggtgataaagattggaaataaatcttctaaatatgtaaaatgaaagcaacagcaacagcaaacacaattatcgtattctttgggagtaacaaatactggttttcattttaaaactaaggaaaattttatcagtacttaaattcaatccaaaaaaggttttataacacccaaactgtacatttaaaattatcctttcttaaggtaatggctagcattacctagtttgtagttttcttgagctgtaactttttataactgaatcatttcagtgatttagggctgtctcgtagttggggaagagaaacagtaacttacctttcctttgttgtgaaaaattctagtataaaatatcatttaaacaattttcgtattattgggccaacatttctcttctatgtttgaaaaacacctaaatcaaccccaatccaaatgctttcttcttctaaagactttatattggttgtagccttgttttatacatgtaattgaaggttagggaaactgttctttgcctgttattgttttttattttaagtgtttattgcaattttagtcattaatgccaaattgcaatcaagaaaccattttgtatcagaaaattgaactgagaatatgaactatgcaacgattgcaccacgtcttttgttgaaacctcttgtgtagtaatattagaatattactttccagtctttgatagtccgaatgtgcttcaaaaaaaatagttatttgattgtcgagtcatcgttagtttatattcaatggtttaatgacttcccctaccttagctgatgtgtatgcataggtatttggaaattatagcaaggcatctatttaacttatgaatctatattaccacattattcatatccaacatttgtaaaacagttggtgctttttgaagttaaaatatatctgcagtt

SEQ ID NO: 8510 - DNA, 2300 bp, Homo sapien
attgctcttttatcccgctaaatgctgattgcaaagaaatatttgggcattgttgactttccgtccataaagaaaggccaccaagattcacaaaatccatcacctgcactcatacatgcatgtgtgcttgaaattcccctaggatgtgaaacagttaggcagagaactgcactgtggtctcccttcctcacttctttccctccctgtttttccttttcgaaaatgtgatacctgatctctaggtcttgcgggctgagaaattttttgtatttgtataatgcagtgtctggccttccccctgacctgctgatgtatttttggcctcattagtagtcagggagatgccttagtgcatccagcactgcaagtcagggatgagacacactacaacaggagagggagcaagcgcgagaggatattagaagagaggcttgtctccaagatatggaaggaagtgagaaatgacagggctgcaagctttgtatgtaggagcccggcagggcgggggagcggcgaggagagccaagtggattctcagaaaaggggggaagccatcgaagagctaaaggtgattagagggggatattgatttcttattctgccagagatttaagcaggcatgcgaggaatctgcaccatggttggcaaaaagagacccgttgcctcctgtaaccagacactcaggctttccaggagcccagggagcaagccgagaagaaagggggcagtgtggtctaggaaaattcaacttgtcgctgatttgtgcctgatgcctgctgtccgtcagcagcctcccttacaatctttttttctctctctcctttttttttccttgccttctccttcttcactgaagcctaggggagccagtaaagattaaatgtgcttctcaaaggcagccacttcatgctgctatgtcgaaagggccattattattattatattttaatggtaaaagagaaaaggagagaggttgagcgagcgagagagaagctaggtgtgatgatgacagactagcttttctgagaggaaaaggaaaagggaagggagagaaaaaggagagcctctgagctcaacggaggattgtgcctgagaagaacccacagaggtgagaaaaaagttgtcttgaaggtgggggtgggggggctgctaaacagacactgtacagagggagaagagacataatttagctgtgttgctagtatgattccatttttaaaggaggggagggggagagtctagagctctaactgtttttagttgcatatggaaatatctaaaaaaatatttagcatttttactaagtgcgttgaggcctctccagtgtcctcctggctgtggctgctttgtcattctctttgactagccagccatctaccttgctcaggcctggaataaaagaagaacaagaagaagaaagaaatgaaatgaaaaacagaaagaaaaaggagaagaaacatttgtaaaagggtcatcttcccatctgcctcccctccttttcctttcatttttggtggcggcacaggaaagccccacttccagtctgatgaggaaagcgacaatctatcaggtacagaaccaggggctgtctgcgaagatggaggggaattatgcttcggattcctctgaaatattggccaaaggcttcaaagaatccgcagcgggaggtgcggggggaatgtctctccccagcccgcacccagcccttcccacttcgtgtctaccaaatgacagcctggtgctcgctcttggtgatttggccttgacttcagccaagcagctgatgcagacgaagcctccgtttgcaggactggcaaagtgcacgctaaagaaagaaggaagaaatttttcaaaaagcagctctggggaggtttcatactccccccccccccccgcctttttttaatttttaagtgaatattttccaaatttgatcagttccagcccctccctccactcccacccaactgcccttttttctctcgtcaaagcataagctacagagttacagtctcgagatttggtgtatcgcttcctgcccccgcctcccctccccgcccccgttctccgtcctctattgaaacacctcgcccagcctagcgcactgagagctctcattttccccccttgctcgggatggtgccacaggaggctgtgcgggccccgctccgcttcgaatgggtgagttcagaacgctattcgtctttacacttctatagcctccgaatcctacttcttggtcttctcctttgaaaacccgatttctatgatttttgcatgcggcatacttgccctggggg

SEQ ID NO: 8511 - DNA, 2300 bp, Homo sapien
tctagcaatatttcatcttctgagagtcttacagatgttaactaattaatcttcacaacactccatacaagagaggtaaatattattacccacgatagaagatacatatgtatatgctaaggacagcaaactagttcacttatttatcatggttcacttgatatagtaactggtatttttaaaacacccatcatagatacaacaattagagatgtgcttttgttaacaaagccactacccacttctagcgtacccttgggtactaaataattacccactttgtgtggttatctagctcactaattacccacagaaattggggtcaggtgttaactgcttgaaataagtatcctccaaagacatcgctgagttgtatagagaaaatgatgtgttcatagcaaaactttcataagctatatatttgtatatctttgtaagcagagtgaatacaagcaagagcaaattagcttattatgtgaaaatcatgctgaactattgttgcaaatatagagaggtttaaaagagtctcgggaaatctcgtcctctatttacccttcgttttgaagatgggtgcaatgacatgattcccataatctggccttcatatagaagtacactaagacaattgatgattctggttaggaatgattcattttggtgtacagggaggcacccagtgagtcaaagacttttttttttaacagctccacccttcatgattattctagcgtgtttcttttttctccatcagtctagtgaaaacaccccgttagccaaatctgaaaaagattctaacctagtcaccaactcctggcaaccacctctttctccttcccaataacgacaaaaagaaaaaaaaagtattacaaaaatccaacactctcattttgcctttagctgttatgcgctcctcgcctttcctctctacttctctcctctcccttcttcctctgtctgtatcttcttcttatttgtgcattttctccttttccttggcatctaggtatgcttctgcaggtctcacagtcagagacaaagcacaattatgtctgagttgagcacaaagaaactatcttttaaaaatattgacttggaggaaacctgcatcctcagatacctttctccctttccttgctatttacagaatctgacattatatttaataccacgctgccggttgtctgcatgattctaggcaggaaaattgggttagaacggtaacatacccactgtgtacatagataggtagagaccctaattttcggcagatccatgccttaaaggatcacagcagagcagagctttaaaaatgagtgccaacagaaatgagaggagatgctcccccaatcaacttaggatgtcttccttttttcttgtgcctctttttttttgtcatctgaaatattacttgtcattattggggaacttgaggctgatcgatgaagtgtatatgtgtctgtcagacatttgaagaggaaaaacatgcttcaggaataaggaaaatgcctgcagtgaaagcaaagggtcaggatgagcttcagtgactgatgagttcatttcaaaatccaagggcacatagatggtaaattaatacatatggcaaatacagtcaacgagcaaaccccagccactggaaggaaagggaattttagctctgtagtcatcacatgcctgaacagagagtctacatatcttaaatgtagatccgaatcattgctcttttatcccgctaaatgctgattgcaaagaaatatttgggcattgttgactttccgtccataaagaaaggccaccaagattcacaaaatccatcacctgcactcatacatgcatgtgtgcttgaaattcccctaggatgtgaaacagttaggcagagaactgcactgtggtctcccttcctcacttctttccctccctgtttttccttttcgaaaatgtgatacctgatctctaggtcttgcgggctgagaaattttttgtatttgtataatgcagtgtctggccttccccctgacctgctgatgtatttttggcctcattagtagtcagggagatgccttagtgcatccagcactgcaagtcagggatgagacacactacaacaggagagggagcaagcgcgagaggatattagaagagaggcttgtctccaagatatggaaggaagtgagaaatgacagggctgcaagctttgtatgtaggagcccggcagggcgggggagcggcgaggagagccaagtggattctcagaaaaggggggaagccatcgaagagctaaaggtgattagagggggatattg

SEQ ID NO: 8512 - DNA, 2300 bp, Homo sapien
gaggcaggagaatcacttgaacccgggaagcagaggttgcagtgagctgaggttgcgccactgacctccagcctgggtaacaagagcaagactcttgtataaaaaacaaaacaaaacaaaacaaaacaaacaaaaaaaaccagaagaagaaaaaaaaaagaaaaagaaaaaaaattaagggccctggagttcaataattgcatcttatacatctttgggtctttgccaccttgtatggtgcctggtatataattagatcaccccttctcccaaatgtttaaataaccaaattattccacttaaccttgtctaatgtatagtgacccagcatgtttctagctttctcagtagattatgagtctcttttataaaaatggtatgcattatttattcttcatattccatgtctcacattataataaattttaaaaactgttaaattgaatagatttgccacaaagtacagaaaattagtattctataaactcaaagagaagaggccaaatagaaatctggaaagcattcatcaataaagagaggaaaaaaacattgcaaagttcttactatataccagatcttgtgataatttatattccttccctcattaatcccccaaataattgagcaaagaagatattatggtccccattttacaaataaagaatctgatgttcagtaaggttaagtactctgcccaagttcagagttattaagcagcggactttggtttgaaatctatattgaatgatcccattatccacatccttacttttatgcattcagttttccacaagacacttgatggaatttcttatactacctataaattttgctagagtagaacattctgtgttccccctaattgaatgttacaggcccctctgtaaatttaggaaagttccaaagtgttccctggatacttgttctgcctctagcatgaaatgtacaaaagtagcagagaagatccaaaccagactttgctctcagagtaggctgcataactccctcttgtcttctccactggtctacatcagtcttttgtctacaaccctgacttttttaaaaatggtattggatgctaccattatggttatggttaactgggggcatcattggtgcctgagtttctactcaaataacataagggaaatcaagagaccaaggccatgatgactcaagcagtctccatggcttggtggtaaaggagtgaatccttccttacagctgatcttgcctttgtatatgtcacatattggtcctgattagaaaggtctataggctaatttgtgcaagacacattccttctcattataccatgatacaggccatgtgaaacaccagattcaatcttatagcctctctgctgctgctaagtaagaaacttctacttttagtgtcttttctctctcaacacaaaaatactctgtaagtcacccagatctgggttgcccatgattaccaggcttttcccaattagaaatatgactcatgttccattttaccaatacatctcaggcacagaactagcaaggaaagacaaaattaaaatgtttctgtaattccagcccatcaattgaaacaagatgtttctgaacttttcccaatgtgaagaacaaaaagtaatagcattttgtttatttatttgtgtacaacactgtggtcaggaacttgttgcttccccagggaaattgcttgcaagcatcactgagaagaggacttaacaattcacactgatcattccctgtggtctgccatggcgagggtgatactttcatgttttataagcaccagacaagagagctggatcaattttctctctcgatattctagtctctgttgaaacgactccctcagacatcagcagctccgggttctttctaaaaaataaagtaagtactcttaggtctgttcacagtaagggacaagaagtccaaaacatatccctgccttttacaattcagaaatcaacgtggagatctttcctacttttaggcagtacatacagcttcgctgaggtctgtgtgtcaaacttactgagaggaggacatcgtggagacttatcgttaattagcaatgcttatgcatgcaaaccttggtcagatgatgttgtgtttggagaaaagagagaagagaattgaataagtacatgaccccttggaagctgttttcagttgaggattttggtgagtagccacttgaaatcaagggaaattccatgaatagcaggagctgggaagaaaggaagaggaggaaggatcccaccacttttttcttcccatctaacaccgtgcttatgcaaa

SEQ ID NO: 8513 - DNA, 2300 bp, Homo sapien
gtggggagggactggagaacacatttttcttcctcgctggtgacagagggatgaactagttgatggtccaacttcatgaggacctgtgagccctatctattttgctcataaaaaggaccgatgacctctgttcaatggctggaaagtctccatctctgtgggccattatggtagctcctgagggctaaggggaagaaagcgtcctctgcctcatcttggaaatgtggaaatagagtgggtttccctgcaggttggaatcaatacccaactgccttgtctctggggaaggtggatttcatggcctaccatatgagttcagcagagaaatctagatcaataggagtgagagagtctgtaatgtggtgcctttaggcatctgtatctgaaaagggacttttatttgaattacttggaccttagactgaggcttcacctccatgtaggaacagcagtccattagtgatcctttgaatttatagtgagacctcgttcacagtgataaagcttccttagggcctaaggtcttctggtgcctctgtttgtggctgagtgtcctaaataaagggcaagtctgctacttttatgtcctattcggccatagctgtctaaccttgtagcgagagggagcctggcaaagtcaataaggtaagatggaaagcatccacagctcattacaatggcttcttctcgcccttgcttgccctcactcatcaccaagagtttgtttcccagtcttcccagaagaaatagtcatgccagtcttgtcatgttgcattggcccgagagaggtttttgttgtaaaatatattgtcttacttagattctaaagagaattagacttaggattaatggatttgagggtgctggctgcaccagactttctctttttcttgattttttgcttttaacagaggcttagctatcagcaggtttgtatcttccagtgatgggtaaaaggggatgggaattattttgtgttttttttctaccttgctctagtaacttagattgtgccctaaagattatgtgaataaaatgtgccagacctggttaatgcaagataaaaatcaacctgaactccttctttattagcaagaatgtccagaaatgatataataataaaaatattcttctcaggaatccaaatactgatcacagagaagctgctgaatagctttctcccattgtcatgggacagataaagacctgccaatacagaaaaagtttggggtcagccaggaatggcaaatatttggtctacattttatcatcaaccttcttcccccatggcagtgatgacttactaagtgcttataaaactctttcctaccaagatcagacatgatttcagaatacttctcactttccaaaaagccccaatcagtccattagagttggagtaagtggtttaatttttaaaaataaaagtaaaaaatggtggcatctcaacttctcatggtacgattaaaatgtctgcagaaggagttttggactgcatctgtgatttttcccagccttttctgtttacaaatcatttagatgcgagtcaagatttgactttccacttaccccacccattcttgcctaccaccccaaaaataccacaccaaaagaaatgggaaatatgaccctgcttctatgagccatccatgaggtgatgtctggttcgcattaaatgtcagaaataaattatttatgtaagatgaaaatacagatgtaattatattatggattaattttacccaagaatagcatcttaaccatttgaatgccccccgagagacactagcaatttttaagtatacattaataaccacttgacttgtggatatatagaaaacataaatattttacataggatactttgtacttgataccctctcttcaaatcttgaatttgtcctctcctcaaccctgtccatgtataaaaacaatacaaattcggagagcattgacaattaactcaggtaatggaaagatgggctttagttttagtctagatagtataaaccattttgcagaattgtgagtgaggcctgtcatctgttgcttatgatcagaatgacagaaacgtgccaatggattggcatgagtagaatacatgtctggagaccattctcaacctgaatttatctctgatgccagtccccaagatgagccattggttgcttattctttggggtcacccaagatggcagcactgaaggccacatggctggggttttctataccttgggattacatgttatacaaaacagctgactgacaatgcagaatgagggaagggacacctccaaatt

SEQ ID NO: 8514 - DNA, 2300 bp, Homo sapien
gggtgacagaagattactatagccagcatcagtttatcaagcatgaatttaaagaatgaattgaaagaaacaattcgtccagcttttatgtgccaggtactgtagtaagcatgttagatacacattgtatttagtccttatgatagccctgcagagtaagttgtattaacccaattgtatgaatgaggaaattgagttgggaggaaatgattaaatgctacaatgggagagctgtctgcaatttgttaagtaaattaaaagactgaccttatctactaagctgtccataaaagagcaaaatccttaccaaggtcaccatgggatttgattcctaagtcctcagtcttcactattctaagttattgacttgctcatctaaatccaacctaaattcaaatgcatgttgctggtttgatcagaatcaagaaatttgcttactctgcaattagtcatcggatttgcctctgaacatgtatgtagagatggttcactcttttgtactggtaaaggctgaagacaaaaagaaaatctcaccttttgtcccttgaaagaaaaagcttttcccattccagaagaccatggtatagtttccttaaaaactagctgtgtttcaaactcaaatgactcttgctgtggttgatgaaaagcacaatattccttctctcttcctgtaggaatgcagaaataggaaaacagaaagaaaaaaaagaaaagaaaaaagaaagagaaagaaagaaagaaaagaaagaaagaaggaaagaaggagggagggaggaaggaaggaaggaaggatctaatttatttttttctattcagaacagaaaaaatcaattagaacaataactttttttttctcccaaggggaaaaccaagttgtagcaactctttggagacttggaaggatgtcataccccattcatttatggcaatcagttgttgaacacttagcaacttcatttataaatgaaggagaacagtttggctggcagaacaacttacaaatattatattttgtacctgagtttattctagaacaaaatatatatcaatacaagcatttagaacacttattatggaaatgtcaaacctccagtttttaaccctttgagtgtttttttaaagacgtgaacatgtaaactcttcactgagtctatagctgaccccatgaaaacaggaaaacatgatgccagagcctcaaaatgtttctttctttctgtaacttggatggagaggtggagaattctcattctggaagggagaggagaactgcctggtttccattctgagcttagtataagaataactctgtgcaaatatatgaaggatttatatttttcaataatgaaaaaacaatttgcccacccgcaaccaccaaggccagtttagaacaggagagatttagggtagttttagcatggggcttaatggctagaaagagtaactaaagatataaattagttactaggaggaattgtgatcttctttttcccagagaattttaaaaatctgctcagcatccattttggataacctagttgctcttccatctagaaacaggcacctgcactcatgattctcgtgggcccagatgtggcagaagttcttttcccctctccatctcaggacttatttatacagtgtatgtattttataatttatgctacaagtgaatcacaatttgtcatcgttcaatggccagctcacttgcttcttttggctaattgtagaggaactgaactccctggagagagggagagaaacaggcaagagggcagagacccaatggtgctgcctccaaggagccagtgactcagccctgagttcccccacccccaaccaacttcatgaaaccacagcccccctaatgcacagtttaacattttctttagtggtgcaaccttgttctgagattacagggaatgctgagttttattagggttctttcaacaaactcatttaattgttgctgccccttagctagtgctgagtcactctcaaacttcacagcattccacgacagctcatccttcttgactttcctttttttttcccttttcctttttccttttttaagttctcttaatattttttattcccaacagacttgtctttggacaaaattgagaagaactcataaacttggcttcctcgcttctgctcctcaggtaagtttaattcctatttctattatgcaacgtcattgaagaatattttcccaggtttctgttgaagaactgcctttttttatcttttcgatgctggcactcttttagaattaaccatggaaaaacttgatgaca

SEQ ID NO: 8515 - DNA, 2300 bp, Homo sapien
gtcgttaactagttgtttggccaaatgttaagagttcaaatcttggctctgccatttactagccatgtgaccttggacaagatacttgacctctggctcagcaccttcatttgtaaagtagttcctagttcatagtcttgtcaaggaattgtttgagtcacatatgtaagaagcaaagaacaacaccagcatatagtaagtactcaataaatttgagttatcatttatgtagcgctttatggtttacaaagcgctttcacatacattattatctcttgactaagatccagatcatttgactttcagcccaggcatttggaaacaattcagaatactggataaaatccagcatgttttaccgaacacatccaaggaggctaatactaggtatggtgttgccagcccagtcttgtctttttgctccatgtcctggaagagcattctgcaaggtctccaggatatcccctttgctctggaagcagctactacccaggaagcattaattttccctcatcctttgtacagcaggaggcagaattaatacacattgttgcttaagctccagctgtcttatctccctgcttccaaacaccactggctattctttaggaaaccaattccgggctcagggagttacactgtatcatttcccctggtaaaaccttcacaggccttataaagcaacctcaaaaagccactccatgggtgctggtcaccatccctcccccatattccaaccagggacaggcccggactgacatttctggaaaacccagtgtgtgcaaggttaggttaccacggtccataccaatgaggaaattaggctgtagagagaagtaacttgtctaaggcaccgcagtggatacgagtgctgtagctacgcacttaccagctctatgatcttccccaacctctctgagctgagttttctcatctgtaaaactgggataatgattaaacacactcctagggtcagtataaaacttcagtgagttcattcattacgattagcacaatgactggcacatacaagagcccaataaatgttaggttttattattattattacccaaaaaagactatcagttagggtgtactcattgcctctttcattatagcaagtgggacccttgtccctgactgaagacaatgactttgtttccaaacgaaagagggttagcatcccccagccaaattcaccaggtggggcatggggcatcaatatggttgtggcttccaccatctttgcagtgggagtagttttgtccagcctatgatacaattcacttattattgtgcagtggtgattcggtccgtctttgaatccttttattgacaggatatccactccctaatgaaataagcccgttcccttttgaacacctcttataattaggaagtatgttttctctgttccttcttcctctaccctcctagcccttccttcttctcctcctccttcctcctttctttttcccttccctcttctttctgccctgtccctcttttcttgtcccctcccaggtcctgccacctctgagaacctgaggtccttctccccaacccctctgccccaccgggaaggcactattcagtcactgaccataaccttgtagagcgcagtaggtctttagtgcagccacttggccggctgattgggaactcaacttccgatggtcctaacaaccctttgggttttgcaggatctttgagaagcaaaaccttttacctaggccttacggcttggccttctggtccattagtatcatccaccagttcacccaatttccattaataaccgcatctagaatcacatgaaacttgagatgggttgatctcctgtcttgaggcccagctgggcgggtatgccagccaaggagagggctggggcgccgggggtgactctcgggaggtgaagcacacaagcagcccataaggttgggatcctccgtctccaagtagcgcgactacagctcttgcccgcacggagcagcctcggacagcgcggccgctttaagagaggggcggggcccgggtacaggcaagtcagggccagcccacaaggctccttttcctttttgatccattcaaaaattactcattgcaaattcccggactgctaggcgaggagagggaagggggcggaggagacagggctactgcaggcgcagagctgggggcagccgggggcccgagtggctgaggctggtcccgcagcggccgcttgccggcgttctggctcctgtggcctcaccaggaagcgtcagagtcccgacactggggaagctcggagcgccgcc

SEQ ID NO: 8516 - DNA, 2300 bp, Homo sapien
tgtgggtcaggttcctgggaaacagaagctgatacagagatccgtgtgcagaagtttatagatgagtactcttggtgacaagaaggaagcaagttggagaatcggtagaagctggactgaggtgcagttacaacaaagatctcagctgatcctgatcccttggggagcttcagagttgctccacctcaaggcaagggaaaaggaccttgagaccccctcatggatgccctatggaggaagagtgaccctgggtaaactgttctcttctactgaggacaagtataaaaattagaagttcctggatggaatattatgagcaaaagggaaaaaattaaaaaatgaaaaatttgaaagacaaaatattgtgttttggaggattttttatttttatttttttaagacagggtgtcactttgtcacccagattgcagtacagtagtgtgatcacggctcaccgcagcctcaacctcctgcattcaagcaacccttccacctcagcctcccaagtatctgggactacaggcatgcaccaccatgctcagctaatttttgtattttttgtagagatgggggtctcactatgttgcccaggttggtcttgaactcctggcttcagatgatcctcacacctcagcctcccaaaatgctaagattacaggcatgagccactgtgcccagccaacaaaatatttggaagacatttttgatgagtaagacttttcctacccaaacttcatcaaatttatcagagtattaacactaatttcaattagagccagtaagtagtgtttccttttcattttccaagcattgcagactgatctctgttttctaaacataaacttactaatattttactgtgtgctcctggaaaaactacattaaatctatctcaatttgtccaattaatgaaaattaaataccagaactgttcatatgtacattgtctcccccactagattatattctcctgaaaaacaaggaatttatgttttttatttgagcatgtctcaaagtagtgcatactagatgctgtacaggtgacaagatgaatgggtggatagaaggatggatggatggatggatggatggatggatggacggacggacatatgtatagatagatgggtgggtaaatggatgaatgagtgggtgaatggatgaatgcgtgggtggatagatagatgggtggttgggtggatggatgagtatttgcatgtatagatagatgggtgggtgaatgaataggtcatggacggatggatggatggatagatggatgggtgaatggatggatgggtggataaatggatggatggatggatggatggatggatggatggatggatggatggatggatagatggatagatggatggataaatagatggatggctggctggctggatggatggagagatggatggatgtgtggatgaatagatggatggatgggtggatggggaatgagtgggcaggtaatacatgagtgagtgggtggatggaaggataaatggatgggtggatggatgtgtgggtggatggatggaaggatggatggatggataggtggatgaatagatttgtatttgtgagtgggtggatgaaaagatgggtggatgggtgggtggacagatatatagatttcaaaaatgagtatatctatatgaatgaatgaattcctccccgacaacaattataaattgatgtcagcatagaaataaaatattcccaaaggttgagcaaaaattatctaattgtatttatctaataaactagaaaagtaaaaataaggatgacgtcactacacagggacattttacagtatttctcccacccatgctccctctaaaaaccttgcaactagttgatttaccagtactacccacttgtggtaaaacaatttttgtcaccaacacatcactcacacctctctgccatcaagataatacatgtggtccccaaaatgttccaccaggaggtgttctgggggcagctaactaagagggggcttccagacagatggaggagttgatacacatgaggtcacagatctactgcctctccccctttaaaagaaactactcagctccatttgtctcagaatctagaggaagttgacaaaggtgccacagcagcacagcacagtatgtggtggagagttctcagcttgctggcatggttccccttgcaaggtaaggacttagagttatttttgttgttgctcagctgacttaatgttttgccacatctacctatcagtcagtcaactgcatttacagaggagctgctgtagaaga

SEQ ID NO: 8517 - DNA, 2300 bp, Homo sapien
attttcagaaaagccagttaaaatctcttctggatagtgcagaaaacactggaagagtctaaagaaccacagcatcaaaagtagacaagtgtgaatgactcagcattgattctataacatattctggaagccactattaggactaaatccttttgcttgaaatttgcttgcatgtttgcagttgctataataataccttgtataatatactgggcagaataacactaatggtttcagctacgttgcttttatttcttctacagacattgaggtcctactgtgtactcataagacaaggtccctgctgccaaaaaagtaaaaaaaaaaaaaaaaaaaaaaaaactaactcaaataaaaaacagaataaaaagtgctaaagctgggtagtaaagacattttccaatttcctgtgtttcctatcattaatgaggcaactggtattgaagcattctttttttattttattttatttttttgagatggagtctcgctctgtcacccaggctggattgcagtggcacatctcagctcactgcaacctctgcctccccggttcaagcagttctcctgcctcagcctcccatgtagctgggactacaggcgtgcaccaccacgcccagctgatttttgtatttttagtagagacggggttttgccatgttggccaggctggtcttgaactcctgacctcaggtgatccactcgcctaggcctccgaaagtgctgggattacaggcatgagccactgtgcctggccgaagaattctcttttttttttttttttttttttgacaaggtctcactctcacccaggctggagtgcagtggcacaatattggctgacttcagcctcaacctcctgggctcaggtgatcctcccacctcagccttccaagtagctcggactataggcacgcgccactacgctcaactaattgttaaaaattttcgtagagacaaggttttgccattttccccaggctggtcttgaactcttgggctcaagcaatcctccagctcggtttcccaaaatgctgggattacagggtgagccactgcacctggcctcaaaccaatctttgaaggtagttattcaaatctacttgttgttttaatgtgaagataattcctaatgcttcctttctttattcttttttgaaaccttttttgatagtgaaatattctacccatacataaatgtacagcttaatgaatttttacaagatgaacatctatataaccatcattaaggtcaggaaatacagtctcaaaaacattcttctccctacctgccagaaccgaccacaatcctaacttgatgggaatcactaagtgggtagtgtttcccataaaattgcttttttgctttttttcatagtttcctccactaagtatggagccacaatcactgtagagtgtaatttagcctgttttttatatacaaaaatcatacagtatgtactttttctgggtttttgttgttgttcaaaattgtgtttttagtatgcctccatattgttacacatagttgtatttcattcatttacagtgctatgtagtatgccagtataggcaatagcataatctaattaaccattcttttgatggatagttcagttatttccagtttgcatgcacaggagcacgcacttcttagggtaaatacctaaaagtgaaattgctggatcccaaggcatacatatcctggctaatgtcaaaccattttccaaaatggttggttgcatcggttctcacgtccgcccgcagaaggtgacggttctttgcactacgtcctccctagcacctgacgctgccagacgtttcaactttggacttttcgactcaacttatggtgagtgtggtattatccgctgtggttttaattggccttcttctgattattaatgaattaaagcatcatttcaataaacagatatttattggccatttagatttctcgtgtgtttgtgaaatacctttccatttacccattatttaattgggttccttttcttcttgatttgtagcagttcctcgcgtattttagtagttttatttgtggcaaagatctcctcccccgggtggcctctgccctccggcgctgggaagtccgggcggcgaggcagcctctcccggggcgttcgggctcctccggctctgccccgatgtcgttattacggccgtttgcagcctccgtgccagggccgggggtgcggttcgggacgcgggatcctaggtcgggtcctgccccgcccatgtggcgccggcgtctgtgttgtctgcggtctccagggcagcgc

SEQ ID NO: 8518 - DNA, 2300 bp, Homo sapien
atttcatttaagaagagaagttcaagggactgaattattttaagagtaattctaagttgcactataacgcttaagcttgctcttcaggatctcaaattcagtgaccttagctcctccagtaaaaccggtgttaaacaatctcttttacttaaaatgtgttagtatttgatagatttgctgctttcttggcacatcctaaaaaagcaacaattaaaataataaggcagaatgcaatatgtattttaaaaataagagacaaaataatacaacaaaccagtctgtaatattagagaataatatgttagtctaccaacagggcagacttcgagttcaatagaaaactcacttcgtgtgtatttacatatgaacgttcccttttgcctgttgtttgttaaggtgctttcctccaaggatttgatgatgctccttgcaaacattagcaacaaggtcaacattataagcaatcctaggaatagtaataaggttgtgtcatttaattaaagttaggatttgccaaaagaacaagagcaagccattaagacaaattttacagcaatttctaatggtaaaggtttctgttacctgactcacagaaaaaaaaaaaatgggtataaaggcagtgagatagaaaatagaccaaaatagaaatgctaggtagagatgaaaggaagcacaatccaaaaacatcatgtccgttcggtcctacatgaactcaaagcaccctttccatggctctttataatgacccttacagacagtgcaggttcacttgaatcacactcgtaagtgagttggaagggactccagctaactcttagctgtaattcaggccaatctcccacccactcaactttccccaggatagcatcccgttcggtaatgtagacctccaggctctgctttggatcgctcagtggcagaattcacaagaccactaaatcttttgttgaacagttttatttattttttctgatagggtcacgttctgttacccaggctggagtgcagtggcactccagctcactgcagcctctgcctgcccggctcgagtgaccctcctcccaccgcagtctcccgagtagctgggactacaggcccatcccaccatgcccactaattttttgtattttttttttttttttgtagagatggggttttgccatgttgcccggggtggtcttgaactcctggacttaagcgatctgcccaccttggcctcccaaagtgctggtattacaggcgtgattgttgaacagttttaatcgttattatgggttttaaaaaataccggatgaggttgatctccatttatgtccacctaaattatatgttcctatctagtcacaacctggctatcagaaagtcttttccaaatgatgttgccagcccatataggtctaggaacaaaacagcttccccatttacagttccaactatggaaaactacactcttctttcttcttactttactttccaaaacatagcccctgaacctgttttactctatccatgaataactacggaccatatttatattgcccatagttatttgggcatttgaaataaggctatcaaagtactgtccataattaaccatttgtcttagtccaggcttgtctgtaacaagcccttggaagctagaaataggaatccacttccaagcagccatttatttcatcaataaaactgcattcgattactcaggctgcttatgagcgctacatcagatgtgtttctgcagagagaaaaacaattgtttttctaatagacctttcttatacacacaaaagggtgcatacaaaagcctgcagataatataacaaggttctcttactcatttaaatatttgattaacgttgacagtattgagattttagtggtcgcagagtaacataaatatattttttttcaggtaacgcttttgtgaaccacaactttaaatatcagccagctgctcctatcaacacgagtatcccctgttaattttttgcatttttcaagatgagtaaacgtaaactaattcccaagctctctattcaatctcctgtccttcataccaacttaaatgtccagtccacacacccacctttgaagaaagaagacttacatcggatttcaaaagactccttggaatctgattcagaaagcctcacgcaagagattatgtgccattctgagtttgatgatcgaatccggggcaacggtatggagcccgacagcttagacgaggaggaaagccctcgatggggaagcctgcacgagatggaagaggaagcaagtggaaaagcagctcagatggc

SEQ ID NO: 8519 - DNA, 2300 bp, Homo sapien
gatatgaaacattggccctttatggtggtgaatgatgctggcaggcccaaggtccaagtagaatacaagggagagaccaaaagcttctatccagaggaggtgtcttctatggttctgacaaagatgaaggaaattgcagaagcctaccttgggaaggtgaggttggtttttcagtatggggtgcattccggagtagttaaaagcccgatgactcccgggggcactggcacctggcgagggaggggaacagatggggctcagctcagggttaagaccacgtgcccaacagtgccctaggctctctaggtagatgggtctgtcaacaccagaaaccagtgaatcttgacaattacacagtaatttacattttggtggggggggtgctccagctgttctttcaccagcattaatccatttgctggagtttgcatatatgtaagtataatagttaccaatctgtggtcttttccttattcctagactgttaccaatgctgtggtcacagtgccagcttactttaatgactctcagcgtcaggctaccaaagatgctggaactattgctggtctcaatgtacttagaattattaatgagccaactgctgctgctattgcttacggcttagacaaaaaggtatgtaccatttgtgatgcaagttcggattattttaagattaatttgatccatcgtaaatttaaatgagattgtttttaacggcaggttggagcagaaagaaacgtgctcatctttgacctgggaggtggcacttttgatgtgtcaatcctcactattgaggatggaatctttgaggtcaagtctacagctggagacacccacttgggtggagaagattttgacaaccgaatggtcaaccattttattgctgagtttaagcgcaagcataagaaggacatcagtgagaacaagagagctgtaagacgcctccgtactgcttgtgaacgtgctaagcgtaccctctcttccagcacccaggccagtattgagatcgattctctctatgaaggaatcgacttctatacctccattacccgtgcccgatttgaagaactgaatgctgacctgttccgtggcaccctggacccagtagagaaagcccttcgagatgccaaactagacaagtcacagattcatgatattgtcctggttggtggttctactcgtatccccaagattcagaagcttctccaagacttcttcaatggaaaagaactgaataagagcatcaaccctgatgaagctgttgcttatggtgcaggtaacaatggtatctcaattaaccctaaaggcaggcaggcccaaggtgactcgctgtgatgagtgattgttaaacattcgtagtttccaccaaaagcttggctaatgatggcaacaccttccttggatgtctgagcgagtgatagttaaaacaggagctatgtactgggttttcttttaacttcttttaacgttaactttttgtttgctagctgtccaggcagccatcttgtctggagacaagtctgagaatgttcaagatttgctgctcttggatgtcactcctctttcccttggtattgaaactgctggtggagtcatgactgtcctcatcaagcgtaataccaccattcctaccaagcagacacagaccttcactacctattctgacaaccagcctggtgtgcttattcaggtatgtttctgtacttctcttgtttggcttactgataacagataaagggaagtcttgactgactcgctatgatgatggattccaaaaccattcgtagtttccaccagaaagtcttatgttggccagttccttccttggatgtttgagcgaccattcttccttagcaggaccctagcactgtcacagacctggagtccattgtagtaatttgttttatttcctaccaaggtttatgaaggcgagcgtgccatgacaaaggataacaacctgcttggcaagtttgaactcacaggcatacctcctgcaccccgaggtgttcctcagattgaagtcacttttgacattgatgccaatggtatactcaatgtctctgctgtggacaagagtacgggaaaagagaacaagattactatcactaatgacaagggtaaggaggcactgtcatctggtcttgacagggataatggtatttcaattgagttactggtgcctaagggcgtctagctaagagaaactagagttacacatacacaggtaatttaaggcttttacttagagttaatttctttcctaggccgtttgagcaaggaagacattgaacgtatggtcc

SEQ ID NO: 8520 - DNA, 2300 bp, Homo sapien
aaccagatttttctttttttcagcaaccatgtccaagggacctgcagttggtattgatcttggcaccacctactcttgtgtgggtgttttccagcacggaaaagtcgagataattgccaatgatcagggaaaccgaaccactccaagctatgtcgcctttacggacactgaacggttgatcggtgatgccgcaaagaatcaagttgcaatgaaccccaccaacacagtttttggtgagttcctaattttaaatgacagaacaaatataacagggctaggaagcacaaaagtttatgaaacgtgaggagggaactttttgattttagaaaaactgagctgagagacttgttatcaagtctgttataaaacaggttgtagaaacctttcaggctgaaatctggataacgtaggaggttgaagtttgaacctttgctacctatatggtagttgaattcacctacctatgaactgttaggtatttgagtaatcatggacttgagttttatcagaagagctatgaaattgaaagtgttttcatttgacaccttttacagatgccaaacgtctgattggacgcagatttgatgatgctgttgtccagtctgatatgaaacattggccctttatggtggtgaatgatgctggcaggcccaaggtccaagtagaatacaagggagagaccaaaagcttctatccagaggaggtgtcttctatggttctgacaaagatgaaggaaattgcagaagcctaccttgggaaggtgaggttggtttttcagtatggggtgcattccggagtagttaaaagcccgatgactcccgggggcactggcacctggcgagggaggggaacagatggggctcagctcagggttaagaccacgtgcccaacagtgccctaggctctctaggtagatgggtctgtcaacaccagaaaccagtgaatcttgacaattacacagtaatttacattttggtggggggggtgctccagctgttctttcaccagcattaatccatttgctggagtttgcatatatgtaagtataatagttaccaatctgtggtcttttccttattcctagactgttaccaatgctgtggtcacagtgccagcttactttaatgactctcagcgtcaggctaccaaagatgctggaactattgctggtctcaatgtacttagaattattaatgagccaactgctgctgctattgcttacggcttagacaaaaaggtatgtaccatttgtgatgcaagttcggattattttaagattaatttgatccatcgtaaatttaaatgagattgtttttaacggcaggttggagcagaaagaaacgtgctcatctttgacctgggaggtggcacttttgatgtgtcaatcctcactattgaggatggaatctttgaggtcaagtctacagctggagacacccacttgggtggagaagattttgacaaccgaatggtcaaccattttattgctgagtttaagcgcaagcataagaaggacatcagtgagaacaagagagctgtaagacgcctccgtactgcttgtgaacgtgctaagcgtaccctctcttccagcacccaggccagtattgagatcgattctctctatgaaggaatcgacttctatacctccattacccgtgcccgatttgaagaactgaatgctgacctgttccgtggcaccctggacccagtagagaaagcccttcgagatgccaaactagacaagtcacagattcatgatattgtcctggttggtggttctactcgtatccccaagattcagaagcttctccaagacttcttcaatggaaaagaactgaataagagcatcaaccctgatgaagctgttgcttatggtgcaggtaacaatggtatctcaattaaccctaaaggcaggcaggcccaaggtgactcgctgtgatgagtgattgttaaacattcgtagtttccaccaaaagcttggctaatgatggcaacaccttccttggatgtctgagcgagtgatagttaaaacaggagctatgtactgggttttcttttaacttcttttaacgttaactttttgtttgctagctgtccaggcagccatcttgtctggagacaagtctgagaatgttcaagatttgctgctcttggatgtcactcctctttcccttggtattgaaactgctggtggagtcatgactgtcctcatcaagcgtaataccaccattcctaccaagcagacacagaccttcactacctattctgacaaccagcctggtgtgcttattcaggtatgt

SEQ ID NO: 8521 - DNA, 2300 bp, Homo sapien
aaccaagaacacactcgccaccatttaaacctgtttattttataaacaacggggaaatgtagggcttgggctagttggggaaggactgagccaagaagccgaatctgttctagacggaggtgggaaggggcctaacggtcagggctcagagaagcggtttcgccttcttttccgcggagggatccagacacgaccgcgtcctgaggcggttctgaaaagccgggccccttaaacctctgcgtcgggggctgcctcccgacagttgccgtagggaaatgcaggtgctgggaggcctgccgagctaacccgccccaccccgcggcggcctggcggctccctccaatcccaatcctggggggccgtgagcgagcagccctagtggcaccctgaagccggaaccttcgccccagcccctcggggtcagcccttgtccaaagccacgctatgaaatacagattcgcgaaacccggggcacttagaggcccgtctggaacacgaaggtggggcatggaaaggaggattcggacgtgggtgggggaggggagcaacaaccttcgcagccattttgtcctcgctccacttccgtcttctcctgcccggctcccgcgcccaaacccctcccttcaggccccgcgcgattccgcccccagttctgtgccggccaagatcccggctagcgccgctatcattggttagttccaagtttgcccgcccctcttcctcctcctttttccgccccctccctcccgcggaagctgggggcgcatgcgtagaggtggacgctcccctcccccgcccggggtaactgaggactcccgcgcgcggactcgctgcgccccaccctccctttccccggggccgtccggagagcgggggcgagcttgaaagttccagaacgctgcggtgagtgcgttatcgtgaggcggagcgcggtggggtgggtgcggaagggggcgaggcccgaggagtggagccgggcttgtgattgggtcttgtaagggcagccgggcgtctattggccggggaagccgtaatggcaggcagcaggggcgggccccttctggaaggttctaagatagggtataagaggcagggtggcgggcggaaaccggtctcattgaactcgcctgcagctcttgggttttttgtggcttccttcgttattggagccaggcctacaccccaggtaaaacctctgctcaagagttgggttgtgggtctgggagcgtgcagcctccacacaggcctgttgggcttgctgaggcttgggggttctgagaatctcgtcgaggcgagtgtgcggctccttctaccggcttaaagggcctcagttttcggtgggatggcagcggtatttggttgcagccggcaggacggaaatgtagggagtgggccgcagtggccccaggggaggctgggagacgcccggcggccgcgtggcgggggagggttgctgcatcggtttgcctggcgcgcggggaagtggagccagcgttttctttcacccagttccctgcttagtccagtcccaccgtggttcttcagagctgttcttggcgtgcttccagtatgggggtacattccggagtagttaaaagcccgttgactcccgggggcactggcacctggcgagggaggggaacagacagtgctcagttcggggtaagaccacgtgttgagcaacgccccacgccgtctgggtagatgggtccttcatctagggcgtgctctgctgcggttggcacggcaacctggactgcagcactagttctggacctcgcgcgtgcttagacaggaggtgatgggcactattacctcttggcagtggccatacgtttttcctggttaagtgttctgttaagggatgagggaaatattttgattaattgaatttttaaaccagatttttctttttttcagcaaccatgtccaagggacctgcagttggtattgatcttggcaccacctactcttgtgtgggtgttttccagcacggaaaagtcgagataattgccaatgatcagggaaaccgaaccactccaagctatgtcgcctttacggacactgaacggttgatcggtgatgccgcaaagaatcaagttgcaatgaaccccaccaacacagtttttggtgagttcctaattttaaatgacagaacaaatataacagggctaggaagcacaaaagtttatgaaacgtgaggagggaactttttgattttagaaaaactgagctgagagacttgttatcaagtctgttataaaacaggttgtagaaacctttcaggctgaaatctggat

SEQ ID NO: 8522 - DNA, 2300 bp, Homo sapien
tgttaaactctaggcactggggtgtgaaaagaaagattccagataacattactagcagttagcgtgggggactgggggttccaaataccaaaggaaactgaaaacagtggctcacagtacatatcttaactctttctggagttgagttcaatttatttccaggaaggaaattacactgtagcgtaactaacaaaaaacataaaacaaatcttgaaccaaaaaaaagctagatttgattctagcttacccagctgcttatcttcccacaaatgattatctctgagctgcatttttcccctgatatggggatgaataatacacaccttagagaattgtgttgatgattaaatgacaaatgaaagcattttgtatgtagtgaaagcattgtataaaattaaattcttgggacgtgggagaggctaagaatatatctccatgaactctaagccaacattcctccccaaaaggaaaatatgaaaaggaaattcttcatatgtttgagtctgtctctaccctttactggctttgacaaggacaagatgtcctcgctcttctgacagcctttttcgcagtctagagaccttctaattccagccctgctactaaaagttcttttggtgtagccttaaaaaatcttttcccccatcggtgcctatttatctactaaataggaataacagctacctcgcctgcttgaaaggatacagggagtgttcaaggtacctgagacaggctcttggaaccacaaggccccacatatccgcggccatgcacaacattgcacaattcaaaattctaggcaccattgttttgtgcaccagctcagtcacgttttcaaagcgtcggtatggtctgtcgtttaatttttgatgaaagtcaaaccaggaaagatatcacctcatgttactgaaaatacaaacgttcagaaagtctaaatcaaggacgcacggctactggaacctatgattcctaatgcctggttcacctaaccaagaacacactcgccaccatttaaacctgtttattttataaacaacggggaaatgtagggcttgggctagttggggaaggactgagccaagaagccgaatctgttctagacggaggtgggaaggggcctaacggtcagggctcagagaagcggtttcgccttcttttccgcggagggatccagacacgaccgcgtcctgaggcggttctgaaaagccgggccccttaaacctctgcgtcgggggctgcctcccgacagttgccgtagggaaatgcaggtgctgggaggcctgccgagctaacccgccccaccccgcggcggcctggcggctccctccaatcccaatcctggggggccgtgagcgagcagccctagtggcaccctgaagccggaaccttcgccccagcccctcggggtcagcccttgtccaaagccacgctatgaaatacagattcgcgaaacccggggcacttagaggcccgtctggaacacgaaggtggggcatggaaaggaggattcggacgtgggtgggggaggggagcaacaaccttcgcagccattttgtcctcgctccacttccgtcttctcctgcccggctcccgcgcccaaacccctcccttcaggccccgcgcgattccgcccccagttctgtgccggccaagatcccggctagcgccgctatcattggttagttccaagtttgcccgcccctcttcctcctcctttttccgccccctccctcccgcggaagctgggggcgcatgcgtagaggtggacgctcccctcccccgcccggggtaactgaggactcccgcgcgcggactcgctgcgccccaccctccctttccccggggccgtccggagagcgggggcgagcttgaaagttccagaacgctgcggtgagtgcgttatcgtgaggcggagcgcggtggggtgggtgcggaagggggcgaggcccgaggagtggagccgggcttgtgattgggtcttgtaagggcagccgggcgtctattggccggggaagccgtaatggcaggcagcaggggcgggccccttctggaaggttctaagatagggtataagaggcagggtggcgggcggaaaccggtctcattgaactcgcctgcagctcttgggttttttgtggcttccttcgttattggagccaggcctacaccccaggtaaaacctctgctcaagagttgggttgtgggtctgggagcgtgcagcctccacacaggcctgttgggcttgctgaggcttgggggttctgagaatctcgtcgaggcgagtgtgcggctccttctac

SEQ ID NO: 8523 - DNA, 2300 bp, Homo sapien
gatgaggtgggaggatcacttgcacccaggaggcagaggttgcagtgaacctgggtgacagagtgaggctctgtctcaaaaaaaaaaaaagaaaagaaaaaagacggttttttcaacatattcatttacaaattatagttgtgaatgtatctatttcccctattagacaattagtatgaaatggaaaataaagttacttcggagtcaaagagaccttttaaacacttctcaatataaaaaataatatttttaaatattagaatattaatattggaatagaagcattttaattctattgtgatctggggcaagatatttaggcctctctaagttatagtttccttgtcttcctattcatgctaagggatggtgatttttttttcagtgactatcccttagcagtataataagaatgatataaaaaggtcaataatatgacccaataaaaaccacgtaataatataatatgattctgggtccatacttggtgttcatgacatactcctcccaggtttttttaaatgtcaacttccaagttctactcactttgtgtcctcacacctaaaaaagcacctggcatagtgtggatgctaacacatcggtatcgaaggggtgagggagtgagtggagaaatgctgcaattctaaagcaatgctccagctgatccgcgagccctaggaacagccccagcttttgcaagtcctctgagtgaccttgtgaaacttccataacctctccaggcctttgctttcctagtctgcgaaatgggacgggttttcattacacatttgcatttcattgcaaatgtgtgactcggcagcccaccggccccggcggggttcatctttcttctcaagagcgctggccccggcttccaacctgggctctggcgaggccgaaggtgagcgattgcgtcatcatgcctctgggcagctgagggagaagccctccagggacattcagagactgggaccagagtttctgagaggccctgggcacaaggtcagggcaggaggtccaggcagctgaggtctgagcgccaccctcactgccctttcttagtctcgctgcctcccgctgccgctgagcagcagggtagtgaagggcagactcccaggggccgaccctggggcggggctgctcggctccgcggaacccaccgtccgcccccgtccggccgccagcctcctgccctccgcgagcctcctgggccgggttcccggagcccgggcgcgcaggccctggcaccagggggattctgctccctctgccttatgttctttctgaaagggggtggtgcacattttggccagggccacgtgcagagcactttgctgcaaagcatctcgatagacctctttccacggggctgtgggtccccttcccctgggtgctggctggcttagctctgctcgggacctgagggagcgctgctgcaaataccgacagtagaaagcgagcgaacgcgaaaggccccaggaaagccaggccaaggggggtagccgggtgccaaagcaggcagtcggtggggagagccctggtcggccggccgctggctgccttcgcacccacttccgcgccccgccgtcggcctggtcagtctggtggctttacactaacagaaccagacggggagggagaggagaggcgagaagagcgcagaggacagaggggagagggcatgaggagacgaggagggagaggcaagaatgcgaacaaggagacctagagaggaagagatggaagagagaaacgccagatttgtgagagacgtggaagcagagagaaacgagagtaaaaaagaagcgagagagaagtggagagaaggaccaagtgagagcagagctctaggaacggacaaggcctcgtccatgggctctcagccgaggtgtcaccaatgcctcctgcaaagaatcaatcctacgcccggcgcctctcaacccacccgcctctgcacggccccaggtctcccccggccctccctgcccggccagctcacgcttctccccgaccggcccccaccgcaaaccccaaacgccgcgcgggagggagggagggaaggagggaacagcgagagagagagggaggggctgcggtaggaggcaaccatgtggttccagctgaattttttttttccctctctctttcttcactcctttttctttccaaacagggaaaagtgttccacgaagcggtagcgccttttcgcctcgcgttttcctccctgaccctggtcccggctcccgtccgggcgccagctggtggggcgagcgccgggagcccatctgcccccaggggca

SEQ ID NO: 8524 - DNA, 2300 bp, Homo sapien
gaacaaactctgtggaacttggcttagctcccgatcctgaagtttggagttacagtgcaatctcctcagcatccctggagccggaagaggtgaccttggcaggcctgacacctgatggcaaggggtttctgctttctgtgctatgtccaggagttaaagtagagtgaaaccaaatcactcctgagagggccagtggctggatttcagaaacgggggctgacattccagggagtcatttatgggagggcctggccttggctcttcagccgcagtatctctctccctgaggaagaaatatttcccttggtttcccagcctctcaaaagttgtgtaatgtcaggatgccttgagcttttccatacttgacaagtgtcattgcagagcttggtagatccatagccagctgtcatccttgatgtcttgctgaactgcagggatgtatttacttgcagtgaattcttgtgatctttagggatgtgaattttcctcagcttcgggacacttgtgaaatgtgacttttgtcctggcacggaagctgggcattggctcccagatggaaactggactctgagagaggcagaaaagaagggtggatcagattgtggacttcatggtatgttcttgggtgcttctcatgatctctttgaaagttactgaccaggctgggcatggtggctcatgcctgtaatctcagcactttgggaggccaaggtgggcagatcacttgaggccaggagtttgagaccagcctgggcaatatagcaagacctcatatcgacaaaaagaaataaaacttagctgcgtgtggtggtgcgcacctgtactcccagctactcaggaggctcagctgggaggacagcttgagcccaggaattcaaggttgcggtgagccatgactgcaccactgcactccagcctgggcaacagagtgagactttgtctcttaaaaacaaaacaaaacaaaacagttactgacccaagagacaaatgcattgggctggggttgaaggaggagaatggctgctacagccctgctctaggagctgggctgggttagactcagtgcccacagagagcacctaaataggatggatcggttctagggttgatgatctcttagggcctgggtctagagagtgagtgtggttcagcacatcttgggatgctaccaggactgaaccagacttcctaggttccatgacatggggacatactggattctgtgactcagtccatggcaggctgaagcagaactgaatcagccctcagcaatgtaagggggggtaccctcgactccctggggctctgttggatgcattgctttgtgggtgctcaccgactcctcatttcattctttgctagggacgcggctatggtactggcagctggctcatgtacagggttcaggccccattttccttactggtcctgtgtcctttgtctctcagaccctgttgtctgtctttccttggtatgtcatgtctggtatcctcagctcacgccgccacgggagaactgtcctcttctcagcttgtcattttggaagcagcctccagcaaccttgctttcctcctctgactatactccggcctgcagtgccactactcacgcccccaaataatttaaactgcctttcttaggagacaagagctagttgaaaagtctcctcattttccttcaaccctgtatcatgggtggcctgagagagtgaggactgaattcattgactcccctttctctgcaccccccacccccaaggaaatagccgagttcgactaatgggagttgcctggccaatcgttgccctgagaaagtttggtttgtgatcctatttcagtaggctgattggagcagcctttacttggaggtcgagtccctccccgagggaatccgtgtacagttacactagcggtcgctgccagtgctagcccattcaggatagcccccctcaccccgcccccagcccccgctcctcctcctccttttttgtttttatccagtgtctcgcttcctctctctctctctctctctgtctctctctccctttccctcctaccactgcctcttcctcccgctctctacctccctgcagcgccaagccggctccccaacctggtctgctgaacgcaaaccgctgagagtttgctgcaccgccccctggggcccctggctgccgagtcccgctaaggcaaagacgccagcaagcgaggaagcgcagcggaagaaaaacaagcgggcgcgcgaggggagccccaggagggctgccgagtggctggcaggcggctcccgcccctcccggg

SEQ ID NO: 8525 - DNA, 2300 bp, Homo sapien
atttggtaatcctggcaattagccagatcttgtgaaggacattttttctggtagaagaccttccttggccaggcatggtggcttatgcctgtagtcccagcactttgggaggccgaggcaggtggatcgcctgaggtcaggagttcgagaccagcctggccaacatggtgaaaccctgtctctactaaaaatacaaaaattagccaggcgtggtgatgggtacctgtaatttcagctactcgggagtctgaggcagcacaattgcttgaacctgggaggtggaggttgcggtgagccaagatggtgccactgcactccagcctgggtgacagagtgagactctgtctcaaaaaaaaaagaccttccttaataagtggagttggatagacattttgctttggaaaacagaagctatttactctcaatattaggtctacttcattcatttcacagaataggcaaagatgtctggggctttgctcactagggaattctggccatggccttttgcttctcttctaaccaggccttttgcttctcttctccctttttgccagatgtagaaccaccaggcttccctttcatttctccaggaaagaaggggtagggaagtgaaagttcggtcttgtgtttcacaggcaccactgaagtaaagaattcaatatttagataattttgtgttactttcagtgcatttttctgaccttgttcctcataaccatggagaatctagagttctagagcattttaccttaattaatgactagtttaaggcctttttgggtggctagtttggaaatgactcatattcatggtcttgatcagttcaacagtatccttagaaggttaggaagaaacaattgtcagtgtgcaaataactccaaacctctaatccagcttaaattgaaaaatacagtggaatatatacatgcagaaacataaacgttttctaataaatatatgtatatatctaatacacatcaatatatattaaatataagtatatatgtatatgcaagtatatatatctttttattttaagacaatctcactctgtcatctaggctggagtgcagtggtgcaatcctggctcactgcaccctctgcctcctgggttcaagcaattctcatgcctcagcctcccaagtagcagaaattacaggcacgcgccaccacacacagctaatttttgtatttttagtagagacggggtttcgccatgttgggcaggctggtcttgaactcctgacctcaagtaatcctcctgccccagcctcccaaagtgctgggattacagacatgagccaccgtgcctggcaatatataggtatgtattttttaaacctggatattccttagggcaggctaagtactttttggtcctggaatactgactcaaatttcagaaagaaattttaatttgcctgttgcatatgatacttgttttaataccagcaattggactcaaacctatgcacctcagggagatttctggatcttgcctgttttattataggggaggacaaagtaaacccaaagagggctgagcaatggagcatctgaagtcccaggtcgctactgattgtgaattcgagggtgatcagggacagctaagaaacagaaatgtgtttctatttcttccaaggctctgtatctttgtaaaatcccgttgataatggcccatgccaacactgttcctcacctatccccacctctagcaaggccagggtaaatactttcccagcagctgagtgtgacttttatcctggtaataatttcaatcctgcttccatggagtaaaattccagactgggacaagcgttctttccgcaggcagctttgcatcatcagcttcctcttacacacattggtcatcatgataatacctaccttgaagactggtttgcagatgaaataagataaggcatctctccaatttcctgacatcctgtagatactcacttcctggttacttcctttgtccctctcccctttaaatttaagagaaggaggtgttttcatatgggtgtcatttggggccaagcttatctgatctgaaggacaggccccagggcttgcgttgttttttcgtcattgccaggcacctttgctgagtcatttggggttggcagacctggaaaagacagcggtttagagagtggttagtgccgtgatcagccaacgcaggctctattgtctgttagtatttcctggtgcacttttggaacctgatctgcccttctcatggttaagggcaggggatgagtaactagccatggggatgttctgcatatcttgcc

SEQ ID NO: 8526 - DNA, 2300 bp, Homo sapien
ttgtagttaaaaaaaaaacagctagagcaaaagccaaaaaaatttacagttacaataatgtttctaatataatacttggaaatctttgatccaggttttctgtgttacttgtgatcagagcagttgatgggccaggatgagaatacagtattcacgtgtacctggagtactctcagtgacatttgcctcggggctggatcacatgacctggtatttccattgagtgaattatctaggtcataaaggacaactctttgtacttctggaatctgttgcatcccttcaatatctgtgctgaaagtatggcctgggtacaggctccaggagctttgaaaacataattttggatgtgttcagaagtcctggcagcatttgggtttgtctggcatggggctatggatagatcaattccacagccaagggctgctttgggaacacctttctgaaaactcagtataccttatttttttctttctttcgttttttacttgtggaatcaggtcacaaaaggttagtatatcttaaagagtgtttcttctggaccacgtggacattggagagataacatggtgttttagttcggtttgagtaaggtcacttaaacgcttgcttatagtaccctacaatccccaagccctcctcctcagtggggatatagagattgctgaatgacacacagtccttgtctccatggtgcttatcctctaaaaagaacaaagcagataataagtcattacaagtatgatgactgttaccaacgagggtctgcactccagtttttatttttattttattttattttattttattttattttttgtttgagacagagtctcactctgtctcccaggctagattgcagtggtgggatctgggctcactgcagcctctatctctctggttcaagcaattgtcctgcctcagccccccgagtaactgggattacaagcacatgccaccacacccagctaaattttgtatttttagtagagacgaggtttcgccatgttggccaggctggtctcaaactcctgacctcaagggatccgcctccttgggctcccaaagtgctgggattacaggcatgagccactgtgcgtgaccaaaggagaaatgattggtttttctcactttagagggtcaagtatagatgatgttcatacgacacgaggatgtctgcagattgttttatgggcaaattttagggtaaaggcttattatggttcaactgttttggagcaagtttctgggtaaagctttattatcatggttcagttgaaggttgctatttcataattaatctctttgttcgttgtcacccatccgcattactgacccagatagtaatgtagggaaagatagaaagggatcatatagccagggaagttgttggtgttggaactcccaggccccagcctggaggatctgatttaggaggagcctcttccccattctcagtgaattgttactttccagctagagttgaaaatcctggtcctgccttactgggtgctgtggctggtctgcatcttcttggagcccaggattggtgatcatgttgcctaaatcctaaaccaggcctttgtggtcaccttaaaaggatcccttgccccaggtgacaatgtgctgccctgccaccagaagttgctgcctcaccctgcgtcccagaagtcatggcaatttccccagcaggaggagagagctgtgcattctgtgtgcagcacactgcctgggagcacgcagccctgcttgccccgccttgcggggtgagggttctgtttaaggtggtcttgtgcgcctagatgtcccaggcactcaccacggggcctctgagttctgcttggattccagaggtgtgcagaggacctagggtccaggttcccctcccccgcaggggtggggcattttaacccctgagtggatgctgacagaagtgctcaacttcagatatttctgccccctcctcttccttcctggcaccacattcctcacgcaccctctccctgatattctgtcccatcctgggactaaacatgtgctgtgtctttaaatgggcggaagtggctggcagtgctttgcttgggtactgcattgattaggagattatatggagctgcgggagctgccgcctgggggaagagaggtgcagcttctgctaggtttgtgctctcctcccagggtctccttggcttccttccccaaagcagctcagagctggtatgaggtgagggtggggggcagccggccagcctggctgttgacggcaactccagggcttgtttcgcgcagccttgccagca

SEQ ID NO: 8527 - DNA, 2300 bp, Homo sapien
ccgcctctccctcccaaactgctgagattacaggcatgagccaccatgcccagcccaaagatatttactgaatatgtgtgtacccagtactcctacatgctggagggacatgaaagaaaaaatagcctacgatcttctcagggatgtaaaaccaacagaggacaacagaacctgcaattaagttctaaatgtatactgtaagggcaggggcaggagaggtacccaaccgttctcgggtgctttcacatgcttttttgacttcatcatcttttcaacagtacaaaggaggaaatatgtagtattagcattttcagatgaagaaactgagtttgagataagagtacgtgggtgaccaacaagcaatgcaactcagttttggtttcagatctgactctagtccaagatctttccgtggattaacagagaagagccagaaaggcatttcagaagaagtcggacttgagccagacaaggagggaggctgaaattggggcattgccaatatacctttctttggagctgggattcctctaggtaacggaggcagggccagacagcccagaactatctgcttcccggatactgtgcggctgctgttctatcaacgggctgcagacagaagcaatcttggaaagacttttcatgatgagcctgcaggggctggccctcccagaatgagacattttgccaacagatgcccaagaaatattagctctcagcatgagttcgagcaggatgcaggtgacatcaatggattgtaattattattcaccttcagcatgttttcctatgcagctgcagtggacagacaaaactgtctttttggaagattcaaagcatgagaatgcataagccaaacatttgctgttcagggtggtcccggaatagcaacgtgggcatcgcctggggtttgttagaaaggctgacttttgggtggtcccctagacctgctctatcagaatctgtgggtgaagaagattcttaggggattaaagtttcccaggcattgagctaaccatcatcattgttagtgttgtcggttttgtgctacatccctcaagagatgacaatggttctcaaatagttggggtgtgaggcaattagttaatcgccatgggtctagaggcaggtgatctggattcccagctctgcctctttcttgcatgggaccttcacttttccaggactcagtttccagatccactaaacaggtcagtatttaggtgattgtggtgggaatgaaatgattgaatgtaggcaaaatgctttgtaagtcatgaatgactttcaaaatattattaatatcgttgctgaatagaatacctcgcactgccagaactttcctctgggggctgtctgagtactaatactgcatttcggtgaatggacagagaaaaaaaaaacacttctaagaggtgcagcttagaattagaagacccagacgactctgctttgccacgaatgtaagtgctttccctgagtgttactcttgctgtctgtgagagcctgacctgcgggagaagcgagcatcctggaagtctgggagcagctacactgaagaggccctcggccatcttttcttgcggattatggtctcagtgctggcctcctctcttcctctactcccaggcctcgggccgtgagagagccgccatcctttgaaggatgcacgactctctttagagccaggcacctgtgtttttatttagtgtcacctccttgatacaggtcgacctagtgggcagcacctgggaaataattggtggcagcgaagggagcagagtctccggggaacatggtcttgtattttgtcggattgagggtgaagaggaaataacccccccccccgcagccccagcggctctgtcctccacgctggcatgaataattgagcgccggcaagctgactgcaccaaagagttgcattatgtaaaccggcaggcgacgtgtgtgcgtgtgtgcgcgtgtgcgtgtctgcgcgcaagaggggtgcgtgtctgagtgtgtctgtgcgcctgtgcgcgtgcgtgcctgagctcagaacagctgtctgtgagggagtcagagggagagagagaaagggagccaggcagagagagagagggacttctgtaaggcggcacgaccacaccaaataacagcagcagagggaggtgggggagagggaaataaaggggagtcatgcttaaaatgctacagcggtgtgaaacagcagagcaaagaagcgcccccagcttctgagagccctggcccgagtcccctcccccgttagaaacagggctttgggatggtcatggagg

SEQ ID NO: 8528 - DNA, 2300 bp, Homo sapien
gggtgattgaatctgaattcaataaaagtattaacacagtgtgataactggttgaaactaataaattttaacagcaataagtgcaaagtttcataataaaatttccaaaattgcctgtacaagacacaatgactctgcaacaagtcaagtgaagaatactcagggattttaattgaacataagctgattatgactaagatgtggctgtaaatgtatttaactagttatatccttcaaagcaaatgtagccataattccactggatttatgctggtcagaccacacagggaccatcagttcctgttctggacgtcacttggagaatcatgctgagaaactgaaagtccttctgaaaaagcagccagggtggtacaggattggaaactactagaaaatacattggaagaaactaaggaagagtagccacaaacaaaaatgtcttagggcggatgtgaggaagcatagctcttttaaagagaaaacagcattagggccacttaatggagtttggagggggaggaggagtgtacggaattcaactgaacataaagaacttccttaagcatcagaagaggtgaacttgtgatgtagaaagttctcatcactaaaaagatcaaggccaggcgcggtggctcatgcctgtaatcccagcactttgggaggccgaggcgggtggatctcctgaggttgtgagtttgagaccatcctgaccaacatggagaaaccccatctctactaaaaatacaaaattagccgggtgtagcagcgtatgcctgtaatcccagctactcaggaggctgagacaggagaatcacttgaacccgggggacggaggttgcggtgagccaagatcgcgccattgcactccagcctgggcaagaagagcaaaaccccgtctcaataaataaataaataaataaataaataaataaataaataaaatcaagtccattcgtccgaaatgttcttgggggaagtcacaaattggaaaagcggttgaattaggtcaactttaacttcccatccaaatttaacacagtatacatgcttcaaggcctagtcctccaaacagcacagagtttatggcctggtggctccctgcccaggaagatccgactggggacattctgttactctgtgagatgtcaggagggagcatttcctgcttctggtccactcaccgtcagctgttgctctgttattccattttggaatatcagcgttaagcttccccttttggaaagagcagaagaggagaaaaaggaagctgaagaagggctcttggattactcttttacttcagttccaggcgttcctaatctgttatgtcaatttgagtttatagttgaatgtaaagtttcaggtttcccttccagagatggggcgggggcactcaaacagctgctaggactagggagtggctaatagttggaagacgccaaacacaatctatctgctttattaaaaaggagtaattaaaggaaaagggagaactgcaaagaacctggggaagggaagaggagtcctcttgggcccccctccccttgcgctgacatttggatcacctcactgagtgatgaggtgaagacaggaacaggtgcgcctcatccctaccccatttgccctaaacagggattatcttgctgagtttgctgtgtccggggccaattaatcaaggctagacaaaggatagacagcgagaactggaaggcatggggtctgggaggcgaagccaggaaccgcgtacggcgcgccttgcagatgacatcattgcctgaaagagctctggcccttctcttcccggagctacacccggcaagtccgtgcgggagcggagtgggtttgcctggagggcgtgagccgagggcggcggtgcgcccgagctcgggggaggtgcggaggcgcgagagggagacctggagagaccagcgagcgcgcgagcaaagatatcccggctggaagtgtctgcgccgctcccggctccgcccccgctcggcgcggcgctgggcctgggaggggcacgcccatcagggggtggggagtgtgcactagggggagggtccggggcggtggtggtggcggagagccgcctgcgcatgtcagggctgacagcacacacggcctgggggcctagagaagggttgctgatcacctgccacccagggtcggggccccgcaccatccgggggcgagctcccgggaaggggctccgcctctacacccaccccccaacctctgacatcgccggccgaacgggagctgccgcttccttcccggccccgctgcacctccccagggag

SEQ ID NO: 8529 - DNA, 2300 bp, Homo sapien
tcccaaactccaaaaaaagttccttgactataaattcccacttgcccattctgtattcagagttcagcccaatctctcatccctacagcaagacttcattgcagtggtttctttacctttcctggtcctgaataaggtctcccttaccatgctctaacaagtatcactgaataatttttcctttaacactgtaatgcattaaatgtttagaagaagatgtttatgtattatttatgcacttaataccaatattttaaaatattcaatgagatttacagagaaaaatatttggtacacagtaggctttcatgaaatgtatatttctctttgtattgggtaattttatgtgtcaacttgactagctaagggatgcccagacaacagaaaacattattagtcggtgtgtctgtgagggtgtttctggccaatatggtgaaaccccctctctactaaaaatacacacacacaaaaaaaaaatagctgggcatggtggcacatgcctgtaatcccagctattcgggaggctgaggcaggagaattgcttgaacccaggaggcagacattgcagtaagccgagatcgctgggcgacagagcaagactctgtccaaaaaaaaaaaaaaaaaaaaaaaagagagagagattagcatttgaatcagtagactgagtaaagaaaatcactctcaccactatgcgtaggcaccatccaatccattgagggcccaaatagtataaaaaggcagaggaaaagtaaattcacctctctcttcttgagctgggacatcatctcctcctgctctctggccttcagacaccagcacctcaatccctttccagttctcaggccttcagctttagactgaattataccaccaacctccttatttctccagcttgcagtaagcagatggtgggacttctcaacgtccataattatgtaagccaactccttataataaatctccttttatatgtttatacataccccgtgtgaaaggaaagtgatttggggcccccaaaatcactaaagggaaaattcatgctgggaactgcttagggcaaacctgcctccccttctattcaaagtcacctctctgctcactgagataaatgcatatctgattgcctccttccggagaggctaatcagcaactcaatgcaaccatttgtgtcttatctacctatgacctggaagccccctccccgctttgagttgtcctgccttctgggttcacacctattagttctgtttcgctaatacactgccactccaccaaaagtaactaatcctttggttcaaacccagtaaacagatcccagcaatgtgtcccatgaaaaggaagtggcacatggcacgtggagagtggtgacttacagggtaaaagggacagagagcaaaggaaaatgtcaagtatgggcagaaaggtcaccgaacggacaaaaatgaacaaatgagatcagggaagacagcctgaaagtaaagaaatacgaagcaacactcaaaggaaaagaaagaacagtgataccataactattttctttctgagcttctgatgttccattcagttcatgtgcaatgtatcatttagtcctcagagtaacggtattattatgcccgttttatatgatgcacaatagggttcaaagatggagagattcggccgaggccctgctgctgatggtgactgcaagagccagtattcaaacctaacgctgcccttttctaccatgttgcagcggacaatgcaaagaaaaaaaaatcaagaaaaacacgtagaggtatccaaatgaaaacaaacacacaaaagatcaaaaacagaaaagaaaaaagaaaagaaaaagaaaacccttgcagaaggtatgcctgtaaatgaaaggcccaagatgttaatttattcgctgcagagtggagttaggggtcgcggacggcagctgtggggtccgaggcttcttcgcactgggtccttggggagcactgagccgcaacccgcggagggcgcatagagaggatcaaacctcccacagcctagaaaggctcctactcggcgagaaggcggggcgagcgatcgcttccggttccgggcgcaaaggccccacgtgttccgacccgctaggccccgcgcggctcggatccggcggcgctgtttcggtcgggagtgggtgggagagaagccggggcaggggaggagccgccggagctgtcggagccgtgagtcctgagtgggctgggctgggccgggccgggctggaccgggccggaccagatcgggcagagccgggcagggcggggaggagggggagg

SEQ ID NO: 8530 - DNA, 2300 bp, Homo sapien
attctaattgccaaatccagtggcctttccttttctatctcttatcacattctgtgtgatatttctgcatatgtgacatgcacatctaggtttcaattgctatctcaagtctgataacccgttgtctattactccctgaatgcacccaatctcattcaaggttgataaccctctaatctcctgtcaagttccagaagtaaattttttctgtatattgcctgttctaagcaccttcagcttaaccagaccagtgcttactatatggcacctttgactagctggaatggcaggtggaatggcagctggaatgccatctggaatggaatctttgactagttctccctagctaaaaacttgatttctttttgacatgtatcttactcatccttcacatcctatctctttctctaatttggctacatctttaaatctttactgccactaccagttaaaaccaaaatgaaacaaaagcctttcagcacaggaattctactcttaagaatcgatggcatagaaataaaattatcaacatgaaagagcataataggagtttcccatataccctcttggtccccccactcccctaggccccagggtcaagggtcaaaccaatagttaatttcatggcagctggcaaccctaaaaacaagctgaccctgatatgggattggtgaagggtgggagttcatccccacagctaccagaagtgttagctgctgtggcttgcagtttctaggagatttaggaatatctcttgagaaagaagggaaatcacaccctaggggcagccagatgctcagtgtaaaggctaggcattcttgcctctataaagaatgactctgaaggaccaccccagagccagagcacctcgtggggtcagccagggcttcttctgttgcacccacacctcagttcaacttctgctcaaacctgcttcccttaaacaattacaggtgtggttcccaaaagtgcttcacaaaaaaactccctggatacaaattcctgcctcagagccttttcccagaaaacccaaattaatactatggtaattgctgacagatcatatactatgtgccaaggactctttcaagtgctttatgtctctaaacgtatttaatctttacaaaatccctaggtagtaggaagcattattatctctaagaccacacagctactgagtggtagagctacaatttaaaaccaggatccttagtccgttttcttaaccctaaagccttcctcataagattaagtgtattgttgagtattgtgcttaaaaatgaaaacgataaataataataataaagtatacaaagatgtgtagagagatctagaagaaagacagcttgacatgtttgaggtaataaaaaaaagtctattttgagccaaggaaagtcacctgcattgaggtcagaaaatacgcagagtgaggcctttggagatgaagttcatcttagttgtgtaaaaggcaaattttttttttttttttggattgtagcagaagtcctctagctcttgactctgaggcctaccatgtttgcctactcaaggaatcgaaaactgttttatatgccaagttagaggcaattctgtcaagaaatgattgtccatgccttataaatgagattgggctataatggctcagtgtatctatcaggccagtagtttggtttcaggatgatggtttatttcctggatgactccctaactaaatgtcactgggacctcccaatgggaacacacatttcttcaaacatcctaaattttgagtggtcattccctgttgtgatactagctagctaactatttatctcaatgatcttgaaatccttttcctcttcactggcccctacaaaatgttaactaatcttggagcgtgtaattctaactcctaaattggacctctttagtcatgcacgtctaacttaattcaaggcctctaatgatccctgtatgtgacagctctttctacatgtgatgtcagatccctatatctgatagctctctcaggacttctggaccccttggttctttcactccactaggccccagggtcaagggtcaaaccaatagatgattccatggcagttggcagtcctgacagcaggctggccctgatagataacggaagtgaggaagggtgagagttatctatcttctctgttttatagactacttcagcttctgctgttaccaatgcctcagcaaccactgaaagttcagatatcacccttcttgtaactaatcaaatcaaggaagagatctacaaaatagtggtggtggttccagctagaaatttt

SEQ ID NO: 8531 - DNA, 2300 bp, Homo sapien
ttcagggcacatgtgttacagtggtgggcgctaaaataaattggatattgttctcataatatgcagatttctatttccattataagcaaatgtgcttttcatattctgaagaagatagtttccttaaaagtctactttttaattaatcataatcaaatgtattagggtaagataaggacccaaagagctgttataaaccatggagaaatttgttactttatcctgtaaaattctgtgatgatacagtggcttgctctatgagagtctcaggggctcaggatctttctgtcttgttgcttctccatttttaggggaaatgctccaggctttatgatctagtctttatggttcaagctggttcagttacctgcattcacaccaatgagcaggaagagggtaaagtgaatgggaagccatcctcttttctttgaaagggcatgacatggtgttgcacttatttcttgtaccctatgggccagagcttagttacaaggccacaccagctttaagggaggctaggcaatgtttttattctgaatggtcatagacattgtgaaacttggggttcctgttagtataaaaaagaaggtgagaatcaaccttgaggaatgcctggcaacactaagacagacttttaagtgaagatatctcatctttatcggtttaattgtgtatattgtgctaggttatgggaattttcacatagttgttttttcaacaaccagcaacttctgtgtgtttcctgattcagtgccctctaaccacgctgcatgcctggtctgtggcagacttttagtgctaagctctaagcccagcaggatcagatgatgaactctgcccacgtttccagctcctcccttttgttgctcagatgtttcggccaatggaaagaaggcacagtcacaaggaacaataccagacatgatttctctccagagaaaaggataatttcctctcataattagttcagtacatgtaaaaaacatggttgtagggcctagtactgataaaatagaatttgtgcttatattatgctttactatatatgcatatattacatgcatgtaactgtatatacatgcatgggtgtacatatatacacatatatacatctatgcatgcacatccatgtatataaatgtgtatgtgggtgtatatatataaagtatataaatgtgtgtgtgtgtgtgtgtgtgtgtgtatatatatatatatatatatatatataaaacttttatagccactaagattcattagatctcacaaaaacaatcagtggaggtttgtcattatccccgtttcagatgagagaacaaataacttggggagagttatttgtatataacaaatatctcacaaaaacaagtatataaccagtatataacaagtatatccacaaaaaatacatcacagagaccaaaatcaagctgtgttttccatatgtatcatgtattctttatcctatagattctcgacagcaatatgacactttaagtctcagatttaataggttgttttgaaatagagaagccatggggaccttgatcgcttctaatgtcctttagccaggtaaatgagcatagacattctcagttacttacatcgttaacccaaacatttggtttcaggatcccataagcgacccatgacaggaagacttgggcttccctggctagagcttctctcattagagcagatgtgtgtgccttgcactatctccttatctttccccctgctgtaggggaggggcaacttgggggaaaatgactcacattagagataaggtgtcaatgatataatctccataaagctttgattaacagggcccaggacacagtaagcctttggcaattaagcttttacaaaaatatgcagtttttaatgtcattgttgttgttcctgttgcagcattttcccttgccctctttgcctgttctctgattgttccttagcaaagagcaaagaaaaaaaccaaacgttccaaagtcgaagacttttcctttgatacaaacaagcgaaagttcgattatttgttcaataattttccgttgatcccttagtcttgtagtcgctactttataaccggtccctagaagggggcggttctttccggaaattatgactgcagctgttttcactccgctgtgactcagagcgctccgggctgcaggagaggaaggtaggggaccaagctaccggtgcagggcctggatccaacccctgctctggaagactgagagctccacattctagctccctttccccagtccccaaatttgtaggggctccttgaattgcac

SEQ ID NO: 8532 - DNA, 2300 bp, Homo sapien
tgtttacatttctcttgagtaaaccctgaatagcagaattgttgggttataatctaagtatatgattaactttctaagatattgccaagcagttttccgaagtagttgtacggttttacacctctcctcaccagctatgtgtgagagcttgagttatcccatatccttggcaaactttggaactgtaagtttttgtttattttgttttttctttcttttataatttttagccatttccatgtggctgtgtagtggtatgtaattttcctgatgaataatgaatttggtatctttttacgtgcttatcaactatttacatatcttctgtcatatatcatctatacaaatacttttcttatattttaatttggtctattgtctttgtatcattgacatgttgatattatttgtatatatttacataaaaggccatagatatacgtattttttgtggcttactcttaattttctttttttaacttttattttaagtttagaggtatatgtgcaggtttgttacataggtaaactgtgtcaggggagtttgttgtacagattattttatcacccaggtattaaacccagtacccgtgagttacttttcctgatcttttccctcctcccaccttccactggctctgataggccccagtgtgtgttgtccccctctatgtgtccaagtggtcatgtgttccaatcatttagctcccacttagaagtgagaacatatggtatttggttttctgttcctgtgtcggtttgctaaggataatacattcatgtccctgcaatggacataatcttgtgcttttttaatggtacctttggagatgtgcttttaattaggataaaaaaggatttatcaatgttatatggctaattcatgtgtgcatatatgtcctaaggaatctaattggattactccactatattgaaattttcctctagtgttttttcctaaagtttaatagtttattgtttatgcttaaatttaagatttatttcaatattcttgtttgcatgggtgtgagatagaagattttagattttctgtttctactttatttaaaattcaagtatgacttatttggaattttacattaatgtatcgaatgacaaaatcttttgtttagtgcataacagaggctacatttatatatttcctaattttataactccatctttggcacactcctaattaaagaaagaggaaagagattaatgaaaatgtgtgaacatcatgtttactatttttgtattttgaagtatataaatatccctcattttccaattgatggatggtggaacaacaacgaaaacaattattgttgtcattttcagagtgctaaatatctgctaattagatgatgatgttaatttaattgtccacacttatcaactggtaaatgagaggatcagaatatgaacacaggcactttgatattaaggattttttatttagccgctactcccactgttttcctctaacaaaggcagaggtgtaatatttggtccaagaaccataacactgctgcagtgggacaattccactggtagatctgtatcatgaatcttgttggtgccatttcattttaataataatactgaaaatctgataatttttaatagaaacctaaattgcctgattatcattaaaatcctccaaagatgtagccataatgcacctctgttacccttggcagaacttctctgctcgttaataaaggacaccgtactgaatgcaggtctgctctctcccagtggcagctcagccagcttccatcattttcattagcccttgtaagtttttaagtgtgcgaaaaacagctcagaaaagttgacttgaaatctttggaatgttcaacccagagagtagcaattaaaattcttaaatgataataattatggctgaaatattttatataaaaaacaactatttgatattaagctataaaatatttaattaataaaaatattacttagctaatttacccagagttaaattattatatataaaccaaaggtcatctaaatcatgaatcctcagcatgggataccctcctccaaaagtagaatagcaactcaatccctacaaacaccatggtttttctttcctccgtagaaactgaccaaaggaaaatgtcagcaggaaaccattcctcagtgactgagttcattctggctgggctctcagaacagccagagctccagctgcgcctcttcctcctgttcttaggaatctatgtggtcacagtggtgggcaacttgagcatgatcacactgattgggctcagttctca

SEQ ID NO: 8533 - DNA, 2300 bp, Homo sapien
atttaaggtattttggggcaatctattccaaaaaatatgtttttgagatttgtgttattgcatgtatttgtgatatgttccttttaaaatatagagtaatattttatgtgtgtgtgcatataagacagagagagagaggaagagagagagggagagagaattgtagtataggtgtatactacatctcatttatgtattcatctgttgataatgttttggttttttccagtttggggctcttatgaataaggctgtcatgaacatttttgtataaatcttcatgtagacaaacgtttacatttttcttgagtaagtactgaggagcagaattattatattgcacagtgtctgtttaaatttatactaaattgccaacatcttttccaaagtggttggacaattttacacctcccccaaattttataagtccagttacttcacaccaacatttggtattgttggagttgtttcatttaacccattccaatacaggtgtgcagagctgtatcactatggttttaactttcatttctttgatgactgacattgagcatattttcatatacttaaggactattcatacatatttttgtaaggaatttgttcggatattttcctgtttttaaaattttcttgccttcatattaattgtaaatattatttatgtattttgaataaaagccctttttcagatatatgtatttccatagaattgccttctcattttcttaatactatcttttgaagaacagcttttaattttgatgacatacaaattaagtatttgtatggttttttgtttgtttgctttgggttttatttatgtgtgtctgtgtgtgtgtgtgtatcctttctaagaaagcttaaattttaaaatctcaaagaatttctctagcattttcttccagatattttatagtttagcctttctgtttatatctgtattttagtttttttatagaagtaagatatacatttttaggttttccatatataatattctttgtaatttaactctaagccatttggaattttactttggcacatgcaatgagtaatttgcctgatcatagtttaacagaataaataactatattttaaattccatatattctaaatgtatgcctgttttttgtacttcttcctaattcacaaaagttaaaagaagagaaaaaaaatggaggtatttatatctgtttctgtaatttgaatgagtaaaatggcttattttccaattgacaggatatgaataggtaacaatacaatgatgatcttgcttactttctgattaataagtctgccaattttattaataggtaggtaatatttttatttatctttcacagatttggagtcaagacacaaacgggttatttaacttatccacgggtatcattagtaaatgatagagtcagaaagcaaacataggcactttgagtttaaagcctgtccatttaaccactactaacacagcttccctcaaataatggcagaagtgcttggtccagagaccataaaccagataactgtgggccagtccagctcgtgttaaatttatacaattattgttatagagattgtttcatagtaataacattttaaaatatgaaaattttatgtataaatcgagatttcttgataattacattaaaaatggaaaaatctgacagtaatatctctgttcacccctcccagaaattagtttcaggtaattaaagtttaccatccttaggcagggtttgttctctccaaggtttcatgagttcaactcatttatattggcttatattaatatttaagttagtgagtctaaacttagaaatattggcttaaaatcactgaaatatttaaaagaaagggatacttagaaagtgttcaatgataaaaatggctaaaatattttacatgaaacacatttattatatttgaaaataagattaaataaatattatttgaggtaaactttacttactcaaaggagatacctaaagcatgaatatctgggaaccttttctaaatgaagaataataaagtccctcccacaaccatggggtttttttgttttgttttttctcttcctgcagaaactgactggaggagatgtcaggagaaaataattcctcagtgactgagttcattctggctgggctctcagaacagccagagctccagctgcccctcttcctcctgttcttaggaatctatgtggtcacagtggtgggcaacctgggcatgaccacactgatttggctcagttctcacctgcacacccctatgtactatttcctcagcagtctgtc

SEQ ID NO: 8534 - DNA, 2300 bp, Homo sapien
atcccaggtagagtattcattttggacagagtattaaacataaattcctaccttctcatccatctaaagaaatgttctcccagcactttgggaggccgaggtgggtggatcacctgaggtcaggagtttgagaccagcctggccaacatggtgaaaccttgtctttactaaaaatacaaaaattacctgagcttggtggtgcatgcctgtaatcccacctactcaggaggcttagacaggagaattgcttgaatctgggaggcagaggttgcaatgagccgagatggcgccattgcactccagcctgggcgacagagcaaaactctatctcaaaaaaaaaaaaaaaaagaaagaaagaaagaaaaatgttctgaggtcactaggagatggatcaagagtccattcagcttgcatagctctgctgtgtttcctcctggcctcataagcacatgtcccttggagatgaaaacacttcagtgcccccaactccttcaaaaaaggccaaacactttaaatccctctcaaaatttccaaatctgaaaacaaacattttaaaacctaaccagcaccaaatgtttaaaacattttggttattcttaccaaagtgaaggacctagggcaaagaaacacatgtgtctgtcttttcttcatacaaaggtagtgtattttcatctcctgatgttatgtacttttctctgttcaattgtatttaacaatatgtgccacatgaaatgttgacaagtgtttttagataatgaatctttacatttaccattttacctttgaaacaggtatcccacttcacagattagaacaatgaagtttacatgaaatgacttgcccagtgttacaaactggtctgcagtaaagtcaacccttgaaatacacctactttgatacccaaacctttccattcattgctgagtagactatagttcacctcattaagctcattcaatatttctgttgtcaaatagacattggaagtgctgagtttgcaaaactgaacaggtttctttctagctggactatttggagccttaaatgaataactggcacctgacaacacacacactcctctgaaatggctccaccagggagccagttcatgttgaaaagggtggaccaactagattctagtgcttcttctgggaaaagtacagcattctcttttatttctttgtatccagggcccaaaccaccaagggtaccacgctttggaaagttcaagatttacacccatagcaacattcttctcagacaccttcagaagcaccttttcctgccaccgtaaggtctgttctgtggggtgtgcggatctcgtaagtcaggggggaagtagttcactgctaggattccagccagccaactcttctggcaatagttgaggtccgataagactctgtgaactttatagatgaacacctgggttacaagagattgttctcatcagtgattccaatgatgaagcttttgcctcccccacccttctccagcttagcagagggccagaggtattatgtggagactcccacttctgcagtatttttacactggaggtatttttattcagcataatgagtagatgccttacacccaaccccatgcccaccatcactccagttggaagtaatagacactttcaattctccgaggctgaggcgtcatcctctccttgttttcagatattgtgagaaatatgtgcaggcctttgagtaggagaaaactggggaaattgaaaaagtgattgaatcttccttcaatctcttctactgtttaactgtgacaaattggctatcagaaattctccccacaaagtaaacatttgctttttttctaccaaattcaggaggcaaatgttactgagtcagtcaggaagtacttttttgtaacttaaattctggaccaacttggagaaggcccagggaactttagggagacaaagcagaggtatcaagtttagagacaatgaaaactatgactcagtctgttagctgctgtcaacctcccttatgcaatttggttttgtttggaagagcagtgagggtccatgttaaggtaattcatactttctattttcacagaaatgcctaaagaagaatgaccatggaaaattattctatggcagctcagtttgtcttagatggtttaacacagcaagcagagctccagctgcccctcttcctcctgttcctgggaatctatgtggtcacagtagtgggcaacctgggcatgattctcctgattgcagtcagccctctacttcacacccccatgtactatttcctcagcagcttgtc

SEQ ID NO: 8535 - DNA, 2300 bp, Homo sapien
gacaaacagctaatgcatttggggcttaaaacctaatgcatttggggtgcagcaaaccaccatggcacatgcatacctatgtagcaaacctgcacgttctgcacatgtacaccagaatttaaagtaaaaaaagtagtatgttatatatcattatgcttagcttaatgagtaataaagagggtaaagttctcattccatagcacgtaattttaaattcttaacctttctactttattgagatagtcttttctaaaagaaatactctaggcattatttgtgatagttctgtgatgaaaataatttgggaatatatcaatatagaaatgttacggatataggaaagaatgtgcttcaatcactagacctattattaagcagcctcccttgggtggcaatgcggctgttaggcaggattcatatccaacacagggtccatgcatgcacatcagccaatagtaagggagggttccacaagcctggcatgggaactaggcagggaagagaaggggacttaaggcagaagcaggaacctggacaaaggaaaaggcagaggctcacgacagaggtgggaacttcaagaaagtgtcggacatcatctcaaaaacccagtgcagaactctcaagctgctgctggctcactccccttcagcagccagctctgtctcacctttccagagtgtactgtctctctctaaataagctctctgctatttttcttcaacaaattctctttttggctaattcagtcatttggtagaatatttttccaagtaaggctaaaaatctagaattcctgaacttcccgtaacagggcttgttagagttgcattctggtaactctgattctctttctcttagagtattctctaattcccctaattcagaaacatggctgtcttctcaagtgctcttggagataacaccccacctgtcagcttttaaatcgatatacatattgagtacccttaaaacactgtagaagcaaatttttataaatttttgtttgtgatcataaaaatatgtttttatgcaaaataaaagcaaacaacatctcactctatgtatggagtttttcctcccttgacattttttctcactttggaaaaaaattatgaaacctgatgtcttaggtaatatacagtgtttcagctgaaagcaacacaccctgaatcctttgcttaaactttaggggaaacgaagtcagggaataagaaatctccagttcagatctcacagctttgaaagagaaaggtcagtgagagtttggccatgaataatggatagcaggaaagggccaaggagggaagcgctgagttgctgatggttcaggtcttacacctgaaagtcagccttacttctttgcttctttgctgtttctggaacaggaaagatctaaactagaatctcaggatagcccttggcacaacatttctgtcaaccacatccacactgagtacaagaatctcctggcccactcaagttttccattcaaagaacagaagtgagctaatgagggtcagaattgattagaaccatttccatactttttttttttgtactaaggtctctttatagacgtcttttatgtttcttatttcctagttttagcaaatgctaattatgttgattcatgttgatgggtaaggaaactgaaatggactacttttatatcatcagagctggattagaagccatgttgtaacaaagtctgaaggttctattggcatatgctcagataaagaaggtaagcagtgttgttttaatggtagcaatgacaaactaattagatttggaaagtttgtgcttcctccagcagtgaggtaattatgggcataagcctggaaacaaaatgggaggactcttactaaaagaggagcattcaacagggttttgggtgaaatcaaggttcttggttatactcataatatttgcccttgatcttgtaagaggtccctgaaaagaggcaatcatgggacagatgaggctctcaggaatggaagcaaccaacatggggcatgtcattctgctttgggaatcagaaaataaatctaatgtctctcttttctcttatttcttattacacataataccttaaaagacatggctacttcaaaccattcttcaggggctgagtttatcctggcaggcttgacacaacgcccagaacttcaactgccactcttcctcctgttccttggaatatatgtggtcacagtggtggggaacctgggcatgatcttcttaattgctctcagttctcaactttaccctccagtgtattattttctcagtcatttgtc

SEQ ID NO: 8536 - DNA, 2300 bp, Homo sapien
atttctagaaaaggggtggtgacattgagtattgccatggtaatggtaaattttcatggcactggtgaacatgtcttatggggaggcgccttccatgcctctttcctgcttcagccagtcttcaatttatatgaagggcagctccctaaaatagtagatggagtcgagtcctgcctcctagggacacattttgcttcagatttgtctggatccaaggggtcacagggattgtgcctctttttcaatttttctgatgtgcttggttctatgtggctttttcttagacagatttcttcacctatagacaagaagaccccattctgctccttatgaacatgtgtctccacctttattactctcagccatggaaagagccacttacaataaaattttcagaaaaataggacaggagagaatgttctcaatttagcaaaagaaacttattaaaaaactacatcttacatcatagttaatggttgaagactgagtactttccccaaaagactggaaacaaactaagattattctctctcctctatgtttggtgaagagcctagcttgttgaaatatgacagaaaaatgaaataaaatgccaatggattgaaaaggaagaggacaaataagcattgttcacctaaaataattgcttatgtagaaaattattttaaaaattacaaaacaaaaataccagagctaaaaaatgaattcaggtctcaggatacaacgtcatcaaacataaatcaactgtgtttctatatactggccacaaaaatttggaaagttacattaatacatacatcatttatagtagcatcccaaactaacttaggaataaatttaatgaaagatgtgcaaatgtctaaactgaaaactttaaaaccttgctctgagaaagaaaaataatatgaataaatgcaagatacatgatattcatggaatggaagatacaatgttattaacatgtccgtctattagatctgtagatttaatgcaattccagtacacatattgtatcaatatgttcaaaattctcagaaaaattaagctttaaactggaggtttaaattaacttttaaactggaagttaaaccctaccattgccaatcaaagaagaaggcaaaaaagaggcaatttcagacaggcaatttctataaaatttgtatttcatgtacattttctctagaaattaatagaaaaattttcaatcaaaatgaggaagaaaactattacagttgagaggaatgtaaggagaattgaaaattaaatgtaatggggtaacctggatgacctggcacagaaaaatgacattaggtgaacactgaagctatataaatacagactttagttaatgaaaatgtaacaacattggtttattaattgtaataagtgtaccatactaaggtaagatttaatattaggggacatgagagtggggtatatgagaactctctgtactacgttctcaatttttctataaatctaaaactattctaaaaaatgaagttcactttaaaaatggagagagaaatgaagaaacaggaaaacagaatctagaaaacaggttacctaacacaggtatgaggtgaagagaattcccagaaagatggtgacaagagatctcaaaatgttagattttcaacaaagctagaggacatcccattaaacttctgatctggtagtagatcacaagtttcttaggatgacatttttgagaagatgaaatttttgaaatatcagctaacatcatatggctacaactgtatatagtgagaaaagatatatacaaatggagaagaggtcatgaggataattcaaggaaatcatagactatcaaagcaaatgagagcccccaaaaacatttgcttcatggaaaatgaaaaagaaataaaataaaaatgattctggtatctgatctattatctgtaaatagtgtttaaaattgtgttaataatgcaactactgaatatttatctaaccaaatttataattattataagccatattacaaggataagattgtgcgtgtgtgtgtgtgtgtgtgtgtgtgtgtgtgtgtggtgagaaggaggttacaaagaacaaattcttttattccataagaacccacattagaaaatcaagtgtaatccaatcaggaggtgaagagaggcttacgaaagcaatgtattagagaggaaagaccagagcaagattttgaagagatagcttctctgggacatgaagcctggatgaagaaggtgagtgaggagcagatgcttaaatttagtaacctgggtggtcatgaaaataatttagacaat

SEQ ID NO: 8537 - DNA, 2300 bp, Homo sapien
gacccaagttttattctggacttcaccaccaaccaactctgactggtggacttcaattttcctgtctagaaaacgtagggtagatagagtattagggcattgaatcccaaacctgcctaaacatccagatcaatagggtgaaacctgtctaaatatccagatcaatagggtgagaaatataagttataaaatcccacccctggagattctaatttatgatgcctggcttggggcagcaggatctgtacttttaataagcatatagttatctaattcatttgcacagccaggtttatgaaccacaggattagatgatttttaaatattgattcaaatttatggggctccaagaatgataactagctgtcactgagctcaagcaaggctctgagaggctagaacacagaagggatgacttttgtcacgagagaggggagttatgaaaagaacaaagcaagcaaaacgagaaagcaaatatcccgtgggaagaaggagaatcaagctacaaggccttcaggctcacgatgaggaaagctgaaaataacactggaaagaacaacgatagaggacaggggccatctaggggaatcccaacaagttagcaattttggaaaaaactcttaaccaatcgagattgatttttactgtcaagctcaaattccaagaaaagacagattggtttgtcttctggactgggtattgtgcagctcagcaatgaactgaaatataagtgataggttgaatgtcctccatcagagtggcataacattttgtttttgccttttctggatcttatcacatgcttttgcttagttatgtgtgttctagtgtctttttcaagacatggtcagagtcttgaaggcaagaactgggctttacatacttcattatcttctatagagaggtgttaaactcagttattaagaacaccaaatctggagtaagatgcacctagttttaatatggcctttgtaacttaacatttggggagttacttcatctctaaaatgagggtgataaaacccagctcatagaatttggggtagaattaaaatgaaaaattatatgaaaaatggtattggatcctggcatgctgaggtcagtgcataatgctaggaaaaaaaaggattaggtatacattaagtgctcaataaatggtaaattattgtttttgcacaatgctttgcatatttccgagtagatgttaattgaacaaatattttcatgtttctaaaagcccattcaaatattatcaagggtatgagcacaactttgttatatccaggtctgtgatcccaggggaacttctgctgctctacttctaatcagttccccagatatccaaactcagaataaaactgctcagtctcctgtcattggctgtcactgataatggtaaggatgctgtcgcctttctgcaagctggaggaaggcctcagggcacagcctccatcagatgtcacgtactgtagctcagaaagagttctgaggcagccgaggctccagtgctgccatcgggatagggcctagcgggctggtgcttagtctttcatctgtgatagctccgcagccaatctgtctgaacaagtgaagataagagctggacctaaaggcacatcactgaaactctgggctgaagaggatgagaggctgaatccggatgagcagtccgaacttttcccgagtccccagtctcaggtactaaagctctgggaagtccactctacccttctgctctgtccaggatgaccctaaccctaactctccaggcacaggcgggctgggtccggcctctaagaggactcttcctggagactggccccagtttctgtaaacttaagtagaaactggagttgaaagggcgcaacaaagggatcaaagtaaagatgggaggccttgccagcagcacctgccctggccatggaggcggggcttgctccagagggagccgcagcaaagccccctctgctgaagttcaaaatctctctgtgtgcctcctattctcaagaaggaaggagggatgactgggagggcagcagtggtctctctctctctctaaataactttttcccttgtccccacagaatgccttaaatgacaatggctgctgagaattcctccttcgtgacacagtttatcctcgcaggcttaactgaccaaccgggagtccagatccccctcttcttcctgtttctaggcttctacgtggtcactgtggtggggaacctgggcttgataaccctgataaggctcaactctcacttgcacacccctatgtacttcttcctctataacttgtc

SEQ ID NO: 8538 - DNA, 2300 bp, Homo sapien
ataatttgatataaaagcttacaatgcaattcagactttgtcttcacaccacgtcctaatgattttaaagactcttacttctaagaaaaaagaatacagttagtgccagttataggaatcaaatgagacaatacatttgtgaatgctatgtttaaaaagcagattacaaatgtttttgtaaaaatacatatatatttatatacatgtaaatacatatatgcataggaaaagtctagaaggatattcactaccaccgtttggttccaagtggtggaaaatggttgttttaaatttttgcttatttgcatttctaattcactacaatgcctatatattgcctttataatttttttaaatgcatccaaaattagcaatagatctttcctctatcttcaaaaattatataaattaaatgttattaaataataataaagtgctacacaaagatacgctaaaacaaaacaatttagtttagtggagacaaaacacactggtggtcagaagtcctgggttttaggcccagttttgcctcttactagctgggtttccttgggtgacttatttaacttttagagcttcaatttcctagacaacgaaacaaaatacagcatttttcctatgctatgcatatactaagatatcaagcttaaacctattttaatcatacattgctaagagctgtgagtgtgcagatttacaaggctgcacatgtgaggcaaaagaggaaactcatgatcaggacagagccgaggtaagtttgagttccaagtcaccaataattagtaaaccttgggcaaatcacttagtgtctggcacctcagttttctcaatacaaacatgaaaataaaaatccttccctaaacacatttctccccatttccgaaaacttcagaagttaatgagatcgacctttgaaagaaatgtgtaagctgtaaagcattatgcaaaagttagtaattacataaggaagcaattaaaataggggtaatatgttttatagcttaagaaatacatcccacagataagactgtctatacatattgtatccagcaatgattattcatgcttcctggagatatgcctgtaatttgaatactttgtcatcagggatgtaataggacaaaggtttgatattatgatctgaaaataataataataataattagctatttagcacttagtatggaacattcaatgggccagtgctcatgttgcaccacagatcaattaaatcagaacatctacgggtagaacccaggtatcaatcctttgtaaatgccccgtgtgattataatgtatagccaatgctgagaaccactgccttaggacctcaggtcaagtaagaaattaagaacaaattccagactcttaatgacaattcacattttttataggcactgagtatttgaaaaaagatttctaaatatgcattatcctgtgttatttttacaaccacctttggaatcaatattaatttcttcatctttcagacatagaaattgatgtgtcagccaatgacacagcttgtaactaccctatcaccctgacactgcgtaaatttcagataggtatttacatgttcacattcagtgaatatttaggaattatatacatgacaaaggaagtttatttctaaagcaaaatccatccccaactacaaaatatgaaatatactacttatctacaatgtagagattctcaaactttactatgcaacaccatcaccagaaagattgttaatacatagattgctgggccccatatccagagtttctgattaattaggtgtgagctgaggcctgagaatttgcatctctaaaaaactccaggtaatgtcagtgctgctggtccagggactaccctttgagaaacactgccccaggatgctttagaaaaatgtgcatggtaaaagatccagaccttggcctgctttcctcccatcttcatgatccctgaaacactcacgctggtcttcctgcaaagaagaccagcaaatagcaggacgaggggaggagggcggggaggatgcatcagcagagagcccaggatgtttcactagcaccaaaggctcaagactagccgtccaagattagccttttaatggggttcttgtctcccatgcatccctgcaggcctcccacccagaggagaatggctgcaggaaatcactctacagtgacagagttcattctcaagggtttaacgaagagagcagacctccagctccccctctttctcctcttcctcgggatctacttggtcaccatcgtggggaacctgggcatgatcactctaatttg

SEQ ID NO: 8539 - DNA, 2300 bp, Homo sapien
taatcaattagaagtttatataatgcttaccgtttggaaaagctggaagagaggagcacagaggtggtttctggggtgctcgtaatgttctgtttcttgatcagacgagtatttattaaactgcatccttatggtatgtgaatttttctctcgttttttggtctttttaattttttatttcaatcgcttttggggtacaaatcgtttttggttacacggataaactgcatagtggtgaggtctgagattttagtgtacccgtcacccaagttgtgtgcaccgtacacaatactaaggtgtgtacattatttctcaataaaaatgtatttttaaaaagtaaaaggatatgcatgcatacaaactaataataaacatttggcaaaaacatgcctaattaaaagatacagaaatgtggtgtggggagggtaatggggaatagaaataaagggtcccttctgctgccccatgacccatacacgccagttagcccacgcggggcagctctgaatccaagttggcctctagcctgtgggatggggagagaggtaagcccagcccaaacatttgtggcctaggagaaaaaagttcaaatacagatccacataccatatatctaaaatattaaaagttataaaccaagttaacaaactgttaaataaaatatgttattcttgctcacctagacatatatagacaaacacaccccagcttcataatgatcaggaatgccagattcaaatttagaatcctcagactctcccaagcccctggcccaatcttctcttcccaactcagctaacacccacattgcaaaaaacctcagaattgcatgtgtggacaccccaagatttataaattgcatccaaaccctgacaaccagccattccttgggcctagaagtgcacaccagcagcacaatcttcccttgggcagttgcccctgaaaaaaaggcccacacaggtctgggaagcaggctgaggccatttgggcagggccttagagagtggtttctagctgggtgcacagactctgaatggacacatccccttgggcccacgtactccttgcctcatgagaaggacacaaccaaagaggataaggttaagagcctctattgccagtttaagggcaacactagagacaagagtgccctattctccacttacccacccccaccaaattgaaataagagctgacacttctgctacactttacggtttacaaagcaccttcacaaacaatactcttaatcaatccccacagtcttgtaagcttgttacatatcacaatttgagagatggggaaactgagctaaaagtgacttgcctgaagtcacacagttaaaacctgagtactcctaggtctccagtggaggagtttctcctccgaatttcaaaggttgtactctttccatgactcaacactgccatgcatcccccagctttgtaaagaacccaagggctaaaaaggaattggaaattgtaaatatgtagttgaaacattttggaaaaaagaccatagtcagggaaggaaatctaacaccaaatacagaaaagttctgggaaagagtctgggcccagagcaaaaatcatcactgggacaaagactactatgtagggtagcaatcccagctgggtcgtggggactccattcccactccaaaccacaaaatgagtgccttcaaaacatttaagcaatcctcacccaaattccacacaaattacatggaggggggtcctggctccacagccctccttctctccactgaaaatactttatcaatgacagggcagcataaagccacagacctccatctgctctaggacaatccagacagcagcgtggcaccaggcccaggtaaggcccgaccctcctccagcaaggacccgctaaggctatgcctccctctaattagcagggcctggctcagggcctgggcagttatttagagaaccatcgcctgctcccagcagagatatccataaggctggggtggcaggcactgtctgcccaaagtcagctgcctgaagctgccgtctcctcattccaccatcccaggacccctgctgccacctctgcacccccaagctcagcagcatcatgtcacttgcacacacagctgcagagtacatgctctcagatgccctgctgcctgaccgcaggggaccccgcctcaaaggactgcgtctggaactgcccctggaccggatagtcaagttcgtagctgtgggctcccccttgttgctgatgtccctggcattcgcccaggagttctcctctggtaagttgcttccaagacc

SEQ ID NO: 8540 - DNA, 2300 bp, Homo sapien
tgctattgaacttctttctcttctgatttattaccctattttagcttctaactcccattcctatgcctgtagttaatggaactttggtctgacttcaaagaccacactcagacacaatatcatgctgtctgccattttatatttctttttagagctacacattatgcatttctttaaagaatttttgcataggccatttagacccttcttcgtatagttaagtagaaaagttgtgttgcttctgacagattcaggtaagtttacctaacacaagcaaagagctgatagatggtttcctattgtcactgggtcaaagtccaactcttcagttggtacacaagacttttcatgacccaaaaaaccctacttactgcttcagtctctcttcttgcttctctctacacacatctttcacactgatcaactacttgcagttcccatactgagcctttgcatatgctgtctccaccatccagcatgcccccctttgttcttcactgggccaaccaaccactacctctccttcagagtctgcccagatgtatctcctttaagaaacctttcctatctcctccctccttccctgagtgctgccaaataaaataaaacctacctctgaaacaaacttattataccatattaacattgccaatttacttgtctgtctttccttcttaaattaaggttcttaaaggtggtatcataataggcactaggtaaatattcttctaaacaaataaggactgaatgagttgctcagtggcatgacctttgtggagcacacatatccagcctctgaacagtcctatatggaaaaagctttggacgcaaagatatgcttttaatggaattgaccaaaaagtcaaagaacatggaaataattatgcaaaatataatatagccataactggaatattaaccagccacttaaaattatgcttataaggaagctatactaacatttgtgaaactgaaatgatacaatggtaaatgaacaaaaagaaaactttattttcagtattgtctaacctatacaaaaatgcataaaatattagacacatatactaacatggtaaaagtagttcattccaagtggtagcattatggatttttaaacctttcttgtactatattttctaaatttctaaagttcgaatgaaatgttttgtaagtgtaaggaaatgtgtccaatgaagaagaaacaaaaaatatcttcatgcaaatcccactaaagtccattggccaaaacagcctgcaaactaggacaaaggatagcacttttcttccccctagatgtgatacatgtatatgaaaataaataatacaaataaagtcagaccccaaagcccgcaaggacaaaatacagcagaacagcaaattttttttttgagagaaaaaactagagagttactgaactagttattggcatcgctggaagaagatgcaagcaagccttctgccatccagcctgggtcacttaccaataccgcaccctaaagatttttctatcttccctaattttaaatagaccttggttgtaaagttagaaccatatacatgtacatattatgtacagaaatacacttctggtttcactagacaaacatttactgagtgcctacttagtgctagtattaaaactgcgtgttaaatctctcatcttccctactagaaagagccaaggcctttcttcctgttcactactgtgttcccagctcctgggaagatgatagcattaggaggccctgcaaacacatttctgtgagctgcagaaaggaacgaagcagggaaagaagcagagtcccagcacttgggctcactttgtcctacagtctgggaaagcctgtctgcacgaagcatgaaaaacgtattaaaacgcagtggcccagcgggggagcgtgaatgagagctcgcattggtaagcttcttgttagttcgttggttcaactatagtacccttcagctaagcacacggccgccggccctccctcctctcctcatccagcactagcccccagctgtctctttcctcccggtgcccacgatcgcaccgcccagaccaccctactctccctgccccggaagttacacactgccgacaccgggacgtaacttccgggaagggcttacttccaagacagacacggaagtgctgggaggcgccgggagcccgttcggttgcgggtgtctctggccctgcggtcagccctgggaacgtcccggagagctagattcctagaggcccgattccgctagcccggaacagacaaagccagcgctcccgcccgctccccgactta

SEQ ID NO: 8541 - DNA, 2300 bp, Homo sapien
agtgagctaagggaaacactgaacagatggttattgcaaggtctagtgatggagcgatgcacagagtgtcgtggaagcacggtgcggggcggggaggtcagtgtttattaggccttttaggatctgcctctcatttgatattctttctttgtgttaaaactccttaatacttgtttgtacttaccatcttttgccatatattttattcaactaaatacttgtcttactcttttttttttttttttgagacggagtcttgctctgtcgcccaggctggagtgcagtggcacgatctcagctcactgcaacctccgcctcccaggttcaagcgattcttctgcctcagcctcctaggcagctgggattaaaggtgtgcgccaccacacccagctaatttttttgtatttttagtagagatggggtttcaccacgttggtcaggctggtctcgaactcctgacctcatgatctgcctgcttcagcctcccaaagtgctgggattacaggcatgagccaccatgcccagccctacttgccttattctatcaactaatagacctatgaggagaggttccatgtgtctctatattgctttcatcactgtctcccatccatctagtagttcctgatacatggtaggtgctctgtccatttaattattttggaattgatttgaatcctcactattgcactgtctacttttggagtgccagtgacttagccatagtcagtctttaataaaccttgggctgaactgatcccatccttgtgtgtacatgcatgcccccctcttcaccagctttcttctaacatgaaattgctcactcttgcctctgttggttactgggcagtgtaattggatgaatgaattagactgtgctgagaatttaaacactagttttggcttctgtggctttccctttgggccgaatttcccatcacttatctgtccatgttttctttaccatagctatttatttttattttttgacttttattttatttattatttatttttttgagacagagttttgctcttgttgcccaggctggtgtgcaatggcacgatctcagctcactgcaacctatgcctcccaggttcaagcgattctcctgcctcagcctcccgagtagctgggattacaggtgcccaccaccacgcccagctaatatttgtattttgggtagagacggggtttcatcatattggccaggctggtctcgaactcctgacctcagatgatccacctgcctcattctctcaaagtgctgggattataggtgtgagccactgcgcccagcctctttagcatagctataaaattgggtataaagccaccagaaaaaagaagaaatacacatttcttcttaagttgccccctccttgctttttcccttccacagagctaagtgggaatgagtggctgagtaagaggggagacacagaagagagtagcatggggacatgatggccctcccacctctcacctatttgagggagagcattgattatccgagagtctgcagatcctgtaagtgatgggaagcatggggaagcctattgcctagccagagttttaacttccatgttatgtaagtgaattatttataatcagactgagagcaaaatcgctatcatatctgcctctctcccaggcagagagagctatttccttgttatgagaacaagcattttgagtaactgaaaaaacatgaagacagataaaaggaaactatcactaaggttacagttttctcccttggaaaagattctccttagggaaggtttggaagagataatagtgttcagaccagcatattggtcttgatgctgtatcttctctgtgcctctcaatcttatcctacttttgaaagtcttagaaaacaacagaagaatgacctctgcccacccttctcacctcgacccacctagcagctgcagtttgtatccatcaacctttctctggctctttttctttaaccatttctctgaacagaaaacttaggccatggatatttcaagtacatgtcagcagtgtgctggctctttggacgtcacctttatgacactctgcagtatcccatcgggctgatcgcctccagctggggcgggacacccattgaagcctggtcatctggacggtcactgaaagcctgtggggtccctaaacaagggtaagacagcattctccagtctgagaaagagcctaccagggaattatgcaagagagagggtcatcgtcctctgtggggagttaagtatatggtgaatgtcccaatatgtgttgaatgtatgtaatt

SEQ ID NO: 8542 - DNA, 2300 bp, Homo sapien
catttaccatttgatttcttgtttgtttgtttttttgagacagagtcttgctctgtcacccaggctggagtgcagtggtgcgatctcagctcactgcaacctccgcctctggggttcaagcggttctcctgcctcagcctcccgagtagctgagattacaggcatgtgccaccacacctggctaattctttttttttttttttttgatatctttagtagagacggggtttcactacgttggccaggctggtctcgaactcctgacctcatgatctgcccaccttggcctcccaaagtgctgggattacaagcatgagccaccgcgcctggccaatttttttgtatttttagtagagacggggtttcgccatgttggccaggctggtcttgaactcctgactctaagtgatccgcccacctcagcctcccaaagtgctgggattaaaggtgtgagccaacatttggattttttaggtcttcagttttttccttcatttggggctggagtagaaaaacaggaattagtgttatggggaagagagggcagtggttgcctctggtgaggagctccggatgcattggcgaggagcacaatggcaggctcaatagactggcaatgttctagttcttaagttgggtactgctctcatgggtgttcattttattgtgtcattgttacatataattttgtacatctcaagcattacatggtaaacatgggcacagggagaatgacttaaaggaaaaacgtcaggatacgcaaccaagtagagtactaatgaatgaaaaatgtgatcaatgttaatgaaggtgatgtaacaataagacccaaaggaggagataaaatactgacactaaaataaacagcctttaactgaaaacctaataaaatatcttttccccacctcataagatggatctcaaaggtcactgagtggagataagagtcaggaaatggcatacagagtgctagcattttgcacttttgttagactctgaacaatcatttatgggctgcagtttgtctgaatctaggtacttttccggctctcaggtagagcaggagtcatttttctgcacgctgttctcctaccccaactatcatttcttaacagggatctctggggtccactctttgagtgttttgaaacagaaaggaagaaatccaacattatcactttagtttgcattatcagacagattgcaccttctgctttctccatactgtgacccagtgtccagcctagggtattcgaatggcaagatctgacctgcgcaacagccaaagggagccaccagcctcccctatgccactcacattttcccaccaccaatatctgtaagcggtaccagaaatcaaaactgagccttaaatagtcagagctagtgagggggttgtatttcttagccctgataaccacttaaacgagtaaaatttaattcccctaaggaaccccgcctgaagcaaaccctccccaagggcaccactgagggggtagcgctgaaatgttttggaagattcagtcacctgtttccaaatattacctaactagcttcgcctccttccctccgagctcccctgcagttactccaggaccccgaaggcctctttctgggcacatttgggcctccccactcagacaagccgcactttctccctgctcacaggctgcatgtcagggatggtaagtggggggtggagaaagtggagaggccggggttcaacccagcagactcctgcagaccgggcctcggtcggagacgcgagcccctagcctagctaggttccttcgtcgaccttgagaaaggggcgcggatccgtgtcccgcagaggacacggggtctcggagcccgcacaggctgaggggcaggggtccggccgagccgggccgcctcacctgcacttctgtcggcccacaggattaatggcagcaccagcccgagtacaagccccggcgcgaccatgcttgcaaggatctgaccgccgcctaggactgggaaagtgggttcccggcaggggcggggcctgggcgggggcgaggccgactccacccttttgcagtcctcgcagcctcccgcgacctcaggactgggctgtactcgccccttctcggccgccgtagtttttttttttttttaaagaaaaaacggttacccagcaactagaaaaacaaccggaaccggcggcaccagctcggagagaaaggaggtgaggccgcttccccacttcctctccgataccaagacctagccttttcccttcgtctctcttattctctcagcatcccagacacagcctc

SEQ ID NO: 8543 - DNA, 2300 bp, Homo sapien
ggttgtatttcttagccctgataaccacttaaacgagtaaaatttaattcccctaaggaaccccgcctgaagcaaaccctccccaagggcaccactgagggggtagcgctgaaatgttttggaagattcagtcacctgtttccaaatattacctaactagcttcgcctccttccctccgagctcccctgcagttactccaggaccccgaaggcctctttctgggcacatttgggcctccccactcagacaagccgcactttctccctgctcacaggctgcatgtcagggatggtaagtggggggtggagaaagtggagaggccggggttcaacccagcagactcctgcagaccgggcctcggtcggagacgcgagcccctagcctagctaggttccttcgtcgaccttgagaaaggggcgcggatccgtgtcccgcagaggacacggggtctcggagcccgcacaggctgaggggcaggggtccggccgagccgggccgcctcacctgcacttctgtcggcccacaggattaatggcagcaccagcccgagtacaagccccggcgcgaccatgcttgcaaggatctgaccgccgcctaggactgggaaagtgggttcccggcaggggcggggcctgggcgggggcgaggccgactccacccttttgcagtcctcgcagcctcccgcgacctcaggactgggctgtactcgccccttctcggccgccgtagtttttttttttttttaaagaaaaaacggttacccagcaactagaaaaacaaccggaaccggcggcaccagctcggagagaaaggaggtgaggccgcttccccacttcctctccgataccaagacctagccttttcccttcgtctctcttattctctcagcatcccagacacagcctcggagccctgggccgtttgggagccgaggcagcccattctgcgcgagtctgaaatcccaggtcctcaacatcccgcccccgactagacccgtctgccccctccgcccgccctcctctgcccacattggttcagaatctcgccagctcttttcaccactctagaatggttcgatacccccatctactgctccctcagaaaaagcaaaagagaggagtcaggcgtggtggcgcgcgcctgtaatcccaattgctcgggaggctgaggcgggatcatcgctggagcccaggagttcgaggccagagaccccctctcaaagaaaaaaaaagcgatgaaacgagaaccctccatagtctgagcctcattaaaccgtccagttctcccaacctggacccctaccacggcctccgcctctattccgcattgacgcacactctcacattaacaggccaggtcccggaggattcttttcatactcagtagtagctcagcccgctgcttagcagctacccttaatctagcccttgtatttcaagacagaaagagacaacctgatcaagaagaaaccgaaaaatataagaattctaaaactttagaggctgggatttcaaaatcatgacacacagccccatcccatcccatccctccctcacacacacgcacgcacaaccccattccacagtacgaaggtgttcgaagcattgtgggtcatgcttcagaagtggcagcaaggggaaagattgtgcaacttcttcattcaacaaattaatttctagaaccaggactaatttctactctttaaaaaaaaatagacctcaaagaaggtcttctcagcaattgacaatgaatttaactttttagcaatcattctctctaaattcctgtgtgatagcaaaaattacccttaccttttgagcatataaagggtaaagagagaaaaagtcatattgaaaattatgggttttttgcaggattttaaatgatttggcctagtgaatgggtctgtgtttgtattatactaattcacaatggagatttcaaaactctttggaagaaatggatgggcttgggttgtgttagggaaaaaagaattcaagtccagatgtatgagtctcagaaataatttgttggcatagttgtgattatataagtaaaatcagacaaatttaaagacagtactctttaatgaatctttaggttccataggcagttcttaccaagaagatgtcgattccattctccaacacccactaccgaattccacaaggatttgggaatcttcttgaagggctgacacgcgagattctgagagagcaaccggacaatataccagcttttgcagcagcctattttgagagccttctagagaaaagagagagtaagctttctaaaatta

SEQ ID NO: 8544 - DNA, 2300 bp, Homo sapien
tggtattccacctttcaaatcagtttgtctgtgccgttattgcagaacagtttcatataccccagtgaatatcagtttatttaaagagtgcagaattctttttgcagtacttaaaatactttcaaatggaaggaatcaaaattgaaaggaaaccacagatactcatctcaggaataacagtcagctgccagggatgcataggaacagtatgctggaacgtggcgagggtagactgtatgatctttttttcccccactgatttctcccgagaaatgtatgctcttttgcagttaccttccacgctgtatgtccgtgagaaatacaatgaagacggtctgaataatgaactggtaatcttcgataatatgaaacgaatttaagagaacatatcaaagaggtacatactgtttcaaagagcaagaactgttatctgaaactccctgcctcataaaaggctttctgcagaatggagatggtcttaagcaagttttaccataaacaaatgcttagtttcttattttaaaaaatgactaattttagaaagcttactctctcttttctctagaaggctctcaaaataggctgctgcaaaagctggtatattgtccggttgctctctcagaatctcgcgtgtcagcccttcaagaagattcccaaatccttgtggaattcggtagtgggtgttggagaatggaatcgacatcttcttggtaagaactgcctatggaacctaaagattcattaaagagtactgtctttaaatttgtctgattttacttatataatcacaactatgccaacaaattatttctgagactcatacatctggacttgaattcttttttccctaacacaacccaagcccatccatttcttccaaagagttttgaaatctccattgtgaattagtataatacaaacacagacccattcactaggccaaatcatttaaaatcctgcaaaaaacccataattttcaatatgactttttctctctttaccctttatatgctcaaaaggtaagggtaatttttgctatcacacaggaatttagagagaatgattgctaaaaagttaaattcattgtcaattgctgagaagaccttctttgaggtctatttttttttaaagagtagaaattagtcctggttctagaaattaatttgttgaatgaagaagttgcacaatctttccccttgctgccacttctgaagcatgacccacaatgcttcgaacaccttcgtactgtggaatggggttgtgcgtgcgtgtgtgtgagggagggatgggatgggatggggctgtgtgtcatgattttgaaatcccagcctctaaagttttagaattcttatatttttcggtttcttcttgatcaggttgtctctttctgtcttgaaatacaagggctagattaagggtagctgctaagcagcgggctgagctactactgagtatgaaaagaatcctccgggacctggcctgttaatgtgagagtgtgcgtcaatgcggaatagaggcggaggccgtggtaggggtccaggttgggagaactggacggtttaatgaggctcagactatggagggttctcgtttcatcgctttttttttctttgagagggggtctctggcctcgaactcctgggctccagcgatgatcccgcctcagcctcccgagcaattgggattacaggcgcgcgccaccacgcctgactcctctcttttgctttttctgagggagcagtagatgggggtatcgaaccattctagagtggtgaaaagagctggcgagattctgaaccaatgtgggcagaggagggcgggcggagggggcagacgggtctagtcgggggcgggatgttgaggacctgggatttcagactcgcgcagaatgggctgcctcggctcccaaacggcccagggctccgaggctgtgtctgggatgctgagagaataagagagacgaagggaaaaggctaggtcttggtatcggagaggaagtggggaagcggcctcacctcctttctctccgagctggtgccgccggttccggttgtttttctagttgctgggtaaccgttttttctttaaaaaaaaaaaaaaactacggcggccgagaaggggcgagtacagcccagtcctgaggtcgcgggaggctgcgaggactgcaaaagggtggagtcggcctcgcccccgcccaggccccgcccctgccgggaacccactttcccagtcctaggcggcggtcagatccttgcaagcatggtcgcgccggggcttgtactcgggctggtgctgccatt

SEQ ID NO: 8545 - DNA, 2300 bp, Homo sapien
gagcccaggagtttgaggccagcctggacaacatcatgagacccccgtctgtgtttaaaaaaaaaatggtagcacactaagcacacttttccccatcttgctgttttcactgaatatatcccgaaaatcactccacagtatcatccatagtattatcgagagatagttctcatttttgaaaacagctatatatataattcagttgtatagatgtattatagtttgttcactcaaactcctgtggatatttgggttgtttctacaaagaatgatgccctgaaaagtgtagaagtggcacctccgggtcaaaggttaaatacatatataattttggtaggtattgctaagttcccctcctggaagttatggcattttgcttatctaccagcaatgtatataaatgcttattatcccacagcctacagagcatgttggctttttgccaatgtaatggaggggttgttattggtagctcagtgtagttttgatttggacttctgttattatgcattagtttgaatatactttcataagtgccatttgcattcatttttgtgtgaattgtttgctcatacctcttgccaatattttctgttggattctataagcctataacacactgtttttacaaactatttatttattagggctattaacccattgggatataaattgcaaatattttttgtttgtcttttgtagttttgttttcctcacagtgctttttctcatgtaaaagtttacttttatgttgtcaatttataacaatcttttctctaattgcttccgaatttttgaagcaattaaagcaatttagctagcaaaattttttcttctcttatagagaaattcatccatattttcttctagtatctgtatggtttcttttaaaaaatatttatatactcgactaatttggaatttgtctttgtgtataagaaattgatccaattttatctttttcctttatcttaaaataacaaaaagtccacctttttcctagtgacctgaaataccatttaaatcatatactaacatgttccccatcacaaaaataaaaattaagagtagtaaccacctatgatgaatgctggcaagggaattcttgcattgtgtgggagactgagccagaggtccataatgattgttttttttcctttttgaagagactgaattctgatacttgtatcttctagataatttgtctttggttgacatgggtggaattgggtgtggtgcttacaattttttcaaatggttttacccattgtttattagagagctagtgtcctgagaccactaatctgaatcatcatttgctttaattattgtgatccagtaacaatgacgcaaatgtttttataatggaatatttctgagttctaaaattaaataaatgactaaagacttttactgcaagaatttgtagttaatcttataataaaattgatgttcattataattcacctcttttcccaaataattttagttttttccccttccaacttttattttaggttcaagggatacacgtgcagatttgttacatggttaaactctgtgttaaggggctttggtgtagagacaattttgtcaccaaggtaatcagcataatgcctgataggtagtttttcaatcctcaccctcctcctacctctgctctcacataggcccccaagtctattgccaaatgatttctcttaataacgttcctcttctaaatatagtttatcaaatgttttcagtggaaaatatttaaagtttcagattgtgcaacagatattcaccctgaccggatatggaaaagaccagcaacattcaggaaattggcagagattttgagctctgctagggcagggcaaaaaaagcaaggggtggagctatgcagtgtgtgtgggagttgttttaattctacccttgtgctaggttttcttccactataaaatgattacaatagaatgtttgtttgcttgtgcctatttctagtcacctttaccactctgttagaatactgtaataaaaagtaatgatgacaagaatttatacaaaatggatgttctaatcaacaatggctttccaggggttggggcaggggtcgtgggagtgcccaggatggagtgcagtggctattcacaggtttaatcatagctcactaccgtcttgaatccctgggctcaagtgatcctcctgcctcagcccctgagtagctggtactaaaggtgcgcaccaccatgcctggcttaggataggtttttagtacaaaactggtaaagtcctgacagtcataaaccttcaaggtt

SEQ ID NO: 8546 - DNA, 2300 bp, Homo sapien
tatttgagtttgtgagtgtctgtcttctcatctcaggctctgccttcctctctgtcttttcctcacctcagagcctgcccatcccccagggccagcactgtggccagttctgcgtaggcgccttgagtgggctgttgctgaaatggttgctttgcggatggaactgacagttgccgtatctgttctcctatgggccctccagtgttcagagacaccctcaccccacacaaaggtgtccttcaggaagagggaagggctgtgctgcctgtgtgggagttggtggggggggtgttgtaaagatacccccccttcagttctgaccagcaggaagaagggcccagaggcagcgcagtctgcagagggatgttgcctagcaacttgggagacttgactgcaaactcaccaaatcccgaattcctcagctctaatttgggaagagaaaagcacagagtctaggcctggtatccactctgtcccccaatttccccctttcctctcctctctggattctggagttgaagtccagcaggaattggcacaacagaaggccacagatgtgcgtgtcatttaggcaagggcctgagttcccaggacatctggccacttggaggaggtggggagatgaaagatgtgccagagacagattggggaacagatttttttttacaaaagtgggtgggtcccaaacatgctgggagagacacccctacaccccaagccctggaatcccggccagcatccagctcagcctgggaccccaagctggctaaccttatccccaccctgaatggactcaggcatttctctcccactcatttttcctttggcaagcagagcctcgggcccaaacatctaggtggaaaggaagcatgtcaccgccacgtggtccctggtcatggccagggactggggatgcacagcagagctgtctcaggatctgctgtcccaaccagagccacagggcatttcccacctttgctcccagcaggagccatcctttcctccttcccttctctgggaccttagctgagaagactttctagttttctcagagaaggcctaccctacccacataacaagccacactgccagcttttgtaccctgccgagttgggggaggctgacgaccacaacagtggcagtctgtccctcccagatgctctttccatagctccccttcccagcctctcacgaagcccacatcctgcctcatcatggacccaagagccaattacttcgaattctctacacttgggtttagggtatttttcttcttctcaggagcaagggcgaggatggccagcttttgtcttattctgaggcagcagatcaaaaggttaggcagagtctggtatgaaagggaggaggatacttcttccaagtctgtgcccatatataaatacatacaaaataggtgttgtgcatatatgatgttgtttgttgcagctcatgtagacagatcgataatagatacgtcatgccgacagcttgagttgggtgactgtccgtgtgcgtgcgtgagcgcgcgggcgcccgcaacagggtgtccgcatttacctgcaactgaagggctgcgtagttatttttgcaggttgtatctgcagtgtctgtatgctggaagaaggcctgggaaaatcatatgtggacatgtggggcttgtgagcttttgtgtggacgcatgcccatcgccaggttgtaccaacaggtttctccgtctgtagcaggagtgatgatgagacctttttaccgcccgttagggagcctttctttgcggactgagggggagtgaagtgaaagggagccatatttgggactcctgctaggttgtggaagtatggagggatgggtgaggggtgcgtggttttctctgagcgggagtaggtgctgtgcccagatgtgggtgtttgtgctcggggtgtcgggggcctccttctgcctactccggcgtacatctgcctggcagtctgccgcctagcaagccaggggattgcgcccgggaggatggagtgtgtaggaggcttggatacaagcgtgtaggcggaggggctggggcaggagcgggagcgcggcgcagagagccgcgagagggcgtggccctccctccacttctccccgcccaccctgccggaggctgctcctgattggcttcccggccgcggggctcaggttacattcgcgagcggagccgagcgcgggagaccggacccgagagcagagctgctgtttcggcgcgggtcggctggcggccgactgccccagagcccccacccggcaccacacagaccccacccccgccctgc

SEQ ID NO: 8547 - DNA, 2300 bp, Homo sapien
ggtgtcctcctctgacacgacgccttttccagggcctggagctgcagtggttgctggagctgttgtgggtaccctggttggactggggttgctggctgggctggtcctcttgtaccaccgccggggcaaggccctggaggagccagccaatgatatcaagtaagtgtccctggtgtctgctgcagcgggggctctcccagctctcctcacagaggctgggaattcaggcagctctcatctattgggatggggtcagtggctgaaacatcattcctatgggcaggttttaagggagagggaaaggagtactgaagtgtgcaggcagaggtggtatataagaccaagcaggtagaaactctctcctccttcccccacccacttctgacctcttgttatttctttgatgactagggaggatgccattgctccccggaccctgccctggcccaagagctcagacacaatctccaagaatgggaccctttcctctgtcacctccgcacgagccctccggccaccccatggccctcccaggcctggtgcattgacccccacgcccagtctctccagccaggccctgccctcaccaagactgcccacgacagatggggcccaccctcaaccaatatcccccatccctggtggggtttcttcctctggcttgagccgcatgggtgctgtgcctgtgatggtgcctgcccagagtcaagctggctctctggtatgatgaccccaccactcattggctaaaggatttggggtctctccttcctataagggtcacctctagcacagaggcctgagtcatgggaaagagtcacactcctgacccttagtactctgcccccacctctctttactgtgggaaaaccatctcagtaagacctaagtgtccaggagacagaaggagaagaggaagtggatctggaattgggaggagcctccacccacccctgactcctccttatgaagccagctgctgaaattagctactcaccaagagtgaggggcagagacttccagtcactgagtctcccaggcccccttgatctgtaccccacccctatctaacaccacccttggctcccactccagctccctgtattgatataacctgtcaggctggcttggttaggttttactggggcagaggatagggaatctcttattaaaactaacatgaaatatgtgttgttttcatttgcaaatttaaataaagatacataatgtttgtatgagataagaaacaagttgccttttcaaactaagaattcttgaaattgagcttcaggaggatgcaaagtggaccccttcccaagctgtgtacccaggagggcttccccccacaggcttagagcagctcttctagtgtttagaagggtccttgtttgtcacgtggagaaggggaggagactctaagctactctgaacagcagagggatggagttgatacgctttctgctggagcttgagtgctcccggctagggggtacgtgtacctcatctgcttcctcttcagggacaggggagaggaagctcacgtgggctcctctcccacaccacggaatccttaacaaaacactccttgcccatctggaagagatctctgttgttactgagggagagctgggcatagtatgaggtgcaggtctgtgtccaagttctgccatgttctttcctaccaagggtgaggtctcctttaggtctcagtttctctgcccctaaaatggagtggctctggaaatggagagatgctcatttctacagagactcctacctcagtaagtggtgaaatgaaaagcgctgtggacaggaagggtctgcggcctggggctcacactcacagtgaggctccgaggtggggactccccttgccagctctggggtatcaggacgccttccaaagtcagctttccttccgtctctgcagaaggcccaccccaagcccagcgcttttcccaaggccggacagcttcagaccttggggagaagaggaaggaaggaggaagaagggacagagggattgcagaatcggggctggaggagaggagggaggagcacttttttttttttttaacctgcggcgccggcctctcccctgtttgctctgagataccagtctcgctcctgcccagcccgggcggctgcccttgggtgctcccttccctgcccgacacccagaccgaccttgaccgcccacctggcaggagcaggacaggacggccggacgcggccatggccgagctcccggggccctttctctgcggggccctgctaggcttcctgtgcctgagtggtga

SEQ ID NO: 8548 - DNA, 2300 bp, Homo sapien
tatatatgcaactcagactgctggggtggatccaggtttgtaagacctgaaacttacacaatggggaaggcatcttggaggaaaaaaatattaaaaatgtattttaaaagtatcaaatgaggctgggcacgttgcctcatgcctgtgagcactttgggaggctgaggcaggtggattgcttgagtccaagagttcaagaccagcctgggcaatacggtgaaacacagtctctacaaaaaatacaaaaattagcctggcatggtggcgtgtgcttgtagtcccagctactcagggggctgaggtggaaggattacttgagcaggagcggtagaggctgtagtgagcgaagactgcaccattgcattccagcctgggcaacaagagtaagacccctgtctcaaaaaaatccagctgacttccttgaacacagttttcaggggttctgaacattgtttcattctcttctggggtaaatctgtatttggatgtaagcccggtgtcaaaacagatgggtgggagattgtgggaggagatggccccttggctctcaaggtggtatacaggggggcaaggtgacagatgagaatcatttgggaagagaagtggcctgtgacttgacagtattcaaagcagagaatgtgaaaacagaaatatgctaacttttttttttttttttttttttgagacagagtcttactccgtcgcccaggctgaagtgcagtggctggattttggctcactgcaacctccaccttgtggattcaagcaattctcttgcctcagcctcccaagtagctgggattacaggcgggtgccaccatgtccgactaatttttgtgtttttagcagagacgggggtttcaccatattggccaggctgctctcgaactcttggcctcaagtgatgtgcccacctcggcctcccaaagtgctgggattacaggtatgagtcactgagtcaggccagaaatatgctaacttttataagtcgtgtgtgttacttcccctaagcgtttcccagtcctcaacttccattcttcccctcctcctctcctccctcataaccaagtaaaatgcctctcacacttttacagtattttgtgtgctggatttttagggaaagccggcaaaagataattgtttgggaagtctccaatatcagaacaaaaactgaactggtgaagacttctgcttttccctgaaactccttccccggcccccattccctctccacccctcccaccgctaccagctctttgcttacaaccccctctgggcgcaacttgccgctggctgacaggcgttcttccctcacctgatcctccttttctttctgtttgaagaaccacatcacaaagggcacctcccatggctgggatgaagacacctccccgtgcaaggtgtaccacgctggaagcaccacttcccctccctccaccgcctgcaaccggttggcgggcaagtgcagttgcagctgggcccgcgaggggggcgctggagacaagagcgaggcgtgagtgcccaggaccggctcccagctccgcccgcggaccctgccctacgcggcttcaccagagagcgaggaaagtcgctttaactggaaagaggaaccttgcggggtccggcccctggaggcctcaaggggtgcccagggaccactggctcagtgtcctgcttcccatttcatcacgacttctctccaccgccagcctctgcagttgtagcggggatggggacacatttatatgcatttattcgtatccagaggcgcagatttctgagcatcaaagagagggggcagatttccagcgaggaggggaagatatgagaagaaagggtggaccgactgtttctgtcgtacgcgccacgtagcccacttgcttccctagttttcctgagggagagtagggatgctgctccgggccgccagggtccctcactcccgagttctcaaagggcggaggggtttgggaggccgtctggttacctattaaccctgcggctccttctgagcttgccaggagctggagagagcagagcagcccagcgcccaagcctgacccagtgaatgcgatgctccccgccctcccgcgcaatctcagaggcgggcttccctcggaaaacggagggttgaaacccagaaagctcctcggagcccttctggggttcgggcgatctgggcagagaactctcgggtggcaaggaattaagggcagcgcgaacgacggtctctagacaagtatgaagcctcccctgagtgtgtccggcgctcagggggtggaccggggtgttggtttcaa

SEQ ID NO: 8549 - DNA, 2300 bp, Homo sapien
ccttagaggccttcagcctggctctcctagggcgagggtggagagcggggcctggctgcggcctcttcccgcggcgttggccgcctgctcgccacgcggaggtggcgtcttccgctccgaggcagagggccgaggcctggagggagtagggcccgggactggagcggcgatcatcctcaggcctggccgtgtgcaagcccaaggttattccccaaagggcttaccagttggctgctctgttgcctccccgaagggcaaaggatgagtatttctggacgccgtggtgcaaacgatggccccctccttgaaaccaacaccccggtccaccccctgagcgccggacacactcaggggaggcttcatacttgtctagagaccgtcgttcgcgctgcccttaattccttgccacccgagagttctctgcccagatcgcccgaaccccagaagggctccgaggagctttctgggtttcaaccctccgttttccgagggaagcccgcctctgagattgcgcgggagggcggggagcatcgcattcactgggtcaggcttgggcgctgggctgctctgctctctccagctcctggcaagctcagaaggagccgcagggttaataggtaaccagacggcctcccaaacccctccgccctttgagaactcgggagtgagggaccctggcggcccggagcagcatccctactctccctcaggaaaactagggaagcaagtgggctacgtggcgcgtacgacagaaacagtcggtccaccctttcttctcatatcttcccctcctcgctggaaatctgccccctctctttgatgctcagaaatctgcgcctctggatacgaataaatgcatataaatgtgtccccatccccgctacaactgcagaggctggcggtggagagaagtcgtgatgaaatgggaagcaggacactgagccagtggtccctgggcaccccttgaggcctccaggggccggaccccgcaaggttcctctttccagttaaagcgactttcctcgctctctggtgaagccgcgtagggcagggtccgcgggcggagctgggagccggtcctgggcactcacgcctcgctcttgtctccagcgcccccctcgcgggcccagctgcaactgcacttgcccgccaaccggttgcaggcggtggagggaggggaagtggtgcttccagcgtggtacaccttgcacggggaggtgtcttcatcccagccatgggaggtgccctttgtgatgtggttcttcaaacagaaagaaaaggaggatcaggtgagggaagaacgcctgtcagccagcggcaagttgcgcccagagggggttgtaagcaaagagctggtagcggtgggaggggtggagagggaatgggggccggggaaggagtttcagggaaaagcagaagtcttcaccagttcagtttttgttctgatattggagacttcccaaacaattatcttttgccggctttccctaaaaatccagcacacaaaatactgtaaaagtgtgagaggcattttacttggttatgagggaggagaggaggaggggaagaatggaagttgaggactgggaaacgcttaggggaagtaacacacacgacttataaaagttagcatatttctggcctgactcagtgactcatacctgtaatcccagcactttgggaggccgaggtgggcacatcacttgaggccaagagttcgagagcagcctggccaatatggtgaaacccccgtctctgctaaaaacacaaaaattagtcggacatggtggcacccgcctgtaatcccagctacttgggaggctgaggcaagagaattgcttgaatccacaaggtggaggttgcagtgagccaaaatccagccactgcacttcagcctgggcgacggagtaagactctgtctcaaaaaaaaaaaaaaaaaaaaaagttagcatatttctgttttcacattctctgctttgaatactgtcaagtcacaggccacttctcttcccaaatgattctcatctgtcaccttgcccccctgtataccaccttgagagccaaggggccatctcctcccacaatctcccacccatctgttttgacaccgggcttacatccaaatacagatttaccccagaagagaatgaaacaatgttcagaacccctgaaaactgtgttcaaggaagtcagctggatttttttgagacaggggtcttactcttgttgcccaggctggaatgcaatggtgcagtcttcgctcactacagcctctaccgctcctgctcaagtaatccttc

SEQ ID NO: 8550 - DNA, 2300 bp, Homo sapien
gaaaactttcacaaagtaatggagctgctctgctaacttctacgacttgactgccctcagggtcagaagaaagaaatagctgaaataggagacaggagacagtgaggacaattctttacggtcaaagaatcttgaagagactgcccctgtgtcacatggagacattcactgactacaaatcattggttgcagctttacttcccatgtcacaagtcatttgggatctgaattctgaaggaaaagttagctacagggaatgaatgttgaggctacaccttatgtagcacttgatcaggataagcacagcctgtgtgattagatacttggtgtttctgggttagaaccaaaagactttgtacttcctctcttggaaggagttacttatttggggtgacttgtctggaaacaaaggaggggtgtttacaagagatggtttgcaatgcagactaaagccaagaaaaatttgagtgtgatggaataggaaaaccaaaccaacagcccccaaccccaccacacaatctgcttggccaagtccaagtttgtagctccctacacaagagtgtgagactggcaggtatctcttcctgttgtctgtgcctccactgagctgccaagtactagattctagggtttgcatgagcagttttgtgtttgcataggcatttctcaaagccactgcatggcaggtatttgaagaggagccaggcaggtcacactagaaagaagcagctgagagggcatatggggcactgtatagaaaaagatcttgtgtgaagtgtgggcccagggactacactctgttaaaacagcaaaactatgtgcagtaaatggaatcccgcaggcctggctgcttttcttcccagacagctctgcccgcagagcgggcagcgtcaggaattcgttgttatgctttcttccctcactgacctttgctgggtggttgagctgtgctgggatgtttgaagcattttttttttttttttttttttttttttttggctgttggacagaaaagcaagaacaggtgcgtgcctttctgtaagggagcggcggccgccagagggcgcagaggtgccttttgaccgaatggcgcgggaaggggggcgtaaaattcaattcacagcgaccaagatctagtctcgggaattaaaggatcagagcgcgcctgagcctttcgctgcggggatgggaggcactgaagatttgggggataaagaagaaacggagggactgtcctgtcttccttcccgcagccgcccctcctccccagtcagcatcaggcccgtacgccgctcatttcaggggctaagctgggagcagcacgcacgttgcctcagtttcctgctcagctcccgggactaccttgtgccaaccttccctgctcggagtatgaggcacaggccggggtaatcctccagcctgggctggggtctgctgaactcgcggagcgctttttcctgcccgcgggtgaagattccccgctggcgcgtcccggggcgccctgggctcccgcgcgacctctgccgtcgccctcgctgccgcgctccggtggccgcgcagcccccgcctccaggaaagccacagattcccgctgtgccagggagcccgcgcggccggcgctccggcctctccctgcagctggaaaacgctgctcccctcttcctccttcaggaagaccgccctgattgggccggggatgcggcacccccaagtttggagccagagcccaggagcgtttacatgtcaggtgttacgggtggttctgacttcggatagtccccaaatttcccacccttcctggtcacccttcctatcccaccccggcggaagggaaggttacggctcaggatagttctggagcctcctcttccccctctactcgtacctggctggctcgtggggcatcagagcttacctcacccctccctgcgtccagacctggaggaggccgcagggtcccgccgtccgcgcgctgggggcgcccccgggcggcggaccccgcgcgccccgcccgggaggacggcgacctctccgccccctcgaatgccccgccccgctgtcgccgtcggtccccaccccgccaccggcacacaggcgcgcagacttgggctggagccgccctgggtgtcagcggctcggctcccgcgcacgctccggccgtcgcgcagcctcggcacctgcaggtccgtgcgtcccgcggctggcgcccctgactccgtcccggccagggagggccatgatttccctcccggggcccctggtgaccaacttgctgcggtttttgttcctggggctgagtg

SEQ ID NO: 8551 - DNA, 2300 bp, Homo sapien
tgttatttgagtctggggttatggagttgggtactagttcagggaggatataaataaaatgagaatgttttgagtgtagcacctgttctccccaggcagcatctatagtcagaggcctgaggaaatcctcttgagtttgctcttctttggaacttagaattctgatcctaatggctgaggcagtcttgaccatcttttagccataatcccatagtattcattgctaaatgctgtaggaagaaggattattaccaggaattcttcatggcatctctaaaacgttgccactgacgagtcccaaaactaacattatgctccatgcattttttttctgcatcttcccattgttattagttgctcagctggagcagaacatttggggaacatttcgtgaggatgttttagacctaccaaacattaccgagaatgggacattgctagacccactatgagcagcatggagaagatagcaaaggctggatccaatagatgttttcatcatttgccttgggatgggtgggggtagaggacaaagatgagcattgggaaatggaggtttaccaagaaagtagcttgctgatactggatctccagtctctttggccagaacagtctagaaaagaagatagcaggatgtcagataactatgagcactgccgaaaataagaaatggaatatttagaccttaatgaagccttataactgattcaagggggacagagaaagtatattcaaatgtaaaggtaaatattaggaattactttcggaatctaacatgagatgtgattggaagaaacactaatgacctgcaagtctctaacatatgaaactatgaactagctcttgcacacgtttatgtaagcagttcccaggtcgcacatagatcatctgtgtcagcattcatgatttacaccagggtggagagcagtccaccctaaaatgcatcttggtgaaaactttcacaaagtaatggagctgctctgctaacttctacgacttgactgccctcagggtcagaagaaagaaatagctgaaataggagacaggagacagtgaggacaattctttacggtcaaagaatcttgaagagactgcccctgtgtcacatggagacattcactgactacaaatcattggttgcagctttacttcccatgtcacaagtcatttgggatctgaattctgaaggaaaagttagctacagggaatgaatgttgaggctacaccttatgtagcacttgatcaggataagcacagcctgtgtgattagatacttggtgtttctgggttagaaccaaaagactttgtacttcctctcttggaaggagttacttatttggggtgacttgtctggaaacaaaggaggggtgtttacaagagatggtttgcaatgcagactaaagccaagaaaaatttgagtgtgatggaataggaaaaccaaaccaacagcccccaaccccaccacacaatctgcttggccaagtccaagtttgtagctccctacacaagagtgtgagactggcaggtatctcttcctgttgtctgtgcctccactgagctgccaagtactagattctagggtttgcatgagcagttttgtgtttgcataggcatttctcaaagccactgcatggcaggtatttgaagaggagccaggcaggtcacactagaaagaagcagctgagagggcatatggggcactgtatagaaaaagatcttgtgtgaagtgtgggcccagggactacactctgttaaaacagcaaaactatgtgcagtaaatggaatcccgcaggcctggctgcttttcttcccagacagctctgcccgcagagcgggcagcgtcaggaattcgttgttatgctttcttccctcactgacctttgctgggtggttgagctgtgctgggatgtttgaagcattttttttttttttttttttttttttttttggctgttggacagaaaagcaagaacaggtgcgtgcctttctgtaagggagcggcggccgccagagggcgcagaggtgccttttgaccgaatggcgcgggaaggggggcgtaaaattcaattcacagcgaccaagatctagtctcgggaattaaaggatcagagcgcgcctgagcctttcgctgcggggatgggaggcactgaagatttgggggataaagaagaaacggagggactgtcctgtcttccttcccgcagccgcccctcctccccagtcagcatcaggcccgtacgccgctcatttcaggggctaagctgggagcagcacgcacgttgcctcagtttcctgctcag

SEQ ID NO: 8552 - DNA, 2300 bp, Homo sapien
aaggtctccatagttcctttttatccatctctaaactccctcaagtttaactcaatcccagtgcttcttacagtaccagtcaagccgaagtttcagttcttactctttttttttcttagttgatgtgatttaaatagcctctccttggatctgtggtctttactgaacccagaagttacctcttaagtgcatttatatcttgagagagttaaaatcagttgggaaatcttttttaacatgatttcaatacatcaaattcctatcatggatttaaaagttaccaaacatctttccttcaggcccctgatagatattttacatactagcatagtgcagtattcaagtgtattacaaaagtacactacaaagtaagaagtagcaagatctgttagtgtcttttgataaattgtaaaatgtgtcacctgacttttcttccatatctgtaaccattagatactgctagtttccttattcacaattacataagccaagtgaagtattaagctcaatttggtggttccaaagagagtaagagtctttgctgtggtttcctaccatgtctatcgccagagattggtggctttgcttatgcttgtgtcacttcctgatatgtgtggcacctttcttgaaaggaatgttagttttattccctgacttccgaaataaccgtcagcaacagagccaactgggcccttgtgtgtgctgaatgcttttctccagggagtcagtaagtagtgagcagtggcatggtttccttctccatttatggccttggaagggtgaaagggacatggttgggactctccatttacggtccttggaggagttgaaaagagtggttggggtgttcttggaggcagaaactagacattgtgagataaaaataaattggcaagggatgtttggaattcaaattccaatccctgcaaggagggcagagggcgctgggaaagggggagtgtgtagaaagtcaaatgagctctgccgcaggcatttgtctccttccattggaaggtttgcccatgacacacatttgccaagttcatatttctggtttgttctagaaagttttgtcttatgtaattgtgactatcttttacaaagaggaagaagaaacacttttaaaaagagtgtatcgttggaaacctcagttctctaaggcatcatttgaggctccagaagagatctcaagaaagggagaatgaggcagatgcttgtgcagggggtaggccggctggctttagggtgggagactcttaattgttgctctgtttttgtgtgaggaagatcatcacacatgtcgtgcttttattattccttttacccatctagatttctggcttcaagggacaaatttttaaagtatctgatagagtgtcttgtagattgtcaactgtgatttaaagatactgaacttcctggctgggtgtggtggctcacgcctgtaatcccagcactttgggaggccaaggcgggcggatcacctgaggtcgggagttcaagaccagcctgaccaacgtggagaaaccccgtctctactaaaattacaaaattagccgggcagggtggcgcatgcctgtaatcccagctacttgggaggctgaggcaggagaatcacttgaacccagaaggcgaggttgcagtgagccgagatggcgccattgcactccaggctgggcaacaagagcgaagtgctgtctcaaaaaatatataaataaagagactgaacttccttggaggctttgtagatattattaagagttgttttagtttggtgaaaatagttaacatattggcttatggagagcaatctcacgtttaggataaatttagtctggcagtgcctacaaattaagtctgaggtgaactacttttgaacagttgagttagaaagtatttggtagccaccagggaaaagagatcttatttcaagaaaataattagtgaaactcagtaaagtagaagggagattagaaggaacaaagggaggcagagatgggatagagactggttgcaacttaactaaatttggaagctgggattaagcccttgatttatcttttgaaatgccatataagatagcataagatgtaccattaaattcaggaaactgggctaataatcagaaatatgtgttagaaataaagaccatggtaaaaatggaagggttgtacaagagaataaaattattcaggttttgtctgtggatttgcataatgatatttatttgctgtgtgccacatggcagaaaaggaagtgaaataacacccctctgtcccgtccttttccccagaaagaaa

SEQ ID NO: 8553 - DNA, 2300 bp, Homo sapien
tgacagagtgagaccctgtctcaaaataaataaataataaataaaagataaaagagtcttctgcccagagaacaaaatgattaattttctggggacattgcttagatttattcatcagtaattgtcatcatctttggaacaaattttgtactctaacaggaaaatcaccatatagtatatttggtctttcattttagctctgaagccttgcaattatttataagaaccaacagggcaaagataactaacttggagcaaaaagctctcattgtccctgataagcattttaatagactctgcccatctctgaggacttctctttggcgtttgcagacaagacatttcttctatcttctcattgaaagatttctaagaaatatgataagctactcaaataggtttagatttatttcctgttattttttatatatttagtctctgttgttaccatcccaatgttacctgaaatcttgtgccttccagtttgcttatctgcttatgaatttgacagatgcttgatgtgtatcctctaagaatagaccatctttgactaccaatcatacacttatatttaagatttcagttttagaaggaaaggagctaagaagcacatgttaaaactgaatgagtagaattctgggtttattttctggcattttggaaatacagtgaagggtggagttaaatattctggttacttcattaagaggacatgttaaaggaaaaaataatttagaaagcatgtagtacaaatagtactgttccataaaattttgtgatgatggaaatattctctatctacctcagttcagtatgatagccactggtcacatgtgtctgttcagcccttaaaatgtgtggcattgtgcctgagaaacagaaattttaaattatatttaattaattcagttttaagttataaataggcatatgtgagtagtggctaccatattgaacagtttcaggtaaaaagttgttattcacagtattaaattcatctttgtaaaaggattctcctggccacacactcaaacctctagggggagctcaaagttccttcttgacctttctgtcactttacccctgtgtaggaggaatcttgataaaagtaaaaaaaaaaaatggcctgccattccaggaggtggtgccaggaataaaagtcttataacttcaactcactggggcaaacagtgcatattctaggttccctaggacagccctgtccaatagaatttattgtgatgatggaagtgttctgaatttgcactgtccagtacggcattactagccacaggtggctcttgaggacctgaaatgtggctagcgtgactgcaaaattgaatttttaattttatctaatttacatttaaatagtcacctgtggctagtgactgttttgttggccagaacagcttttgaataatgggtgttcagactttttgcttgtgtactcccaaaaggctttgaaacccatgtatcctctggaagatttttaagctgacattaaaatttttcatgatgtgtttggaaatttatacgaggttagcaggacatagaaaatgttaagtctggtatgagatgaatatgatgagagttggcgataaaatgtactgaataacaaactgaatctgaaaaatacacattaaatcattatttgtgagttttatcaactgtctcttgaaatttttgctgtttaggaaatattcaagttacatttaaaagaaacagtatcactggcctatattgtttttgttattctaaattcaggggccaggattgataacttaaacaatataaataagagggggaatgacaggaatccctaaggtttcaagttgcctccatcaattattaaaggagactaccccagttaaagactgctgctttagaactcagtatctttttgatatctttcttggctgatgtagtggtgctgggctcctgaattcccttgccattagaaagccagagggaaacagggaaaggttacaggggaaaagtgtggagcttaacttttggctaaagttcaggtatctggagggggggaggggatttagatattttgctcattccctgtcatcagattcaactgacagattcatcacaagatttctttaaatgctaaggtctgaaataaggtctttatttttttcattattcatcaacagatagtgcctactgcagtaggtctgagagttacggtagtataccatcaccttcaagatgtccatcttgtaataaaggagtcagattactaaggaaccaattacaatattgtgaacaaggtcttgtgtgtcatg

SEQ ID NO: 8554 - DNA, 2300 bp, Homo sapien
agagggagatcctctctctaaatataaataaataaaaattaaaatttaaccttaatgacgttgaatagaacaaatgagattcagagaagagtagctttgtcctattagctactactttaatgtctttgttaaaaaaagagaaagcttaagaagtcccaaagataaatgttatcaaatacactaatttaaatttgtaatggagtaattaatgggtggcaaattccttgaacaatagtaggttttaaatatcttagtttgtggacccagttttctaagcaacaacatccccaaagaaatactactggagccaagacctggagaactttggtgcaatttccctcctttagcttactctaactcatgattgcgcctattagactttattattgctctttagtgtgatcattcttattttataattgttcttggtggtttttatcccccctcaagaagttcccagaaaaagtgccagctgtatcagaaaagaagtgcacagataataggataagtagttcagtaaaaactgggagaatcctatcacaatctttttagcagccactacgatgaggaaatgagcttaactaaaatacaactccttatctgccaataatacaaatatgaaagcctagagtcagttctagtagcaaaatcttaacctggctaagatttctagcccaaattaagcctctgcatttaaacatgcaggtacacaaggacggccagatgcacactgagagttctacttgtcaccacatccggcacagaaactgaagcagggaaaaactggctttcctgaaggagcttcctaagaaaccgcagggcctcaagccaatctaactctggaggcatcgacaatccaaattccagaccaactcttggccaagctaacttttatggtgtacactaactccgcggtaacaatacacaatctggctacaatcaagcctttccaattctccaaagcatctctagtcttactcgtccttcgtagctcaagatagaagcaaagcgactgacacaaaggccagtcgtcccaaggcgctttttctatggctccgctacggccacttattaactattcctaaactaggggctcaatgccccccccttctgcccttcctcaatcctgccccggccggtaagcctctgcctgggagcccctccgcctggaacaaagcgaggggccccggcggtgggggcaagaggcgccagcggcacggggactgccgcacggcgcacaatgagaaactaccaacttcagagcgcaggaacatctcaattggcaagaaagaggggcggcggcaggcacgcccaacttcaaactcaggaaacctacgggctggcggccatctgggaaaaagcccccttcccagggagagaagaaaaaggcggaggagatgcgaatcgcccaccgggccccggaggagagccctgccctcagaccggcccccgcccccgaggcccgcttccccgccttctctctgcctctggttcgctgccccaggccgggcggccggttaccttgatgcgctcccggcactgggacggggtccgctcgtagcccagctcggccagggcccgggacacgcgctcgtacatggctggcccgggggccttgctgccgaacaccgtgccggctccctccagctgctggtaccgcgcctccaccagccgctcgttgccccacactgcgatgagcgcgttcgtctcggctggcgtccacgacatgccccggcaggcggcggcggcggctgccgcagccccgccaccgccgccaccaggggagaaggagaccgaggacgaggcggcgctgcggccccccagccccagcccgagacccccggacgccgctgcccccgagcccgccgcactgcccggcccgagcggggaggcaccccgaggcgtggaagggtcggacagcgatggatttccgtcgctcaggccaccaggagaagccggggaaagcacctccatcttcggaatttttagcggcgagttggcgggcagctccgagccacagggcgcagccatcttccaagcggccgccgctgcaccgcccggaagtgacgcgcccgcgcatccggccaccgcggtctccggggctgccctcgggcctggctcgcccgcgggcggatggctccgggtctctgctgctgaggatgtggctgccgggcggaggtcgtccactcccctgggcctttctccgcgagccctcccacgccgcccgctcctctcccggggcgaagggcggggacgaggcgcgccgaagccccgagctgaagagaagggtgggggcatga

SEQ ID NO: 8555 - DNA, 2300 bp, Homo sapien
ctacttggaaggctgaggtgggaggatcgcttgagcctgggaccagaggttgcagtgagctgagatcacaccactgcactccagcctcagtgacagagtgagaccctgtctcccacacacacacacacacacacacacacacacacacacccctctttggaatctctgatttagtatatgatttaggcacaactctccctttcatacacaccaaataccttatgacattaaaacatttatcactgggctgaatgagagttaattttgttttgatagatgtttcagattcttttacagtcctcacacaatgtttactgtgaaccaggcaccgttctaaggactttacctgtattaattctctcaacaatgctgtgacgtcatcctcattttacagatgaagaaaacaaggcactgagagcttggttaagtaactttgctgaggtcgcagaactggaatttgaagcctggcagtctgactttagagtccatattcttaactgaggtgctagactgcatctttctttggaaaaaagggaagaggatatcataaattcgggaacttcctcaggcttcttctgttagcttacaaactatggttagcattttcatatgacatacgagaacaattatctcctcctctactttatccctattgcttaatcctttggcttttcagtaacacccaaagacaaccagtcattctctccagtgagtctcagagttaaaaatttagctgtcttcaataagaatgatacattggactttggggactcgggagctcaggggtaaggggaaggctaatgagggacaaaagactacacattggatacagtgtacattgctcggacgcaccaaaatctcagaaatcaccactaaaaaccttattcatgtaaccaaacgccacctgttacccccaaaaatcgattgaaataaaacaataatttaaaaaagcacataccccccaaaacatagttgacctcagcttaaaaaaaactaacatacatttgttattttaaaaaatattgcatagtttatttgcattcattggtcagcatcctcagttatgtctgctttgaaagaaaaatccgctgaggttttaagttaatgatccaagatatccaattaagattttcagctttgaaaaatatggaaatacggtacagctgtgtactggatgtgctgtgctactgttaagttccagcactttaaggaacgtttcaggagtgactaatacactaattcattaccagaggtcacagagctgtcataattgacagtgttctttgagtacgaaaaaccggaaaacgatgcaacttccaaagcacggaggatggagactggtattggaaagtaacttttctgctgggctcaggagtttttatatgctcaagctatagacaactgtaccaacgcaatagactaatgtaatctaactattctacaaacggccacacctacccagactaactggaaaacaatagtttataactggaattaaatagttgctgttctttaattaatgagatcggtgttcttgaaaagctacagcgtacgaactctaccctggtccatatctgctttttaaagccttccccagaaccgctctcacttcagccttggtgccttcccggatataccctccagaggcttccccggtccccatcctggacgtcagcctctgcacctagaggccggcttagagggaagacgggcagaggcgggggagacaggagagagagaaacggtctattcctccttaactccgggccccctcgagggcctcacccctcctcccgggggctgagattggagaggaagtgggaaggctccaatctgttcctcactccagcgccctcatgcccccacccttctcttcagctcggggcttcggcgcgcctcgtccccgcccttcgccccgggagaggagcgggcggcgtgggagggctcgcggagaaaggcccaggggagtggacgacctccgcccggcagccacatcctcagcagcagagacccggagccatccgcccgcgggcgagccaggcccgagggcagccccggagaccgcggtggccggatgcgcgggcgcgtcacttccgggcggtgcagcggcggccgcttggaagatggctgcgccctgtggctcggagctgcccgccaactcgccgctaaaaattccgaagatggaggtgctttccccggcttctcctggtggcctgagcgacggaaatccatcgctgtccgacccttccacgcctcggggtgcctccccgctcgggccgggcagtgcggcgggctcgggg

SEQ ID NO: 8556 - DNA, 2300 bp, Homo sapien
aaatacgccctgatccccacataaagggccaattaactgcgccgtctccgggaacaaatccgctaacagggtgacaagcccctagacgctggcaggccctgtgtttgcggagaggccagccgggagcaaatcagggcattaggaccgggcaggagccgcatggtgggagggtttctggccccctccgccccagagtagggcctggtaccaggacgtggggtttctatcccgattcagcctctgctgtgatggaacccaggtgaccgcggtcagcagggggcggagcaaagggccccggagcctcgaatctcacaggtcagagtagatcaagcactccaattcctccttaacagatgggaaaactgagatccaaagcggtgacgtcttgtacttggcaaacgtagaattagaacccacttctgtgttggtcattcctgaaggatagatttcgggtgggaaatacatcccttactttctctcttatctgaataccaccctggagcgaggaagggaggggcgtcaaatctcttattatcttcttgcttttgaaaggatgtgtctctagcccgtctcccacctaccccagtcctcagcctcagggtctgctcggatttatgtcttccctgggggctccagggccctagtcaggcacctgcagatgaggtgctgaaaaggacagctcccagggcgctgcgtggcggtggggtggggggtccatccggccccacccccactcccacctaccccctcccccacacctagtgcttccagcctttctacgtcccgcccagaactgctagggttggaaggcacctaaacacccatagttggaggctcacagccaggcgcctggactgaggaaggaggcttggaacaagccccccaccccttgacaatgtctcgggttcccttgaacaagctctgcctgaaatatttcaattcttgattctgcttactccagagtctgcgactgtatagcacccacccctctgatctcgacccctttggggtcagaagcagtcgccccatgaaagttgtctcatcccagaacctgacggctgagccagaactctggcactgactcttcaatcagcagggccttacctcaggttaggaatgccccggcctctctctttccctgataccccaaagccatctcctgtctaggaaagtgagtttgtcgaggtgggtcttcaggtagaaagaactccagaaaagtcagaagcagaccgcgactggaagtgggaggtgggagtaggggcccatggttttcttttcgccccccccaggaaggacgactgctatccgatttgaacagatttgcactaattttgcagcaatcccacatgcctttacaaaaataatattatctttgtttttgtcctagaatccttggttccatttcagtctcctcaaaaacgtaaaacaatttaataaaaaatgtcaaagcagggtaatgtaaaaggattcaaataaatgacagttgcctgggtttccctggctttcagtctcctacaggaactcctagattagggcgtttggagcaggactcccgggtcagggcgcgccgctccatcctctggcctcctggctgcagaccaaaggaccagagggcagagaggtggacctgtcttggaattctctgcctactcccaactcttgctgcaaaccaccccagtctcctgcccttccgtcgccaaacccctagacttgggagggaatggaaaccagaactttggcagcaaggagcattgcttgcgctttgcctcagtttccaaaaggttcgggaaaagagaggacagattcctgttctaaagttgggcagaagggcagagtccgacagagcctcgtccctcatcttgggtgctttgagacagggaaaatctctcgccgcgtccagaacggaacgctgggcttggggtgcggggcggggactccaactcgcgcgctacgctactcgtgtctcctgctcggatagtgactgtagaggtaagggtgggagggtggagggaggcggattaatcccttaattacgccgtgatcggcgtggcacctgctttccgcctgcccagctcccaggggactccggcactagggggtggagagaaggacgagggaaggaggagggcacgaagaggcaccgaccgtacccaggcgcaccggcaggagagcggcaccgtggctgccgcagcgcgcagaggctgtggaggggcttacggctcccagcccacgggtctcagacccaggggctgggcccccagcccccagtcccgatcccagctgggtcgagccatgctgcg

SEQ ID NO: 8557 - DNA, 2300 bp, Homo sapien
aggcagggagaggggaggagggaagaaggaaagggagagaggtagtcattcattttggcagcttctgacttctgagccttttacccatagataataatatagattattaagactagaagggaccatggaggggccatcttcatcttagagatgaggaactgaggcctttaaaggatgcatgtgtaattatgctagctggacaccgaggcccatgtctggaagctattttcctgaccagtcccctcctgaccatggggtgtgctctggagtactaagtggagcagggcagaggtaggacacgagcacactctcagccctatctccctgtccctggtggcctctgctgaatgggttccttggtcaacagatagcagcccctctaggccagtggaggacccatggagaggccagcagggactggcggaagtggctgtgcgcctgcaggagcccatagtcctgggaccccggaccctgcaggtgtcctggactgtgagtgtggtatggggaggagattcagggtggggatgattatgaggcacatgagggcctccaagagtgagtatgggagagtgggaggtgagtggctggggaaggcggcatgagtgggaggaggggctgggcctggatggcctggagggcctgtatggccccagcctccccttctggtgtgccttgtcctgtctcccacaggtggatggcccagtccagctggtgcaaggtttccgggtgtcttggagggtagcaggccctgagggaggaagctggacaatgttggacctacagtccccaagccagcaaagtactgtgctaagaggactccctccagggacccaaatccagatcaaggtgcaagcccaaggccaggaggggctgggggctgaaagcctctctgtgaccaggagcattcctgaggagggtaaggagggccaccgaacagatggatggacaagagggaagaaggggtgggggtggaggtggaggggggatgaaaatttgcaggaggagagcagggtgagtgggtgggaaggaggaatggctctcagttccctaagatgttagaacagggagggggaatgttggggcaggaggggcagcttgcaatgactatttgtgtccttctcaccatgctccaccctggcccagcccccagtggccccccacagggagtggcggtggccttggggggtgatggcaacagcagtatcactgtgtcctgggaacctccactcccctcccagcaaaatggggtcatcacggaataccaggtagagggattgaggagggactggatgggagggccaggccgggagggagagggaggacctagtggctagaattagggtggaggaaatctattacaggtttggctttagggttggggatgagtttaggggagaagagagaggtttccaagtgttgtttccaggttgaattacatctgtataaggcttctctaccatttggagccttaagtttcccggtgaggctaagaatcccatttctgactctaaatccgggactcggcctccctagatctggtgcctgggcaatgagagccgctttcacctcaatcgatctgcagcaggctgggcacgctccgcaatgctccgaggactggtgcccggtctcctctatcgaaccctggtcgcggcggccaccagcgcaggcgtgggcgtgcccagtgccccagtgctggtgcagctgcgtgagtccacccgagggcagtgctgaggatcttgacgggggcggggcaagccccccactggggtagctgtgcctgccgggtcgggaatgaccctttcccagttccagggtttcgggcccctcctcccctcacttctctgacccccacagcgtccccgccggacctggagcccgggctggaggtgggcgcggggctggcggtgcggctggcgagggtgctgcgggagcccgccttcctcgcgggcagcggcgcagcctgcggggcgctgcttctcgggctctgcgccgccctctactggcgccggaaacagcgcaaagagctcagccactacacgggtgagctcccggcctcggagcggacggatccgggagggagccaggcggcccatggggaggggcaggggcttagccgctggcgagtgaggaccgggtcgggagaaaggggtcgcacctggagttcagcctcttgggtaggggcgggatacgtggggcgactcgaggagctgccaggactagggagggctgcgggccaagacggggcgggatctggatgacgtttgcctctaagacgccacgaggaggccaggctttgcaac

SEQ ID NO: 8558 - DNA, 2300 bp, Homo sapien
gggctgggggctgaaagcctctctgtgaccaggagcattcctgaggagggtaaggagggccaccgaacagatggatggacaagagggaagaaggggtgggggtggaggtggaggggggatgaaaatttgcaggaggagagcagggtgagtgggtgggaaggaggaatggctctcagttccctaagatgttagaacagggagggggaatgttggggcaggaggggcagcttgcaatgactatttgtgtccttctcaccatgctccaccctggcccagcccccagtggccccccacagggagtggcggtggccttggggggtgatggcaacagcagtatcactgtgtcctgggaacctccactcccctcccagcaaaatggggtcatcacggaataccaggtagagggattgaggagggactggatgggagggccaggccgggagggagagggaggacctagtggctagaattagggtggaggaaatctattacaggtttggctttagggttggggatgagtttaggggagaagagagaggtttccaagtgttgtttccaggttgaattacatctgtataaggcttctctaccatttggagccttaagtttcccggtgaggctaagaatcccatttctgactctaaatccgggactcggcctccctagatctggtgcctgggcaatgagagccgctttcacctcaatcgatctgcagcaggctgggcacgctccgcaatgctccgaggactggtgcccggtctcctctatcgaaccctggtcgcggcggccaccagcgcaggcgtgggcgtgcccagtgccccagtgctggtgcagctgcgtgagtccacccgagggcagtgctgaggatcttgacgggggcggggcaagccccccactggggtagctgtgcctgccgggtcgggaatgaccctttcccagttccagggtttcgggcccctcctcccctcacttctctgacccccacagcgtccccgccggacctggagcccgggctggaggtgggcgcggggctggcggtgcggctggcgagggtgctgcgggagcccgccttcctcgcgggcagcggcgcagcctgcggggcgctgcttctcgggctctgcgccgccctctactggcgccggaaacagcgcaaagagctcagccactacacgggtgagctcccggcctcggagcggacggatccgggagggagccaggcggcccatggggaggggcaggggcttagccgctggcgagtgaggaccgggtcgggagaaaggggtcgcacctggagttcagcctcttgggtaggggcgggatacgtggggcgactcgaggagctgccaggactagggagggctgcgggccaagacggggcgggatctggatgacgtttgcctctaagacgccacgaggaggccaggctttgcaaccatctccataaagaaggggcaagttcgaggacggaaagcccactcaaagggcggggggcggggcctggcaagagggggtgtggccaggatcccaggcagtaaattgtgcggcggggtctggatggaaaggcggggcccgctgaaagaaggcgatccgagttctgctacttcctagtaagggacgtctctggagagattctgaggtgtttgaggtcagtggttttcaatcttggttggctacacataggaatcacttgaggggcttgagaaaaataccgacacctgagtcccacccccgagaaattctgatgaaatgggtccagggtgcagcctgagtggtggaactgggaccggggcctaggcgtggacaagtataggggtatttctgacccttctcctcatttcacctcttctttctcccacgggttcctttctggaagcctcttttgcctacacaccggcaggtaagccatctctgccccagtggggttcagaccccccgggacgggcccttctctcactcattcgccccctcattttccccagtgtccttcccgcactcagagggcctctctggagccagttccaggtaattctcttagcccatttcctcaggatgacctccaccgacaggccactcttcttccgccccgctgacgccccaggtggagggagcatggccacctcccaccccaacaccaccgccactgtcctgaaactcccgaatatcgccacctccctttcctttgctggcctcttcaggctctccgtccccaacgctcacctgctctccctcaggccacccatgggccttggccccgccccctactcatggctggcagattcgtggccccacccatctcgaag

SEQ ID NO: 8559 - DNA, 2300 bp, Homo sapien
ctagatattctacctctacctcccaggacctcagcagcaacaagatcatgctatggtcttctccagacccatggagttgattctactgctgtttcttcctcttctaaaactggcaggctctcccagtaccacccactccccttgacctgcttgttcctttttcttattatttggccttagttggggtttcttctccagtgctgatatcctcacaattacagtctcctgtctctcatccatcatagcaggttcttagttctgctcagtttgccagatatatgcactgaatatcctcattcattcattattttattcaaacaaatatttattgcaatttgaccaatgagtttcaacctttcaccttgataacatttttcttgtccagtttattcaattagaattgaaactaaagtccaagtaactccaagcaacataggaggagggcttttgttaccagagtcccttagaggaagtgaaacaggctaggataaaagtggccttttccaggcctggctgttttctttccctttccactcaaaccagccaaccaacttgtgctcatatttctgagcttagtcaagaagccaggcaccagacaagacatagctgatgatagcagagttggtgcaccaaccctgaagttggctccccagattacctgggtcatatgaaagctatagaaaatcaataaaaaccaaacagccaaagtaccaaaggaaactttgacggagggagtctagtcattgatgagttttcatcctaaaggatcagaaggtctggccactagtacataaatggggtcttggtcaatgccaaagcctggctcacttcccttctctgaagctgcccgtagtggcccccagatctctgatatgtgactgactagatagctctaccctgaaggtcctgcctggtccctggtccaccaagaggggaaactctttcctagctgggcttctggtcatgggacactaatctaaaggctgtttcttttctcctttgtctgatgttcttcaggttcctgctcctggaaaaatctctctcctgtattaccctattcctctctggcttaaacttagatcccttttgcattctggtctgaccaagaagcatgctcacaggtcattgcacatagttagggctgtctctttagtttccagcttctctgttgtgaaagttcactcagagccctgtctctccactgcccatgtgggccagatgacagcttccatcttctaggtgactcttctcactgtgtgtttatatccacatttctgatatcacccatgcattcactctttcattcaacaaaaagtatgggcagggcattgcgtccctgggatagaccaataccttttcccactctgaagttcctcttcctattagctgactgtctcctgtcacagccaacattgtgtgtcgatccctgtttttgtcctacccactcagctcaacctgacagtctaccccatctttcaagtgagagacagtcgagtttcccagagcagggctatccagagccatgtgagatatttgcaatgtgagaaatggaaattaatagattctgtccaagaaaagaaggagtatttttcttactgagccaaaattcatgagagtagcaatgtgagggtatagagatcaggaagattggaatgaatacagtcaaggaaaagaaagttgttttttaaagcatctatcaaggccaagaacttgtgcaatctgtttttacttaattgtcaagaccatcattcgaagtggttgtttacacatgaaactgagactcagaaaggtacatggactgccctgaagtcacacagctgagctgggcaggtcttttgaccccaagcctagtgctccttctaccctatcacagctgctggatgaagatgggggtgtggaggggattcagggggttccccctcttttctctgggttcagggtcgtgcaggctgaattgaataaggctgaagatagagccagcagctggggtctgaaaagtccatcctgggccccacaaccaccaaccctttctttgcagagctgcagcatgccaacagttccccactgctccggggcagccactccttggagctccgggcctgtgagttaggaaatagaggttccaagaacctttcccaaagcccaggtgagagggggtccctgaaagggaagtgaaggggtgagatagggtgtagggatgcaggggcttaccagcccagggccctcccacgggctcatcctcctttccctgaggaggctgatgagggttggatggagtagtggacaggtagctaaggggg

SEQ ID NO: 8560 - DNA, 2300 bp, Homo sapien
cttgtgcctcaggtctggagcctgggcaacacatcactgccaccagccaactggactgtagttggtgagcagacccagctggaaatcgccacccatatgccaggctcctactgcgtgcaagtggctgcagtcactggtgctggagctggggagcccagtagacctgtctgcctccttttaggtgagggcagtgcccacagacccaccctacccttcagcctgcatcccgccttcctctctccctgctcccgcctcacacttccagctcttcccccttgcctgccaggccctcaatgcctcgactccctctccctctgagctctgcatcccatacagagcaggccatggagcgagccacccaagaacccagtgagcatggtccctggaccctggagcagctgagggctaccttgaagcggcctgaggtcattgccacctgcggtgttgcactctggctgctgcttctgggcaccgccgtgtgtatccaccgccggcgccgagctagggtgcacctgggcccaggtgagagtctgagggggacccacatgtatacaggcctcctcagcatccagccagaatggtgcaggggctttggatctctgaccaggtgatccagcctctggatttagctttcctcctgccttctcccaggtctgtacagatataccagtgaggatgccatcctaaaacacaggtgagaggtgaaaggggaggtctgaagtaagggagggtggcaagggacagtggagctgcaacagagaagaatggagtactagtctacctgccagggagtttgggactgtcgtacatgaatctctcctgtaactccaactgatagttcatttctctgtcattaatattcctatcacaccacttgacagactagtaaactgaaactcataaaaccttctaaacccccaatccaggactcttgtcaccccacctctcctgctgcctcacccgctaggtggagaataatcagcatgagacgaccacctcaaatgtctcatcttatgcgtgcacccatggtctaccaagtagtgcctttgcactcagtaattctctcactgagccattgtgcctacatcatagtccacccgcagctccagcagagggtgttcagtgcctacatcatagattcttcctcactgttctcaaaaacaggatctgcccatgggcccttctgcttccggtatattcggctgccagaacaagtctgcagttctgggacatcatgctgatagagaacacatccttcttgctcccgttgtctgagttttgtactaagtaaccgcctcatctctctgtctgccttcttggctctttatttcgctagatctcctctgggaggcttcccactccaggtctgcatctatccacagaagttactgagcacctactatgtgccagcaaatccaggcctagagctgccatttcactgtcaggtcctcagcccagagcaggggtccaagctggctggtgttgtgttttgagttttctgagctcactggcttctttcttccagctacctcctggctttgtctgctctgccttaagctttctgtggcttccctaggatctcctgctctgtccttgagggagattccttctgatctttggttcattctttcctttggaatagcctccacctgccagaatctctcagtgtaggcagagacaggcatgaggggatatgagtgcaatcctgtattggccacgcagaagcaggtacaagacacatggagggggtcaatgtggaaaaacataggagaaagaagattccacattaccctgacagtaagaaggggatggagagaagagcaatgaagcagcaagtaatagcctgctatgtccacagggaaagacaaaccatttgttctggctcgggtatagggtgtgagatgggtcagagcaaaggctatagttagggagctggaagccagaccaaggaaggtcctcttagccatgctaggtacctgggctctatcatggtaaatgaggggccattgaaggtcttacgcagagaagctccttgctcagatccctgttcttgaaggatcactcaggcagccagaggccaatatccatggagcaagctcctgctctgccagctgagtgatctcacatttcctcatataaacccagaccatcagtcttgagtgtggaaggccctattgccatcattttacagatgagaaaactggggcttagagaggatgtacttacccaagtgcaacagatgtacttacccaagctaagctgtgacagatagagattgtcaaaccagatttgtcttcagg

SEQ ID NO: 8561 - DNA, 2300 bp, Homo sapien
agtagaaatcggaatgctcaagacctggagactctgggagtttgggttccctggggttcctccctggctgagggatgttccacgcctcagttctgtcactctggcctataagccccagcccagccctatcctccccacagagccccaggactacacggagcctgtggagcttctggctgtgcgaattcagctggaaaatgtgacactgctgaacccggatcctgcagagggccccaagcctagaccggcggtgtggctcagctggaaggtgaggaccaggtgctaagggtaaaagccgatccagagctcaagaaagggcgttcctgagctctctgaccccccgcccttcctcgaaactccttcccaggtcagtggccctgctgcgcctgcccaatcttacacggccttgttcaggacccagactgccccgggaggccagggagctccgtgggcagaggagctgctggccggctggcagagcgcagagcttggaggcctccactggggccaagactacgagttcaaagtgagaccatcctctggccgggctcgaggccctgacagcaacgtgctgctcctgaggctgccggaaaaaggtcagggcctgatcccttcagaagccaacaatatcccctctggctccttcttatttgggggcccctggactgttctgcttcagtcttgaggggagattatgggtcctaccctgggactcccttctgccctggccaggccagcagagcttcaagaggcttcttgtctcttcagtagggttctgacgctgtgtcccccagcccagctcctttccctagagtcctctccctcagagcccctcatagtctctcttccacccctccagtgcccagtgccccacctcaggaagtgactctaaagcctggcaatggcactgtctttgtgagctgggtcccaccacctgctgaaaaccacaatggcatcatccgtggctaccaggtacccccactagctgtcatagcccttcctactgctgccaggacatctcttttctctggagttctgcatacccttgctctgggcactgagaaaggtacctgggcagagaagcaaaggaaacctgcttttgctgagcaaggacccactggcttccagaccctgccaagcacttgacctccatgatcccgttttacctcacagtccaccctggggtattatccccaatttacagacatggaaagtggggcaaaggccacaggaataagaaacagagtagatcaaaccaggctgtgagtcagggagtggggctcaaagtttgacttctagagcagcaacatcagcctcacccaggaccttgttaggaatacaaaccctcagatcctttcccaggcctcataaatcagaaactcagagatgggcctggcaaactgtactatagcaggcccccctggtgacttggaagcacgctgttgtttgagaattgctatgttacatgtgttttagcagcttgcttgtgcccttctactgttgatctagagagaggtatctctcacttggtagggagaataggaggggaataggaaattgggtgcattccccaagtggatggcagggcagaataaccacacccctggagtctgatctgcagataaagggcttggcttctgggatggtgcctggggaagctgttcacctctgcttgtgcctcaggtctggagcctgggcaacacatcactgccaccagccaactggactgtagttggtgagcagacccagctggaaatcgccacccatatgccaggctcctactgcgtgcaagtggctgcagtcactggtgctggagctggggagcccagtagacctgtctgcctccttttaggtgagggcagtgcccacagacccaccctacccttcagcctgcatcccgccttcctctctccctgctcccgcctcacacttccagctcttcccccttgcctgccaggccctcaatgcctcgactccctctccctctgagctctgcatcccatacagagcaggccatggagcgagccacccaagaacccagtgagcatggtccctggaccctggagcagctgagggctaccttgaagcggcctgaggtcattgccacctgcggtgttgcactctggctgctgcttctgggcaccgccgtgtgtatccaccgccggcgccgagctagggtgcacctgggcccaggtgagagtctgagggggacccacatgtatacaggcctcctcagcatccagccagaatggtgcaggggctttggatctctgaccaggtgatccagcctctggatttag

SEQ ID NO: 8562 - DNA, 2300 bp, Homo sapien
cagtttgtagagaccatggtgtttccttgctccagttctgtctttgtcagtattggtctgagtttgagaggaaagaggaggagtgaaggagacttctacttggcaggctgttagtctgtggctggcaccgaagccaggatgggaagggggaggaagggagggcgtcagctgggttaggggccctgcagagaagctggccaggaacaattgggaacaaaggctggatactcttccgctgagccccagagcctggccttggccttccgggaacagctccaggaaatggctgagattccagatttggaaggaagaggccagtaaacatgagctgggatctgacaggggagtgtggcctctgtctaggttgtgggggaaaggaggcagcgggcaagagctgacattgtaggctcaaaacctgcaaggcctgtctgctacatatatggacacaggctcttgggactggaaagactcttaaaaggtcttttactccaaccacctttccagggcctgaaaaatactcctgccgaggatcctccaatagtttcagtgatgggatgggcctaaaaagaaatacacaatgttggctcagctttacggatcactcataatgagtcaggcactggatgccagtggttttatgctttatgtgtttcatcattactttatccctcaaggtaggaactactattattatttccattttacagagaaggaaactgacttgcccaagttctccacagaagcttatttcatccatctctgagctgaatatggacacaccctgtggtaatctcccagcttgtcccagatgctgagtccttcctgtctcccaccctacgccacctcctggtccatctggcactggggaaatggatgagggtgttacaatccacccctgctccacttcactcagcctccccagcctgcagccccactgccctctgtcttcagcttcttgctgtgtcctgagactcctggggttttcactcttctctagcaggtgtcaaagggataaggattgggatccagggataagatttaaatagaggattaaggctctgatcggagttttggttagtgtaaggataccctgtaagaaatccccgagtagatcatgagataaagcttagcgctgaagttagggtcgggggttatagctaaatggtcgaggtcagagagtttctcgcctctggtctcctcccagttctccaaggcactgagggccaggcaggaagcatcggtttcctcaaagccgcttccctcctggggcagagtctcggtcacaaacaaccaccaccggcccaccccgcccctccttccctcttcactgtgagctcagagcagcaggacaaagtgctcgggacaaggacatagggctgagagtagccatgggctctggaggagacagcctcctggggggcaggggttccctgcctctgctgctcctgctcatcatgggtgagttgctctccctctcctggcccatgctcctccatccaaggcctgctcagggcagaaggggcctgctgactgcctgcttcccttttgcagtggggggaccagagatgaggatgaggatgatgatgatgagtgtgtgtaagtgtatgtgtgtttgtgcatgtgcgcacacaccagagagagaaagaaggaaagagagactgagagagaaagaaagaaagagagaaagtaagagagagagagagagagagagagcgaacatgctatgcaagccctggcctggatgctgtgcatgctggccctctctcctcctagctggcttgttctttgggaggcaacctttagtagttcagattacaggttttctggcaaactcgcacacaagagaagacagatgaggggtgggccaggaatttggggtgttgctggtgatcagactgggctctgctccctttccctcccaggaggcatggctcaggactccccgccccagatcctagtccacccccaggaccagctgttccagggccctggccctgccaggatgagctgccaagcctcaggccagccacctcccaccatccgctggttgctgaatgggcagcccctgagcatggtgcccccagacccacaccacctcctgcctgatgggacccttctgctgctacagccccctgcccggggacatgcccacgatggccaggccctgtccacagacctgggtgtctacacatgtgaggccagcaaccggcttggcacggcagtcagcagaggcgctcggctgtctgtggctggtgaggcctgggaggggagcttcagggtggggcaaacctgggtggaga

SEQ ID NO: 8563 - DNA, 2300 bp, Homo sapien
ggccccacagatccttgaccccataaactcgactccattctgcctgccccacaataaatacacgttagctcagctttacggatcactcataatgcatcaggcactggatgccagtggttttatgctttatgtatttcatcattactttatccctcaaggtaggaactactattactatttccattttacagagaactactattactatttccattttacagatttgcccaaggtctccacagaagctgatttcatccatctctgagctgaatatggacacatcctgtgggaatctcccagcttatcccagacgctctgagtccttcttgtctcccaccctactccacctagtggtccatctgcccctggggaaatggaccagggcgttacaatccacccctgctccacttcactcagcctctccagcctgcagccccactgccctctgtcctcagcttcttgctgtgtcctgagactcccggggttttcattcctctctagcaggtggtaaagggataaggattgggatccagggataagatttaaatagaggattaaggctctgattggagttatggttagtgtaaggatacacccacagaatttggggtaggaattggggccagagaacagaatttgggatttcagaattagaggtgccaagggtagtgacattctgttctctggccccaattcctatccttccagctctgccactccatgactttcactctgcctattctttagcctctgcaaactccccagtttgtagagaccatggtgtttccttgctccagttctgtctttgtcagtattggtctgagtttgagaggaaagaggaggagtgaaggagacttctacttggcaggctgttagtctgtggctggcaccgaagccaggatgggaagggggaggaagggagggcgtcagctgggttaggggccctgcagagaagctggccaggaacaattgggaacaaaggctggatactcttccgctgagccccagagcctggccttggccttccgggaacagctccaggaaatggctgagattccagatttggaaggaagaggccagtaaacatgagctgggatctgacaggggagtgtggcctctgtctaggttgtgggggaaaggaggcagcgggcaagagctgacattgtaggctcaaaacctgcaaggcctgtctgctacatatatggacacaggctcttgggactggaaagactcttaaaaggtcttttactccaaccacctttccagggcctgaaaaatactcctgccgaggatcctccaatagtttcagtgatgggatgggcctaaaaagaaatacacaatgttggctcagctttacggatcactcataatgagtcaggcactggatgccagtggttttatgctttatgtgtttcatcattactttatccctcaaggtaggaactactattattatttccattttacagagaaggaaactgacttgcccaagttctccacagaagcttatttcatccatctctgagctgaatatggacacaccctgtggtaatctcccagcttgtcccagatgctgagtccttcctgtctcccaccctacgccacctcctggtccatctggcactggggaaatggatgagggtgttacaatccacccctgctccacttcactcagcctccccagcctgcagccccactgccctctgtcttcagcttcttgctgtgtcctgagactcctggggttttcactcttctctagcaggtgtcaaagggataaggattgggatccagggataagatttaaatagaggattaaggctctgatcggagttttggttagtgtaaggataccctgtaagaaatccccgagtagatcatgagataaagcttagcgctgaagttagggtcgggggttatagctaaatggtcgaggtcagagagtttctcgcctctggtctcctcccagttctccaaggcactgagggccaggcaggaagcatcggtttcctcaaagccgcttccctcctggggcagagtctcggtcacaaacaaccaccaccggcccaccccgcccctccttccctcttcactgtgagctcagagcagcaggacaaagtgctcgggacaaggacatagggctgagagtagccatgggctctggaggagacagcctcctggggggcaggggttccctgcctctgctgctcctgctcatcatgggtgagttgctctccctctcctggcccatgctcctccatccaaggcctgctcagggcagaaggggcctgctgactgcctgc

SEQ ID NO: 8564 - DNA, 2300 bp, Homo sapien
tggctgaagtaaccttgtggcaacagggggagacagtgtctgtggacctgtgtggtattctcaggtttcccaccagtctctactcagggtctacattttttcctggcctgatgagctacctgaggctcccaccacagcagtaggtggtcccagctgttgcctctggcctcagaatccccgtacatggcagtgcctttgctcaatcttctgtttcctgccagttctttaccctctcggcacttctgagtctcctaaagggcttctggacacctagaagcccttgcaaattctgtgcaggtataaagagccacctctggggcggggaagtggggatattgagaacttagatccttttagtctccctctagcacatttttctttccacagtgcttcaggataacaagggcagacttcgggctttctatttcccaaacactgcatcctccttttactcccatccataagcctcaaggcccagccatcacaggcaaagaggccatttatctacactccagaaggactctgtgatccagtccacaggctgatctatgatatgtcaaggggtagataaaagaaattagaatgctcttttgtcccttacaaagactggctaagcctttcatcttgctatggactttgaaatgctattttaaatgtcagaagctgaatattgactctttttgtgtacctgctataataacattacctcttccagtggaagaaaggtgccttgagttgtctagggaaaagtcataaacacagaaatgcaaaaggaaaaaagaatcccctttatatatttcagaatgttttcagagaggtctgtgaagttcagtgcttcccaactcttctccctctgccgaggctcagaagggctatgtaataatgcttcagttctagaaagttgacctactcaggctttctccagtatgtaaaaagaatatttagagagataattgctgcacttacaaaaccaagaccaggggttagggatgaccaagaaggaagttgtgaagtttggtctcccaaaaatataaagatcccagcatgaatgaaaaaagaaacaaggcaatttttaaaaagtttaaaacatcatctctgtaacaaaggatttgctaggtactcttctgtaccaaatctccatcaacgctcccaacaattcccctcaaggaagctcttcttttccccattttacagatgagaaattgaaggctcaaagaggttgcgagcccatcccaagatcacagttactaggcatccattcccttggccgccctcatgaaaaggtgtgaacacatgaatgggggtcagagtagagctagagtgtttctcctcttcacagcctcaaaacaggagggcacagctaggctgttaagctggtaacagaaccctaggatgctggctgttaggagatgaccttcattttgctcagacatgttctagaaaattgcctgaaagcaggggaatgaacagagtggcttctggaaagaggtgtccagcatctatgtgattctatgatagaagagaaaattccaagccacggaaagacaagtgtaacaataatagaattcaagctgttttccagtcttcttcctttgggatggaacaggggttttccatttcttcagcagttgtctggagtctttcacttcccagctttttaaaatctcttctccctcccttttcagagcttattggaggtctgtcctggcatgtaccctcctcctcagggagaaggagtgttaggtggagacagggtaggttgggacacaaagtccagttaagtgtgtgtcccagctcagtgctctgagcccagatcctcatctccctgggtagtgaggctcagcacagacaagcaaccaactgctgggctgccggtgccccccatgttggaacctgagttggagattatctcctaagcagatacctgcttccaaactggggatgtagggcttggaaactagaaaatgccaggtctgagggagaggaaagaacaagtccagcaatacacagagctctgtgtattcagagggaagttggcagggttgtgttcgggcagagaaactccgagtggtacaaaggggacgtgcccagagtggagaaatcatgctaattgtctgcactagagctggagaacgccacccaaaatgaagagagaaaggggagccctgtccagagcctccagggccctgcgccttgctccttttgtctaccttcttctgatccagacaggtaggaggccagagggtaagaaagggtctgaagaaaggacccggggcttttacagcagacggaggggagag

SEQ ID NO: 8565 - DNA, 2300 bp, Homo sapien
ctgtagatccctaaattctcccatatctctcccgcatcattagttttctcctgtctattggttaatttccatcaataacaaatatatgctatgatcttaaagaactctccaatgatcctacctctacgttcagccacctctttcgctgtgtcccttcacaacaaaattcatggaaagaattgtctaaaattgctgtctccaattccttctcctactctttcttgcctagcccatcaggcttttgctctccaactactctaaagacactgctcttttaaaagttatcaatcacttccacatggtcaaatccaatagtcaattttcagtccttaccttatttgatctgtcagtaggatttaacacagattgtctgccctcaatggaacatttctttttcacctggctttcaaggtatcacaccctcatagttttcttccttggtttactgattaatccttctcaatctcttagcattctcctcctctttttctcagcctctgtaatactgacataccctggggctgttttaggatttattcttttatctgtctatattcaaccccttgatgactccatccagtctcatggctttaaatctacaggctaacgactcttagatttatatttgtagcccagaacccttctctgagctccagacactttttctcatactatcttctcggatgttgattagataaaactttatctgccccaaactgaactcctgatcttcccctttccaaatctactccttccaccatcttcactatctcagtaaatagtaatttcatcctgacagctgctcaggatgaaacccctagttttccttgacatctctccctcacacaatccatatccaaaccttcaacagatcctgaaagttttgcctcccaaatagatacagaatccaaccacttatcatcatctccaccactacctccttgatccaagacatcacaatcccttaactgaattattgcaatagccacctaattggtcttctttacagtctattctcactacagcattcggaattattatttttttaattttgtcacattatggtgttcctttgctccaaaccttgctccagtggctccccatctcaacacctatggtggcttacgatgtttgatcggattgcctgcttgacctactgtctcagcattcttccactctccctctgctccagtcacactatcctcctgactttttctcaaccaggcaatgcttccaccttggggcgtttatacttgctgttatatctggaacatgtttataaagcctccgttgaagagcacagtggcttcttccattaactcatttaagtctttgctgaaaagtatctcagtgcagcttctctggacgttctaatatttcatccctccaatccccaccctgcccaccacactccctatccgctttctttgcttttactccacatcacacacatttacttactcattgtttattcgcttatttcccctcactctattgtgaattccctgagcagggatatttgtttcgttcatagctatgtatctccggtgcttggaacagtactggtttataaaaagttagtagtaatgtatgttaatcgaatgaataaattatcctacagagataattgagtgtctctggattacagcagagcttgcagcagagagggagaccactcaacaggccgtgatgtccaaatataataagatgtatgaaacagtactgtaaaattagctgcacaaaggatccgaaaaatttgttagcttagtttgtttctccaggaagccgtgccaggctcgcctccctctttcattcttttcccgtgattccctctactgggactcctgaccctcctagtcgccagatcacaggcccaacgcatccctttccggagggatttaggaagtctcggcgttggtccaggaacgacagtcccaccgcgcctcacatggcgcattacccagcgactccgcttacccacacgtccccgccccctcagccggacaggaagaggaaatgacgatacctcgggcgctcgaaactccacctctcacgccttcccagctccgggaggggacgcgggctccggaaagggcgggcataaggctacggatgggcgggacggagcagcccaccgcaaagtggcggtctacttgaggcggttaccttagtactccgagtagactgagtctgtggcgagctgcgggccgattcctggccagtgccatctcagccggagcaggcctcggggcctcagaagcaggcttttatctggcccgaggctcccagccgttcagcgc

SEQ ID NO: 8566 - DNA, 2300 bp, Homo sapien
taaaatggcttctttctcacaagtgtctcatactgaaccataggaagcatttttgacagagtataaggctatccatataagaactgaggatcttttcctttagcatttgattgagtagctccttccctccctctttatttccttcagatcctctccacattctgcagggtttgaggaggtagtgtgtgggaggggggccagataataacaagaaggtgagtcgagagtggtgaggttgtgtaggtgagtgaagggactccctgaggcacaatatccctctttgtcactcccccaagcagcaggaagcacagagatcatccagctcaccaacaggagcgagcaagaaagagttccaacattggtgggagtgttcccactgccaccctggcccctgaacagggatacgtggctggaattcacaggaagtaactgtgacaaggcaaagtctgtttcagtaccggccctgctcccagctacttggtgcactgtgaacaatagccgtactaccatgagggcatattcctaatgcctttcttagagtcccagcctcagataggcatggtcccctgtgaggcaggaacacagcttcctgacaaatgagcaggagtgacccttattcttggcttctgtctgaaatggaaagacagatgttccacactgctgaagtctggacagcacctctgaagccctggagatggtctcttccattcctctggtgatgtccacctactcctcaaatgtagcatcaaggaacttcagctgcttccttggctcaactggattccaattttatccttccctttagtccctcagaaataagcagcgtaggaataattcccttcctggggatatcagctcattcctctagtttatttgctgccccttaaaggagtaccttaacctggggtacctgtgattattgaccctagaatgggtccatcatagattctgggacagcaggtgtctcctgggattgtcccaggcaaaccaggacataaagtcaccttacctaggtgggtaatagccacctaactgacttgtaagagtgaaatgaatatacccccaagtacagtgagtggtctaatcaggggtttgatttagtgaattgccgctaatgacactggtcctttggtgtttcaagcctctgcaccctatttgggcctcccttctacttatgcctttcttcttttctctattcctttaccttttgtcgttggcgtgttaccgtcttcatttctgccactagacctatgccccctgactgcctgggattaacagaggcttttacaactctgcttaccctctttttcttgattctagggctggtacgagccaagcccattattctaggtcctaatctgtttggtggagttgttactccacttctctgaccttgcgcgtagggcctgggcactcctaggaattaggggcagggtggggttagggctgaaacccatttgctccgacactcctgttttatgttctattaactttattcctcaggggaatacttccctttgcagccttctgtatttcacccttgggttcatgtacaaggatctcacaattatcagtggaaacataccctgaaatcttcaggctagaggcagtcactttcaggaccacagaagtccctgcctggtggctgcttgcctccagaaaggagagcaggagtgactgccacattgtcatggcgggagcgcgtgggggccggtgtctgtgaagccggggaagagtggggtcctgtggaatatgagcagggcaggaagccccagcctgagcctgtggtgtgtttggggccgaatattgtcccccccccgcccccgcccacgaaaaaaactcctgcgctcccagaaggtgagagtaccgagattagtcatgcagggccgctgagtgtgacttccagccctccagcgtctcgtgtcccgcccgtgtcggagcccatggctttttaggacaggaagcgctgcggggtagtgcgggcaggcaggcacgtcacaccggacagcgtcgagattgctgctttcggttccccagcgggtggtgaggcagaaagtgcagggcggaatgaggagccccagcacctcagagctgtcgggcagtggcggggaagcaaagcacaggagcgctgtggtgccagcggccgggctagggacgactggcgggtttgcgctggacccgaccccgagggcgggcgcaagggggcgggcgctgccgtactcaggccgcggggccagggcgggccggccggcggggcatttaaaccccgctgacagccagtccagcccgggacacgcgcc

SEQ ID NO: 8567 - DNA, 2300 bp, Homo sapien
ttaggagctggaggcggggctggttcccgggatggcttagatccagtgcaaggtgagggcctggcaatcacctcgggattgggggggcgggggttgggaaacttcttagaaagcgatttttttttctagacccagaagatgtggactgcgcccctcctcagcaccacgtgagtgtgagccctcccagccctatccctgccctccaactccatccagagggctggacccggagaggcctggggagctagagcagggagttctggccctcactgacctcaccgacccagtgctaggcccatgggttggccctacagcctgatgagtctggcaggtcagtccagcccgagacgaacgtgtgcctccccatcctgggagccagtgtctcttgcctgggctgcaccttcagctggtgggaggcagcacatggacgcacccacagcagggctcatctcctctgctcagggtgagccagctgagaaccaggacaaccctgaggaccctgggaacagtccctgctctatcagggagagcggccttgagactgtggccaaatgctccaaggggccatgcgaagagcctgctgccatcagcttctttggggcgctccggatcccagtaagaagtttgtggaatggaggaaagagaggggctttccagattttttctgttggtgatgaggagatggggtgcttgggtgatctatttttctagaacttctttataggggaggtgtaagttgggcagcctgcttggggagggcagtgtgggagatttgtcttgaaacaaccttgcacagtggtcatgttgcttttattgggactggatgtgttggaggctgccttgtgtggcaggtgatggaaagtactggggtggtgctgagcaccccttggggccaccactgaacccaggacctctggaccccttcccatgtgccccctgttgcactccccagggcgtggtcgagttctctctgtgtctgctgtttgccaagctggtcagttacaccttcctctactggctgcccctctacatcgccaatgtgggtaagtccaagagaaggggaatgaaggggtctctgaggaggccaaggctgcctctggtgggagaggaagcccgtcgtggtgatgcctgtgattccagtatataggcagaattcctgctgaacctctcctagagtgaaaggagcttgatttagttgtttacttaaatgaaagctaaacccagcaaactaccccctagaccctgactccagccaccttttctccccttggaactgagctgggggttaggaactcagagctctgttctgcaattcttgctatcttcttctctagcccttagtgtaggagaaaccccctccaggctgcttggctcataggtggtagcattggaggtgctagggaaggcctgcctgctagatctctcccccagcccaaggaagagggcctggtgagtgaccccactccttgtagcctggtggtgaccctggtggtcttctccccgtgggacctaatgtgatcgatgcccctgtgcctggatctgctgggctgcactggtgttctgtcctgtctcatggacctactcccgtctgctcctgcccagggatgtatagatgagaagagctcatttgaaaaaggatgtttcatgtccacctggcctgggtctctgcttttccataggtcaggctgctctaccaaacagcagcccaccccgccctgcccagcccccaggagcctccaagctccaccagggctgagggcctgtcacccagtactgctgccctccctcccagccctggggaggaacaacagtgccttgccacacattgtgctcgctctgaacaggatactgtaggaattagtcatggccaagttcaagccatagcttgccccgcagctctgtcggggcctctctcgtgacagtgtggagcactagggcagctttgtggacaccgtgactctttgttttgtggccttggtgctgacttcagagtatgaggcaccctcgagggtggggctacaatctcagcttctggacattccttttttaaaacatggagccaaggcctgtgacctgaggcccctgtgtccctgcaagtctccttcctggctctgtgtatgagcacagcctaaggtaaacgggaagagttcctagtgctgctagggccggagtgaagcagagaaagggctgggctgagcttcaggttgcgctccaggggaaaggtggccacgggacagcaggctcgggggccagatcccagagcttgccagggagggcttgttctgagaggtgaaggtcat

SEQ ID NO: 8568 - DNA, 2300 bp, Homo sapien
ctgttttgaacattatataaatggactcatatactatgaactctttagcctctagcttttttcatttaatatttgtgaaattcatccacattgttgagtatagttgtagtgtgttctttctcattgctttatactattctcattgctttatactacataatgctttatatactgtatgaatgaatagattgtagagtactatatccactctattggcagatatttggattgtttaaggttttagctatttcaggtagggctgcaatgtcttttttttgaatttaggtgtgcgtttctgttgggaatacacctaagaatagaagagctggatgtaggatgcatttatatttagctttattagatactgccaatagtctccaaagcagtggttaacaaattatggcccttgccagccgtatatgagggttccagttactccacatctttgtcaacacttgctgttgtctgttgttttcatgttagccattctggtgggtatatgaaggcactgaatttggttttaatttgcaatttccggatgactaatgaagttgagcacctttttacatatttattctcattcaggtatcctctttctcaagtgtttattctttttttatctgcttgatctatcagtttctgagacatatattaaaatctcctgctaaattagtggttttatacatttattgtagtacttctgtcagttttggctttatatatttggaggttttgttgttaggttcacatttgtttcaggttgtatctttttactgaatggttccttttgtcactgttcttaatatttttcagagctttacatctgttttgcgtggtactaatattgcttcatagcttatattttattttgtttcacttggttttttttcaactgtggcttataaaaaaacaaaaacaaaaacaaaaaaacagaatttcctgtcttaaccatttttaagagtgcagatcagcagtgttaagtatattcacagtgttgtgaaacagagctccaagatgctttcatcttgcaaaactgaaactctatactcattcaccatctccctattccctccttccctggtttttgtcttgttaatatttgctttgcatgtctttctcaatctctttattttcagcctctcattatactttctgtagagcttttgtacacagctatttttaaaaagaaaaatctaagagaatttcttttagtagtcaaatataatgtttccatgtactatgattactgttgtatttgggtttatttttacaatcttattttgtattttccattttccttgcgtattctttgttctgccacccacctcacacccactgacccttgccccactttctgttttctttatttttttttcactttactagtatagaagctattttttctatttctgttgcttgctgtttacctgtatgtttttttaacttgtgtacttagcttaaaaaacatatacctcctccaaaacaaaatcactgtagaatgctttaactttgaactatccttttccatctaccatataactgttgagtaatatttagtcctttctgatttttaacccctcaaaaattgtcattattacagaaatctttactgtcaatatttcttaataattttctcaccatgcttcctgtatctcatacctcctttcttggttcattttccttcttgctgaagtatgtctctgagtagccctttcactgaggatccttgagaggtgtactacatttcaccctttgtatgtctgaaaacatctttgttttacacttactcttgagggagtcttgcatgccagcctgtgggtttagttttgtctctgctgggatccaatgggttctcacttttagtctagttttcatgttaatctttctatttgggattcccatatcacatcggtagtattgaatctcacacatggatatgatgtgaggtggggattcagatttctcttgggctgttgttttttgacctgtggcctgaagcactcagccagcttccttccaactaagtcagtagcaaattatttagaccctatttcaaaaactggtcaatcctgtgagggcccagctttctgcattgttctcattgctagttctttgccatcgtgggcttgagaccttatctgccctgaagagaatcaccctgaaggtctgtatcaggcaccaggaccctcgtagacttttaggctcagctcaggccttgagttacatttttttatagcacttaatgatttttctttattgctttcgagctctgctgtgtactaaattcttcttgttctatt

SEQ ID NO: 8569 - DNA, 2300 bp, Homo sapien
ggtctcttccttgcatccctctcctggacggtgttgtgggttggaagcgctgcagagcctcggtctatccgctctctggatctcacagcactgcagcctgggaacaccccacttgaactctaagcttctccccaaccctgttgcagattcaaactggcgacaggaaaacaatgccccccatgtctcgtcttcagaatgtgcacctggccacctcccaggagctagagagggattaaggtctcggtcataagagatctgaatcaggcactgacacttccttttcttaagagcatgaaacaaaacagtccttccttctctgcctccaattaagtatttattagccgggccttgggtccagatcagcggtaagggtggtctgcgaggtccgtgcaccgccgtccgcccacgccttcttccaaccacctcagcccgaccctccacttttctcccttccccgcagccgccccgctttcctcacctctgcccccttcacctggatccactctcccccaggctctactcacacctcagattccggcgcgttccagcccacggggctctggtttacttagggcgaatcacaagtgggctttcatttaggtgatttaagattcactaatcagcgttgctctttcaacggccaacttcttcctcattagcttacgcctagcgcggctcccggcaacgccgagcgcggtgggttggctcgtcacccttcgttacgccctccgattggtcggtgcctgtcagcctttggaccgacctcagttcggttgggtagcagcggtccgagctgcactccccgcccccccgccactccactgtcaatcacaccatctctccgtaactcattgggccattggtcagtctagcctgagggcgggttgttgggcggaagagagagacttcttccggcctcactcgctgtcaccatagagattgcccatccaggcagcgaagcagcagggccaggcagctcagatctcgaactccagagaactgcacagtcatctagacatcaatgccttttccggggcctgatgaacatctcaatccccaacccactagctcgagtggggcgcaagatgtggtggacaagtcagctcaggcccggtcattaagtgtccccaacaaccctcctggagggaactgaggacgaagcaccagttgtaataacggcacgcttcatttatctttatctcgacttgttttatttggtatttaattcttccattagccttgcgaaacagacaaaggcaaagatcattctacccacgggacagactggggaagaggcccagggtccatcaagtaaaccctctgccgccaggctgctggaactggagctggcccacgctattggcagactgctgttacctaactgccaactaaagcttgccatgactttgctttgaggctatggcctgttagaccaaaagatgcatcaatcaggacaaccaaaggaagtaggacagaggctgcgtgctccaccactgaatcaagaaggggaaacaaacaataatcaataccaaattggagagctgcaccgtttgaacctttgaccttaaacaaaattttaagaaatatcatgaagcaacctattcaatcttagagcactgaatctctgatttaaggaattctcctgaatcacagctttatgaaccaaaaagaagaagatgcttgaatttcatcaactgcacgtctcaaatttattcaactttcgaggcttcatttacaatcacataaagtaaccaatgatttgttgtgcgtttagcaacttaacattacttggcccagtgagaagctctgtggctaagaaatcctttattttgatgaattcatttcactggaactgagtgttgactgcagctatgttctgttaggaactgcgaagatatacaagaaatgagatgtgactcccatcttaatagcccgtggttttgtaatgttaggtcaacaacacatgaaacaagtaggaaacactttaaagcaagatataacaatgggccaaccctattgtacaattaatttctccaaaatataataatacttcatatttgcagaacatttcgtagtttccagagcacttcttcccttgtattatttgggggatattttgttatggctggaattaatgtgtgtgtctttatcatagagctagaactaatgctgggtcctagcatatgagtaggaacaggaaaggtggaacagaatccaggaggagaaagtagtttgagcaaagaggccaaggcaagaatgagcactgagtatctggagaataatatggagacaaatgatgg

SEQ ID NO: 8570 - DNA, 2300 bp, Homo sapien
cactgaggtccgggagcccaagcccctgaggactgcatagactttggctgtgctgctgatgaactggacgctgtggctgtgtggctggatggaatgcagggactggtagttggtggaggtggtaaagcaaatggtgaagctcatgctgcctaaggagaaaagcgagaggacaggactcaagttctgttgagccatgcccatttttaatttatagcttaactgaagccagtatgatcattagaagtgtaaggaagttaacttttccaatctcaaactttgaacttttgaccactttcctccaaaatattaaggtctcagagccagttctgaccagcttgtctacacattactttccatcatttgtctccatattattctccagatactcagtgctcattcttgccttggcctctttgctcaaactactttctcctcctggattctgttccacctttcctgttcctactcatatgctaggacccagcattagttctagctctatgataaagacacacacattaattccagccataacaaaatatcccccaaataatacaagggaagaagtgctctggaaactacgaaatgttctgcaaatatgaagtattattatattttggagaaattaattgtacaatagggttggcccattgttatatcttgctttaaagtgtttcctacttgtttcatgtgttgttgacctaacattacaaaaccacgggctattaagatgggagtcacatctcatttcttgtatatcttcgcagttcctaacagaacatagctgcagtcaacactcagttccagtgaaatgaattcatcaaaataaaggatttcttagccacagagcttctcactgggccaagtaatgttaagttgctaaacgcacaacaaatcattggttactttatgtgattgtaaatgaagcctcgaaagttgaataaatttgagacgtgcagttgatgaaattcaagcatcttcttctttttggttcataaagctgtgattcaggagaattccttaaatcagagattcagtgctctaagattgaataggttgcttcatgatatttcttaaaattttgtttaaggtcaaaggttcaaacggtgcagctctccaatttggtattgattattgtttgtttccccttcttgattcagtggtggagcacgcagcctctgtcctacttcctttggttgtcctgattgatgcatcttttggtctaacaggccatagcctcaaagcaaagtcatggcaagctttagttggcagttaggtaacagcagtctgccaatagcgtgggccagctccagttccagcagcctggcggcagagggtttacttgatggaccctgggcctcttccccagtctgtcccgtgggtagaatgatctttgcctttgtctgtttcgcaaggctaatggaagaattaaataccaaataaaacaagtcgagataaagataaatgaagcgtgccgttattacaactggtgcttcgtcctcagttccctccaggagggttgttggggacacttaatgaccgggcctgagctgacttgtccaccacatcttgcgccccactcgagctagtgggttggggattgagatgttcatcaggccccggaaaaggcattgatgtctagatgactgtgcagttctctggagttcgagatctgagctgcctggccctgctgcttcgctgcctggatgggcaatctctatggtgacagcgagtgaggccggaagaagtctctctcttccgcccaacaacccgccctcaggctagactgaccaatggcccaatgagttacggagagatggtgtgattgacagtggagtggcgggggggcggggagtgcagctcggaccgctgctacccaaccgaactgaggtcggtccaaaggctgacaggcaccgaccaatcggagggcgtaacgaagggtgacgagccaacccaccgcgctcggcgttgccgggagccgcgctaggcgtaagctaatgaggaagaagttggccgttgaaagagcaacgctgattagtgaatcttaaatcacctaaatgaaagcccacttgtgattcgccctaagtaaaccagagccccgtgggctggaacgcgccggaatctgaggtgtgagtagagcctgggggagagtggatccaggtgaagggggcagaggtgaggaaagcggggcggctgcggggaagggagaaaagtggagggtcgggctgaggtggttggaagaaggcgtgggcggacggcggtgcacggacctcgcagaccacccttaccgctgatctgga

SEQ ID NO: 8571 - DNA, 2300 bp, Homo sapien
atagtcaaagcaagatatatttacttaaaactacgatgtgcagtttaaagcaccaaaaaggtattagtgaaaatcatagtatttgaagactccaaaaattaatagctcatggcaatggatctcccatatcaggaaagtgttgggcattgatctagatttcagaaaacgaggggtgtgacaggtgtaaatcagtgatccaaggctgttgcctgcggtcctatttatggctcactgacacctctctgatggggtgaattcagcctgattttcccctctgactctgcaggctgcagcaactcactgggagccatgggaaagagagaaactcctccctccaggggtcctgggcagagacaaatggatctcccctccccctcccttatctgaagagggcttccctctgagagtttatggcagcctgacctccagcctctgggttggagaatctggccgcttctgtaccacataaaaagggcaagtgcattcattattattatattattatacaatgtataatatataatagcgattatgctgtcagcagccagagactctgactgcagatcagaggctagggtgacataaatccacctagtgaagtttttgaaggttctatgtgaaggtgagaggattctaatctgtctataatgggggctaccactgaagagtttctcccacaagcaacgttggtgggtggatttgagggtattgggaggatctggacaaacagtagtgtgtgtatctgggatgtgatataagaagggtctcaattgcctcccctgagccaggcaatgctaacagctctcatccttgcccatgacggaggcgggtgagtggcgacccagaggcctgagaagagctcaggggcagccttcaacttcttgggtcagattctttactgaaaacccagaggctgggtttcactttctgctttcccgcttttgtcggtgtctttgtctgggcttcttccaggccccctgcctggcctggggtcagaggatcaatggctgcctgactggctgaaagggctcctctatggggagcaagaagcaaacttccagaggcagaaggggttctcttgtccctttatgcggagggccatgtgctaagttgaggaagcaagcaagtgtgctcctgtgtgtggctcttagtaggactgtgatctctgctgagtgaatggaggcgcttgtgggtctacacatgcctgcttttgtcttccactgtagagggcatgtaaggagcccatttcctccctgatgtagatgaagccaccccagcaggcccaggctgaaacagcccagctggtctttccctttatatgactgcaccccagcccccagaactctgggaactcactgagtttcttgaggactttttattagaatgaaaatagcagtggcttagaacaggcttgcctgacatttgcaaagaagtgctttactgacaaagcctatccactctttcctctctccctctgccccaccttgaaccagacaccccgggaagcccacagcagaaaaagctcttgagaccaggaataactaaccagagtgtcatctgaacaccttttctggggccagggtaatgagaattattcaaatgcaatcataaaaatgaggccagccaggcaggaaaagggggagggggagtgctggtggaaggaaggatttcttgcccgttttaagtttcatcatttctggggagttctcttggggtccacagaaaatctcacctcatctcggtcccctcagcaccggtgatatcttggaactcggccccggttgttcgctaaggaggacttggcttgggggcgggagggtgctccagagttcctgggggtccaccgcactccccatccgaggctcctcgcgagcggagccgcttctccaggccgcccgcctccctgccgcaggagcaggcccgcgcccgccgcccgagagcctccggtagagggagacactccagcggctcctccgacttggcagcggccgggccgggagtgggtgggggtgatggggggtggggagaaaagggggagtggggagaggggaggtgtgtgaagggggggtccggggggcgggtccctgtgccgctgacgtcccgagcagtgctgggaagtataggctgtgttgtcacgccggtgtcagtctgatgaagattggcatcaggtaagctgtcattcatttccatgtcagagacgcttttgcaggcggcggcggcggcgcggcggcggctgctgctgcgggcggctgcctcagagcgcgtgtgttttattccagtccccaagccagagtattatt

SEQ ID NO: 8572 - DNA, 2300 bp, Homo sapien
caaaaagtctatatcttaccccacccccacctttttccctctgcaatcctcactctgctcttggctctctgggatgctgaccaccacccagacaaagatccagctgtgaacagaggccttggttcccctgcctgaagagagaggctcccccaaagccccctcctgcgtccctttgcaaaaggaaattggatcttagggaccagcggtgtgtgagatgggcgaggccctgcatgctgttgtgaagatatcctggtagtccgtcttctgaaggaggccaggcgggggcgagtgacaggcggtgaggccgacggaaccggcctgaagtcggcatttttagcaccgggggagccatccctccctgtgcattctccacccacctccacctcattttcttccttcctttaggaccatgacctccctctcctagccatgcctcattcatctgtcccaccacactccccacactgttctctgcacagagttggtggttggtagacatctattgagtgaaacaggcctttccagtgctttttgcagaaggtcaaagcgtacttggtatcttggagactcaggtcaggtcagagtagatcttacttccacttcctgaaaaagaaccaaaagaatcacacacacacacacacacacacacacacacacacacacagccctggaggccagcccctttagatgacagcagctccaaagcactctcaaattcccacagaattcaggtctgtgaacattttggaagaccctgggaagggccaggctggaagaggatgaagccctaggtgcctcagggagaggggacggagggtgtgagtgctgtgctcacaaaggtttctacaccaacagtgccctccacccaggagaagaacacgtcctgcactccacagaggctcttagcaacctcctaccctacagtggacagccctgtatcaggcaactagcctgtggcttctagatctaaatatttcagagcatctactgcagcacaacagctctctggacattctgtttccttgggtggcacagccgggctgtctccacttatggcaccacatcctacttcaagaggaaatcttgaggcttcatgggggcagctcgcctgcttattggtgatggggaaatgatgggggcaacagtggagcaggcccagagctgggaatctggaggtgctgcttccatcccagcttcactaacaagtcccccaacccccgccctcccatacacaagtcacccttggcctctgtcttctaccagccaaagaggcaggtagaccatttggctctgatagctcttctggtatccccacattccggtgaccgtactgaaccaagactgaggaaagtcctccttaataggatatgcaggcacatctgtggacacgcccatagtcacaagcccgagtctgggaaagtacaggagtagaccggcattccctgcctctttcccttccccaaggcctccaggcagccaccctggggctacagtctgaggacgggtccaggccgtcctccgtctcacagtctgaggacgggtgagccctggggaggggcgagcttggtgcttggggaccctggaatcccgtagctggcctgaggccctcctgcccctgtgcgcgctgtggctgctccagaaagcctgggaaacagcggggccaggagcacccttatcaggctggaactcagggtcctcctggggaaggaggggtatccaaatggcctccagtcccccggtgctgctaccaggcaggccccctccctcttcgtgccccctccccacacgtacaacaggccggagctgatgctgaacaaagcgccgctgcaggggtaccggttgttttacatatgatttgaatattgtttctttcaagtcaaaatagcacagcaagcccctccccacccaggcctcttccttagctctcatttgttgccctgaagggcgtgcaacccttgccgcatccagccggcccaggtggcccagcgggggacacagggagctgctgggtgcccagggcgggcctgctcagcggtgttaacggtgcggccccctttctcctgcccacaggtcctccatgtgaatcaatcccatgatgcaacatgcctccccagcccccgctctgacgatgatggccacgcagaatgtcccgcccccaccctaccaggacagcccacaggtgagtgcgcaggggccgctgcctcccaccacgggggagggagtgtggtggccttagagccccagctgcaggctgggacattccaggggccgacgggcagagccaggcctcccgcaatcac

SEQ ID NO: 8573 - DNA, 2300 bp, Homo sapien
aacacttactacatgccacacatttttccttggtgctagtgaggtagggttgaaaagaaagacatggtcccttttctcaaaacacttgcagcctgccccttggggtgacaggtagctacacagacccaaagcccctgtagtaggaagaatcctagatagggcaagtgctcagagctcatagaaggggcatctgagagggcttcacttatcagggatggggatggggaggaggttaagaaggacccatcttgctggcattgtgaagcatagattgacacagaaaccagagggaaagagaatagttttgagattgcaggaaggtgaagaatgggacagcagtgtgtcttcacagtggaaaactacacagcgattaaaaggaacaattacagttaaacagagccagcatggatgaatgattccatttacatcaggttcaaaaacctgatgtcaactaggtcatcatgtttaggatgtaacacagatagcaaaactataaagaaaagcaagaaagtggttactgcaaaagtcaggagatctttggagaggtgtttggggggacagaagggggtttgtggggtgctggtagtatcctatttttttgacctgggggtggttacatgggtgtttgcttttcttcgtacttttctgagtgttcagttttaaggggagcagggataaaaatgagagcaaaaataaaagaatggaaagcatgaacaagggcaatgactacagaaagagaagtttctcgggtgacttattgtgcttctctttattctaaaagactttttttttcttccattttaacatctctgaaattgggtacatcccaccatcagtggcctcttagatgtgatggaatgtggtcgttttggggcccccaccatcctggctgccttcctctgggtctctggccctcctagagtggaaccaccccagagtggtggctggcagcagcccatggccccacagctgtcaagagggagaggaggggaaaagcgtgtagtggactctggtgcagcgctgctgatggcaggaaacctaatggaagctcgctgatctgaatcagcctccatgccccgctccaccagcacctcagtgtctattgacactgacaggctgcggcttcccatctgctgtgtcccttggtgaactggctcacctcatggtgagatctacatggctaggaggtggaaggacaattgccaatgggctgtgcatgaaagaaatatccaggacctgtgaaccagaactggcttagcttccttctgaaccagcccctgggcagaactcactctttcaattgaaagatgcttttagtatcagtttagtccagaggagagttgcgttatggggctataaagggaggtatcagagagagatgggaaagagttgaggtcagatttcagcggaacttcctggtggcaactacagtgccctgagacacctacttggtgtaaataccataattcccttctctagagtccttgagtattcaactagatgatgccgggaggcttcagtgcatcgcacagagtgagtcaatggagcacacaggcttaccctgcactatctcattaaatcatccccatgtccaagagttagtcactgttttgctacttccatctaaggatggaagacataaaacaaacaaaggtcacttgcgtgtgtcaaggtcacacaatgttaaggggtgggtcaggacttgatcccatctctgaaggtcctttactccctggcagcactgcccagtcgtgtgaggctccagctgtccctgagaaggctctgtcatcttctagtctgttctgtacctctttttctttttctttttcttttccttgcttttcatgaactgtatctacttctttttcaaggaaggattatctacttccagagagctactgtctgggcccttctcttccaaatccagggagttccctccaataacgatcagagagcagccactgtgccttgatggtttgccgtgatccaataacgatcagagagcagccactgtgccttgatggtttgccgtgatccaataatgatcagagagcagccactgtgccttgatggtttgcgtgatctcatttgattcttcttcccctccttggccccaagcctggccagttgtgctaaaagtagcgctgacccaatcatggtctgtccagaggccaggactattttgactctgtcctcaggaatcatgtggtctgaggcgtgtacgagctggactgctcccatgaccactcagatgtggtgccaggaatgttctggctgacacacctgtccccagagctgct

SEQ ID NO: 8574 - DNA, 2300 bp, Homo sapien
gtcaggagttcaagaccagcctggccaacatggcaaaaccctgtctctactaaaaatacaaaaaaaaaaaattagctgagcatggtggcaggtgcctgtaatcccagctacttgggaggctgaggcaggagaatcgcttgagcccaagaggcagaggttgcagtgagccgagatcatgccattgcactccagcctgggcaacaagagcgaaactccatctcaagaaagaaagaaagaaagaaagagagaaaagaaagaaagaaagaaagaaagaaagaaagaaagaaagaaagaaagaaagaaagaaagaaggaaagaaggaaagaaggaaagaaggaaagaaggaaagaaggaaagaaggaaagaaggaaagaaggaaagaaagaaagaaagagagaaagaaagaaagaaagaaagaaagaaagaaagaaagaaagaaaggtgatgtgggagtgcttcaagtaaaagaaaaattatccctgccatgatattctctgtgcaatgcttcaatatgcttatcaaacaagagaactattgctgaaagaattttagcatcttttttactaaggcttcttttttcaatttatttgttcaaaggttcctggatcgtgggttccattttacagagatatgaaagccaatccgatagtgttgcaggtatttacactgcctttaaatttgtacttttctctgggaatgacaggggagaagcagatggtgacaccagtggggtttctgatttgaaatgacacagtctatatgattaaccagcaacaagaggccaatccaaccagaatctaggactaagactgagttttgagtgttggcaacaggaagagtgtgctgaaagcactctgcccaggcagagtgtagagaaaatggattcatctagaaaattataaaagacgaaatgaatatcacagctctagggttcagacacatgctcatttgaaacagtccataatatagactgattgttttttgtcaactcattatccaagagccaagaagtgctgcatgaatgaccatctggagatgaagttaaagtgaaagccagtgctgggaaactagtcactcaacacccaaactgaatccagcatttgtggaaagacctcaggctgtggcacagatgagagtcaggcgttctgactggccccactatagcctccaggagggctctgtggattggggttggcagcacttccttagatggtgaccctgccttccttcctttagcccactttctttcgccctcctctcttcacggagtgctttcatccttcaactaaaatgtctgaaacaaccttattttccatcctggcaagcttgcaccatcctcattcatagctcatctgggagccttcttttccttaaagtaggattaatacaagcgatagcttattccctttagacttccaagatcaaaaataaatacgtacatacatgaaaatggcagaaagaaggaaccatgggagggtcgccttttctttttctctttaccacagaacagagcgcaggactatagtctgattgtcctacaatctattccatttattttcactcccaatagatggtgtaatttggaaaagaaaagacactcacggggcttaacagagacccagtaggaaacgcataaacgtctccctgcagcacaatgatgcactcgctgcatctcggggctgcggtacaaatgctcagtccctgctttgctgagctgacccgagtggagcggagcggtggagatttcaccacgctaaccccgctgggcctcggcacctccacacaagccccattccatctccttcttcccatcacttggtccatagatcaactgattccgtgcctcgtcccccatatccgtccctaaaacctaccctgcactgatccaccttcagatttcccactgctcctccgcagaacccacccagtgtgcatgtttgtgcacattttgacagaaaaagtatttcgttgcatatggatcagcaaccccttcgcggttctgcttgctcccctccccctcctcccgctgctccattcacctccatctcagatccccctcctccccccagtccggtggggtaaagaaagcctcctccaggcagcacaatggctggcactctgaggaagccggactcatcccgtgcaggccgcatacacactccactgcccttccggccaaacaagcccggacacgggagagggatgagagtcggggatgcctagcggcgaggagagaagggataggcaaaagggaagaagagcgggctgtgatacctcctcgacgccgtcaaacactgctc

SEQ ID NO: 8575 - DNA, 2300 bp, Homo sapien
tatatgagacatacatgtgggacatctatatgagacatacatgtgggacatctatatgagacatacatgtgggacatctatatgagacatacatgtgggacatctatatgagacatacatgtgggacatctatatgagacatatatgtgggacatctatatgagacatatatgtgggacatctatatgagacatatatgggacatctatatgagacatatatatgggacatctatatgagacgtatatatgggacatctatatgagacatatatatgacatatatatgtgtgtgtgtatatatatacacacatacatacatatagtgccttctaataaacctggaagtactttactcatattcactcctttaatcccacaacaggccacaatagagtggggcactattattttctttcttttttttttttttgagtcggagtctcgctctgtcacccaggctggagtgcagtggcgcaatctcggctcactccaagctccgcctcctgggtgcacgccattctcagcctcccgagtaattgggactacaggcgcccgccaccacgcacagctgattttttgtatttttggtggagatggggtttcaccgtgttagccaggatggtctcgatctcctgacctcgtgatccgcccgcctcggcctcccaaagtgctgggattacaggcgtgagccaccgcgcccggcgggcactattattttcttcattttacagatgaggaaatgagccacagggaagttaactaacccaaggtcacaaaactgggcatgatcccaagaaaggagatctagggatcttttaaccagctactctttgtgatttatttatttatttatttacttttgagacaaggtcttgctgtcgcccaggctggagtgcagcttcaacctcttgggctcaagcgatcctcccacctcatcctccagtgtagctggggctaccaggatgggctaccaggatgggcccaccatgcctggctaatttttttttttttatagagatggggtctcactatgttgcctaggctggtcttgaactcctggcctcaagtgatcctcctgcctcagctttccaacatgttgggattataggtgtgagccaccgtgcctggccttatgatttcttacaggaagacatcctctgtctattgctcccacaaaggcaaataggccaacgcttcttctcatctcattgggacattattcctgtttccatccttctcatggttgaaatgtctgtggaatgaatgcataaacgagcaaaagagacgctccctgccccttccagttgaagtcctcagttcagcccagaggtactttgccatcagacaaaagtacttggggttctccaagccgacatgctttttccagtgccttccttcgataattacagttcttgtgctcttagttgtgtgtattcgtgaattattagattttttattgacaacttctataagcacaggcctatgcacagtagacaagataaattaataatttttcacaagactccagggacccttctcatttcagcctcttgaattttcctgtattatctcaagtcctcctgggcctgaaaccttctcactcagatttttcagctggatccagctcccacccagcatctttgggcgagaaaagctctcctgccggcctcctcatttttggcttgaggtccgaacccagttggagctgggagacgtcgctgggcctgcccgcctcagcctccagtagaggagaatgggaaactcggaaagtccaaaagggtctttgagtgtgtctgccggcatccgccagcagccatcgcctgcattttatccagaaactagtgtcaggctttgcgaggtatccatattggtagttattgcacgctttcatcttggagtttctgaatattcatgagggaagcagaaaggccaatgttaaagaggagagaaacagaaatgcataaatattaataaaggcaagcccacgtgctcggaggaaggctatgaatgttaacgaggggatgacgtccagctcccgcgcgtgccagttgggtgggtgcccgagcgcgggcgcgcccccggagcccgggcacgagcgcggggaaggggtggggtggaggcgggagcggagccgggcgccgccggagctgcgcggggagcgctcgctggctggctggctggctggctctccgctgcgctgcgctgcgctccggccgctcccgcggcccgtggatgggggtgtccggctgagccccgggatccgcctccctccgccaggacccgcacaggtgccgtcgc

SEQ ID NO: 8576 - DNA, 2300 bp, Homo sapien
gctttaaactgtttttggcttggaggtggggtttcaatggggacccgccactaactgcctaggcatttggctgtctcctgtcgctatcactagatctagtattgttatcatttcactaaatcatatatccatacagttaaaaaacaccttcatatatataccatttatttcagcagcctgtgttaaagaaactaaggtttgggccaggcgtgctggctcacacctgtaatcccagcactttgggaggccaaggcgggtggatcacgaggtcagaagatcgagaccatcctggctaacatggtgaaaccccgtctctactaaaaatacaaaaaattagccgggcgtggtggcgggcacctgtagtcccagctacttgggaggctgagacaggagaatggtgtgaacccgggaggtggagcttgcagtgagccaagatagagagacactgtctcaaaaaaaaaaaaaaaaaaaaaaagaaactaaggttcacagcttaactggaggtcatgtcttctcaaagtgctctgccacaaacttcctcatttgtgaaatttggaaaataatatcctctacttgtccacaaatagcatctaatcatacataagcatgtgagagctctttaaaaatgcaaggtattaattattattggtttttattttaaatgtggttatacatgttgagatttaaaagatttcctcccggccaggcgcagtggctcacgcctgtaatcccagcactttgggaggctgtaggtgggcggaccacgaggtcaggagatcgagaccatcctggctaacacggtgaaaccccgtctctactaaaaatacaaaaaaattagccatgcttggtggcaggtgcctgtagtcccagctactcaggaggctgaggcaggagaatggcgtgaacccagggggcggagcttgcagtgagccgagatcgcaccactgcactccagcctgggagacaaagacagactcagtctcaaaaaaaaaaaaaaaaaaagatttcctcccatgaagtaagccagaataaactcatacctactaaattctttctaaaatcttttctaaattgacactcttgagaaagaatagagcttggaggaagagctattattataattaatagcacaataatcagtttgtcattaaaccacttaggtctctttgtaacaagatttctaagctttagtagatggattccttattctattctattttatattgttttgttttgttttattttattttatttttcgagacagtctagctgtgtcacccaggctgaagtgcagtagtgcgatctcggctcaccgcaacctctgcctcctgaattgaagtgattctcattccttagccgaccaagtagctgggaccacaggtgtgtgccaccatgcccagctaattttttgtatttttagtagagacgggatttcaccatcttggccagggtggcctcaagtgatctgcccgcctcagcttcccaaagtgctgaggttacacgcatgagccaccgtgcccagccacttattttatttcattttttaaatttattattattattattattttgagactgagtcttgctcagtcgcccaggcaggagtgcagtggtgtgatctcggctcactgcaaccttcatcccctgagttcaagtaattctcctgcctcagcctcctgagtagctgggaccacaggcaggtaccaccacacctggctaatttttgttattttagtagagatggggtttcgctatgttggccaggctggtcttgaactcctgacctcgtgatctgcctgccttggcctcccaaaatgctgggattaaaggcatcctgttactaatttcacaggattttagaaacgcaagcagcgttgtggagtcaatgggggagggcaaagaacaggaggagagatctgtgagaacgggatcggcgaggaggcgacggggaggaggcgacgcggaggggtgaggggtcctctccgccgccaggcggagttgggagccggacgatcccgcacgcagcgcgaggcgggaccccggactgactacatttcccagtctccgtcgctccgcgcggcccaccccttcggctctgggccccgcctcgtggtgccggctggttcttcgcgctcgcccgacttcccagcggccccgtgcggcccgggcatgcccagtgcgggcgcagcggccccggccctggaagcgccccggcggagctggcctgcggtgggctaggggcagggccggagccgcggcggcggagctgtgggtaggtgcgggctcagccgagctaggcc

SEQ ID NO: 8577 - DNA, 2300 bp, Homo sapien
tatatatgctggtgggaggtaatgatttttaaatctttttttccccacggaaatgagaattttaaaattacattataaaattataagaaacatgaatttacctgcttttttctgctactctggttattctccagtcctgccaggtggaaactttttttctttttatagttatgcctaatttttttttttttttaaagagacagacgggtcggctgggcgcagtagttcatgcctgtgatcccagcactttgggaggccgaggtgggcggatcacctaaggtcaggcatttgagaccagcctggccaacatggtgaaaccccatctctactaaaaatacaaaaattagctgcgcgtggtggcaacatgcttgtaatcccagctactcgggaagctgaggcaggagaatcgcttgaacccaggaggcagagattgtagtgagccgagatcgcgccattgcactccagcctgggcgacaagagcaaaactgtctcaaaaataaataaataaataaaagacagggtcttattttgccacctaggctggagtacagtggcacaatcatacctcactgcagcctcaaactctgggctcaagcaatcctcctgccttagcctcctgagtagctgggactacaggcacatgccatcatgctcattttaaaaatcttgttgtagagacagggtctcagtatgttgcccagtctggtctttaactcttggcctcaagagatcctcccgcctcatcctcccaaactgttgggattacaggaatgagtcactgtgcccaccctgcactcggccttttagaaacttgagaagcagctaggaagctatctcagacagtgattggagagtgacaggtgaatggtgctaggtttccgaggctttgggattaagattttccatatttgttcttcagggaatgtttgtgagtctctttcccatccatcttgtcggtcagctggttagtctcctgcatatgtcccttctctactcactgtactgctttgaatatcgttggttcaataaaggtaagtccatctaaagaaatccagaaaatggaggcccagtttggaaatgctactgctaagcagacttcttaaactactcatagtcaggcttttggcaaacaatcctttgagggaagcagcctcattggcaagagggagcttaccttcggcttagtgggtttaactctcaactttgaggctgggggatgtggtagtatggcattatctttttggtgcttaacatggtatatctctgactgggttgtaagatggcataaatgagcatgagttgctctaaattagagaagtcaaattgatgtcagcatctggatccttttgggggtgttttagaaagaccttcagatatttaccagggtgtgcgtggttgaaagaggttaactgatacttacaggatggcatccttttgatttgctatcttgcttagttccagactaatcctgacaaaggatgctggtgctgaaattcttaattcacttagcctgtcagctttgaaattacgattatagaattctaagaaactttgcatgctttatatcagatttgtacacttctaatttatatgctgtagctctgttctaaatctgtacctaggctgggtgtggtggctcacacctgtaatcccaacactttgggaggccaaggtgggtggatcgcctgaggtcaggagttcaagaccagcttggccaatatggtgaaaccctgtctctactaaaaatacaaaaattagctgggcgaggtggcaggcgcctgtaatcccagctacttgggaggctgaggtgggagaatcgcttgaaaccaggaggtggaggttgcagtgagctgagattgcaccaccgcactcccgcctgggcatcaaagcaagactccatctcaaataataataataataataataataataataataaaatctgtacctaaaactcatggtttgtctaccatagttacttagtcacttgactaaaaggaaatataatatctaattgtattggctttcttgttttaggaattgaaatgcaccagcggttgtctaacatagaaaggaattggccttactactttgggtttggtttgcccttggcttttctcacagcaatgcagtcctcatatattatcaggtaatttggctacagggatttgaaggagactagtaaaaataaaaattcatgaagtcagtgccttttgtttgcttcgttctgtttcgcattctacatcatcatttgtccatcaggagacctgcagggtatttctacatttgttagcatgaag

SEQ ID NO: 8578 - DNA, 2300 bp, Homo sapien
agtagctgagattacaggagcccaccatcgcgcctggcctactttgaaaaaaattaataaaaactctaacatcttaatattctttttctttttttgagacggagtttcgctcttgctgcccagactgaagtgcaatggcgcgatcttggctcactgcaacctccaactcctgggtttaagcgattctcctgcctcagcctcccaagtagctgggattacaggatcctgacaccaagcccagctaatttttgtatttttagtagagatggggtttcaccatgttggtgaggctgttctcaaactcctgacctcaggtgattcacccgcctcggcctcccaaagtgctgggattacaggcgtgagccaccgcgaccggccttaatattcttaggttaatacttaaaaaaaaacaaaagaaacttgaacacaatctttctaattttaatgcccccctccccgcttttttatttttaaagagaaaaaacttctttttgagacggagtccagctctgtcgccaggctggagtgcagtggcacgatctcggctcactgcaacctccgactccctggttcaagtgattctgtgtcagcctcccgagtagctgggattacaggcacgcgccaccacgcccagctaatttttctatttttagtagagacgggtttcaccatgttggccaggatggtctctacctcctgacctcgtgatccgcccgccttggcctcccaaagtgctgggattacaggggtgagccaccgcgcccgaccaaaactcgtattttgaagaagcatttactccaagttctgtaattccttcaggctcagcttcagtttccttttgttaaagtaaaattacatcgaacacttactactaaaaacaaaaccaaaaaaaagcagatctattgaatcataacgtcctggggcgagcctggtcatgtggattttgaaaaaaatgcatgtgattctgaagcagtgatttaaataatgacctttcaataagtggtgggttccgttcatgggagaataggaaactgcgtgagtggtagaggcaacaagttcgaagagctgcgagacgttcccactctctctggtgtagccttggctcaccgaggcgcgcagggagtggaagtgcctgaggataaaggtgtacacgtgcgagtctgagatgatggaattgctgctcaaacttcgtccccttctctgccctcagcaaacttattgggggtcggggagcgcgtggggtgcgagagaagagaggcaagttaggatagggagagcggctctctggccggtattttaacaaagggctgaactgactaagcatggccgggctgcctcccggtctcccgaggaagcccgcttgctgctggggagggctgtgcctccgcggcggtggctgtctcagctggcagtagaaatgcttccagcttagccccgacaacccctttaggcctaggcacgctctttcacaaaaccaggggctgtgaactctgtcaaggttcccaggtccatcgcagttaccaaggcacagtaaaagctcgagtcaactatcaggcacatcctgcaaaagacgaactgtctggaccagtccgcgtttgagttttaattgagaataaataggtagaaaatgcttccctcctctcctttcaccttgtattaggtaacaatttctaccttaaaaaagacgggagacgagcggctccgcattccgagttactgggacttggagcaagggcctatttcagcgtagtttccgcttcttgtcacatgacgggagtcagtgggccgcgccttcccactgcgactccccgtgggtccgcaaaccgacacgtcactcctcggccctcaaccaaactgcttggggcacgttctttccgcgctcttgactcctacgcgccggcctatgacagctcggcgggagcatacagacctgcctctagactgctaagtgatagctgtaatgaccaattaaaaacttgaatcgcggcccggtttacgcctccggatttgacagacagttccgagaccctatcgctctccagaagcgtcctattggcctggagccagccaacgggggagcggtccgggaggcggacccggctcctgccagggttgggtgcgccgctgaacggatggctgagggagccccgcggatcgtttaggaaagccggccaggtgagaaggccgtagaacgtaacttgaaaatcagcggcaggtgcagtccatggcgttgatggggctgaacgaagtgcaggaggcaaaactctaaatgggggtggagagcagagcttagggccttg

SEQ ID NO: 8579 - DNA, 2300 bp, Homo sapien
acagttaattatggagaacatgcttgacttctcagtgttggggctagcattctatatgccttccacctagtccagtgttgttgttgttttgtttttctcctttattccaataatagtgggaaaaaagattcatggaggaggatagacaaacgtttgttaagggatacacaagtacaactagataggaataaattctagtgttctataggataactattattaggagtataattaacaacaaaaatacacaatttgttgtatattttcagatagctagaagagtggattttgaatattcctaagacaaaaaaaataaggtgatgaatctactaattatttcccgacttgatcattacacattatatacatgtaccaaaatgtcacactgtactccataaatatgtacaattatgtgtcagtcaaaaagaataaaagcaaaacatcttgaatggtgttgcatatcctttgttatagtcgttataacttagctcttgatcaccttgtaatttaaaaaagtaggtctgggcgtggtagctcacgcctgtaatcccagcactttgggaggctgaggtgggcagatcatgaggtcaagagatccagaccaccctggccaacatggtgaaaccccgtctctactaaaaatacaaaaattagctgggcgtggtggcgcacacctgtagtcccagcttctcatgaggctgaggcagaagaatcgcttgaacccaggaggtggatggaggttgcagtgagccgagatggcaccactgcactctagcctggcgacagagcaagactccgtctcaaaaaaaaaaaaaaaaaaaagatagtagtactgtcttatacaagaataactaacctatggtagattagtgctatattgctatataaataattcatatctgtcatgtgatttccattttgaactgcctacagatagtgtccctcaacattttaatctactttttttaatcccccgactcttctgcttcagtaggaaaaattcgttttctttccctctagattatcatctgatgccatcaaactgtctgtgtaatttaatcagtctcttaaatcagcattgtcagttacagagaagccttgagacagatgattggaagcgggtatagatctgagcagtcgttacagtctgatatatgggatgagaacacagtggatctgtgtttgggtacctccacctctttttgagtgcatgattgtacctgcattagttatcaggtatgctgttagttgacccgacagccccattgggatttggaaaagaaaaaagtttatagccattcagttgaagtttaaatttagggctcgaaattgtgttgattcagtcgtgacttctatttttcctcttaatgcctttcacttcttctttttttttttttttcctttttaaagagaggaggtctggctctattgtccaggctggagtgcagtggtgtgatcctagctcactgcagcctccaactcctgcctcagcctcctgagtagctgggactgcaggtgcagaccaccaagcctgcataattttaaacagttttttgtggagatggggttttgctgtattgctcagattggtcttgaactcctggcttcaagcgatcctccctccttagcctctgaaattgctggggcttgcacttctggtctcaatgtttatttcctgcttccccccctccgcccctgccaccccatatagtcctgccttttcttgagtgctctctttctccattttattatttttcagtatttccaatctttcctgtttattttttcatctcttccttgtgctatactattgctaattgtgcttatgtacttgttagctgtgaaggagtgggaaatagaattatggatggtttattctgaccactccattttagtcttgacacatagacctgacttgtgcctacttccttgcaagttgatcatactttaggccaggcttggatactagtattagccttgaccctgtctggtgtttttgctagctcctacgtcctttatgattccctctcatcataaaatatgaaaattaagtaaattgaaggtgttcaatatcttgtggtcttgactttttcattttagctgatcgtcgtgtgttgccacccattcatgtcaagatgactaagtttggatttttgcgattgtcctatgagaagcaggacacacttttgaagcttctcattctgtcaatggctgctgtattatgtgagtgtgcatgtgaacctctctttctttggggatagaaagaagaaagtctagaaaaaaattgaaaatcgctatct

SEQ ID NO: 8580 - DNA, 2300 bp, Homo sapien
agtctatggtttagcaataataaaaatggtaactgggtgagaatattagaaatgggcaggaacggatcttggacaagctcatgttctcttcccatcatcctttccagaaaggtagttggtaacttttcttacaagtctttggttcatctctgcactcataaaatagttaactattgttttaacattataatcatttgctttattttcctacataaagggagtggatgtccttaaaattttaatgactgattgacttattctcaattcaacatacatttgttgaatgttattgggaaaacatagtattaagtgttaggtaatgactaagattactttgtgcataattataagaaattaaagagataggtaatgaataaggttatattggcccatcatctattaaggaagattaaaatggacatgtaaatataactccagtgacaggagatagtactatgtgccatgataaaaatttgaacagagtacttcaggaatgtagtggaaggagagatttggggctgagcttggtggctcacgccctgttatccagtactttcagaggctgaggtgtgtggatcatttgagctcaggagtttgagaccagcctgggcaaccctgtcactataagaaatacaaaaattagctgggcatggtagtgtgcgcctatagtcccagctactctggagactgaagtgggaggatcgcttgagcctgggaggttgaggctgcggtgagctgtgattgccactgcacttcagcctagtaatagagcaagaccctgtttttgttgttgttgttgttgtttttatttttatttttttaagaaaaaaaaaaagcagactggagaatcaaggaaggctttttagaagtggttgagggtcaactgggtcctgaagttgggacttcattaggcagatatcaaggaaaggggcaattggggcatgagtattatatgttaagacatagaggcaggatgatgaatgatagtataagatgtctttagaactatactagcaggatgtttagtgcttggaaagaatgataataatggccaatatttacttaatgtttattatatgctaggtactcttctaagtgctttacaggcattaattatatttgttttcagaacacttttatgaagtagatactattacttcttcttacatgaaactgaaacaaaaggaagtaaataatttgcctaaaattacactattacttggtagtagatccaggcagtctgttccagaacagtattcttaatgactatactagcctggcctcttgttgaatttttggtgtgtcctttctgcagggattgccatcttttgcatgctactcacctactacatgtggatcaaggcagtaaagactggttccatctgttgggcagctaagtgtgcccttgcttatttctacatggtaactttttctacatgttttcaatttttaaagttctctaaatactgtatttcctatgggtacttattgtttgaccaactttcttttctggtaggttcccctaaatttttttcttttccagtatattttttctgttcatacttacgtatacatgtagacttccttaattgcttccacttgctcacatatccctaaatcctctgtgtgaccttacagtagattgcatttagattaattctgaggcttgagtccctctcgttatgtgatcatgacatcagcaaccacaagggagcaggggattgagttacagtgatgggtttgaacttgattttatattttcttttttaaaatttattttattttgtgtgacctgtacatgtaaggacttgattttcctgtttaaaaaaaaaaatcagttatttgaactctttaagccatttggcataaataaagttatagttactataagtgttctttaaagagtcacaggtgatatcctacaatatagtggtggtggtctgaggaggcatactcagaggaactgtttttttctattccatcataggtctcgtcatggggaggttatgtgttcctgatcaacttaattcctctccacgtcctcgtgctgatgctcacaggccgtttctctcaccggatctatgtggcctactgtactgtttactgcctgggcactatactttctatgcagatctcctttgtgggtttccaggtgagcccttgactgagtagggttttcagcttctactttttctatgcagccccaactagactgatttatcttagattctgttaagaagagtacgacttattcacagcctttatattgaactacttgtgttagttgaagcaacagaatt

SEQ ID NO: 8581 - DNA, 2300 bp, Homo sapien
tcaggctaaaaagactccatcagacacacaggaaatttgcaggtcttcctcttcgtattctttgttttcagcacacagtgaggaaacaagagaaaatgggataaatgatataaaaacttgcttttatttttataccaggccctgtggctcgcttctgtaatcccagtgacttgggatgctgaggtaggaggatcacttgagctcaggagttccaggctgcagtgagctaagactgcccaattgcactccagcctgggtgacagagcaacacaccctgtctccaaaaacaacaaactgtaaaaagattacatgaagcctaatctgtgatgtcatgattcaaaactatacacataagcattttaagagttttttccttgatttttgttcctgactttgcttctttaaaagaaatgtgtgtttttgttgttggttgtttgtttttgagacggagtcttgctctgttgcccaggctggagtgcagtggcacaatctctgctcactgcagcctctgcctcctgggtagctgggattacaggcactcgccatcgtgcccggctaatttttgtatttttagtagagacgggggtttcaccatgttggccaggctggtcttgaactgctgacctcaggtgatccatacgcctcagcttcccaaagtgttgggattacacgtgtgagccaccaggccccggccttgagtaacattttatacttgtttcactttactattatcataatagccagttatgcttagtgtttgtatgtggcccagtcttaaggactaagaaaatatatatgtatatatataaaatatatacatataaaaaaatatgtttttttcctacggaatcatgctgttgcccaggctggagtgcagtagtgctcactaacctctaactcctggactcaaacgattgttctgcttaggcctcccaagtagctagggctacagggacacaccaccaagcccgactaattcctaaatttttttatttgtagagatggggtctccctatgttccccaggctggtcctgaactcctggcctcaagccattctcctgcctcgccttcccaaagtgctggaattacaggcaggagccactgcgcccggccagtgctggagaatgtaatggagatgatcctgcctatccctgagttccagtctagtttactgtcagagaatacttatttccatttttcctattttgttcttgagtctctttcctcagaatttacttttccacttaaatgacgtacgcagcttttaaatttgcgttgtaagatttattttggctctccccgcctgttctttgcacattaaaaatgaaaaagtttgtagaactaagctaagcagatggtcttcctgcaaaaagaccgggctgaagtaaagcattgttttggagctggttcacagaaaaaaggcaaaactggttatcctgacttcaagctccaacataaactgctcgctttctccgggaaacttgccccgccacacacacttgactgcgtggccagttctttcgaagcctctcgctcccaacacggagttcctcccatttcttcacagtcggctctcagcagctgctgctggtttctcggctccagcaccacgagtaccgcactctgaggtttacaaagcactctgcttcaccgactgtgatcctcacagtcctgtccggtggcctcacgcaggtggcggtgcagcctttcaggcccagagcggccaggagcgaagcccgcagccccgcctggaagcgcagcgcggtcggtcgcgcgcccctgaggcttggaggcctgggcttcccccagcagcgctcgagcaccgcccagtcgagcctcacaccggatgccacttcatatttgggcccagagctcaattcgcgccgatgcggtccgccgtccttaaatctcttcagccaggatctctccccgactgcaaagcagccctgggcgggagcggcaacatctccacgtcacccttttggagccgccgacattcagaggggcaggacacgggaacgcgcgctgtcttgctttacggcgcgggtgcgcgagtttgcggcagcgtgacgccctcaagttttggcgggaaaagcgctgcatttggattcctgcagtggtgggcaaaggacagtccggtgaggaagggcggccggtagagtagggaaggtttctaaagaaggagttcggggtctagattagtgagggagggcatggtgggagaaagttagcattgactagcgcaggggattggagagactcctgcggaggggcggtttcggagggtggaggaatggta

SEQ ID NO: 8582 - DNA, 2300 bp, Homo sapien
ggctggagtgcagtggcacaatctctgctcactgcagcctctgcctcctgggtagctgggattacaggcactcgccatcgtgcccggctaatttttgtatttttagtagagacgggggtttcaccatgttggccaggctggtcttgaactgctgacctcaggtgatccatacgcctcagcttcccaaagtgttgggattacacgtgtgagccaccaggccccggccttgagtaacattttatacttgtttcactttactattatcataatagccagttatgcttagtgtttgtatgtggcccagtcttaaggactaagaaaatatatatgtatatatataaaatatatacatataaaaaaatatgtttttttcctacggaatcatgctgttgcccaggctggagtgcagtagtgctcactaacctctaactcctggactcaaacgattgttctgcttaggcctcccaagtagctagggctacagggacacaccaccaagcccgactaattcctaaatttttttatttgtagagatggggtctccctatgttccccaggctggtcctgaactcctggcctcaagccattctcctgcctcgccttcccaaagtgctggaattacaggcaggagccactgcgcccggccagtgctggagaatgtaatggagatgatcctgcctatccctgagttccagtctagtttactgtcagagaatacttatttccatttttcctattttgttcttgagtctctttcctcagaatttacttttccacttaaatgacgtacgcagcttttaaatttgcgttgtaagatttattttggctctccccgcctgttctttgcacattaaaaatgaaaaagtttgtagaactaagctaagcagatggtcttcctgcaaaaagaccgggctgaagtaaagcattgttttggagctggttcacagaaaaaaggcaaaactggttatcctgacttcaagctccaacataaactgctcgctttctccgggaaacttgccccgccacacacacttgactgcgtggccagttctttcgaagcctctcgctcccaacacggagttcctcccatttcttcacagtcggctctcagcagctgctgctggtttctcggctccagcaccacgagtaccgcactctgaggtttacaaagcactctgcttcaccgactgtgatcctcacagtcctgtccggtggcctcacgcaggtggcggtgcagcctttcaggcccagagcggccaggagcgaagcccgcagccccgcctggaagcgcagcgcggtcggtcgcgcgcccctgaggcttggaggcctgggcttcccccagcagcgctcgagcaccgcccagtcgagcctcacaccggatgccacttcatatttgggcccagagctcaattcgcgccgatgcggtccgccgtccttaaatctcttcagccaggatctctccccgactgcaaagcagccctgggcgggagcggcaacatctccacgtcacccttttggagccgccgacattcagaggggcaggacacgggaacgcgcgctgtcttgctttacggcgcgggtgcgcgagtttgcggcagcgtgacgccctcaagttttggcgggaaaagcgctgcatttggattcctgcagtggtgggcaaaggacagtccggtgaggaagggcggccggtagagtagggaaggtttctaaagaaggagttcggggtctagattagtgagggagggcatggtgggagaaagttagcattgactagcgcaggggattggagagactcctgcggaggggcggtttcggagggtggaggaatggtaccaggaggttcccgttgtgggggcgggggcaggagggactaacccgctgctagctaagaaccccaaggaagagtcccagcccttcctttcgcctctgggggcagtttggccccgccccggcctttgggacgggtggggctgtggatggggatgggaattggaattgagcaattgggaggaggcgctgccgcaggcgttttctgccccataccgctccctatatcctcttcctctcttccccagacccccacctctccctcctccttccccagtcgttcgccggaaagcatttgtctcccacctcttcataacaacaattaatttcctctggggcctgaggagggcagaatttcaaccttcggtgtgcttgggagtggcgattgtgatttacacgacaaaatggtcaggtttagaatagttgttcgtggttgaaagacttggataaatgtggatgagatagaaggggaa

SEQ ID NO: 8583 - DNA, 2300 bp, Homo sapien
aatttttttgtatttttagtagagatggggtttcaccatgttggccaggctggtcttgaactcctgacctcaggtgatctgctcgcctcagccttccaaagtgctaggatcacaggcacaagccactgtgtccagtcttattttatcttctttccccgttcattgctacaatccctcatttaggttattttgaagcaaatttacatagggaatttttaaaaacaattgttttcagctgaaagcatcagctctccagagcccactgtctgtctttctatgttctaagttagggtggaatagatagcacctcttcccttctactaatttccactgcttctatcaacaaaagtcagacccaaggctcatagctgttcttccaaactcatcctggaggaaaagaattattgatagcatgctctttcatacctttctctactgtaaaggaacctgcctgaggctcagaaatcctagctttatcctctaactcaagtcaagtaacttttgatccctggtgatcttgctgtcttcaactaacccagaaccttaatccagattctcttctatagattctcttacatgattctctataaattctcctctatgaggcagagagaggccccaaaaggtaactcattccttccttccttcaggaaaagcttaggcatgctgctaggtactgggactacaacaatagtcaagacagggtctctgcattcaagcttagagtccaacggggagtacaaacatgaaacaaataattataacagtgataaagtgttagtccaaactgcaccatttcgtaacccccaccgacccccgccattttgcagaccttggctaaagtgaagcattccacgggggtttgggcccttagaaacagcctgtccaactgcctccctgactttatcacactctgctgggaaaaagtccaaggaacatcagcatcacattctgcgggaacaagggccaaaatgcctcattatgggaacatcttcccaggcagcaagccatactgcccagacccgtcctgctcatacctacaagtaccccaacctgtacgaagcagtgggcactggcattaagctagtcccccacctctgtaggtcttatgctagacagaaagcctggatttgatgtagagccgccactctctctttctttaaccctcaccttcctttcaaaatgtaacaataagtacatctattctagatttagcattcagtggtatataaaacaaagttgttcaagagagctgagcagagaagcagcgagaaatggaagctaccagatctttgccactcaatcctccataagttctagttttatatcaggtggatgcctcactgcatccatcttctcagcttggccacccccttgctaccaagttgcagctcaaaacgcagctttctactgtctcttgatctctttactctgcccatatctgtgtaaactctcctcagttacccatttgagtttgccacctgtttcctgctaaaaccatgttgataaaggtctgtatgaaaagactatttacagaagtgggcaaggttaaggaaacaaacaaacaaaaaaagagataagtttgggcatccagattttagtaacagcaggaaaccattatcatccctaggcctaagagggcagggggagaaaaacatattaccatagcatggatgagagctggagccatggaagagaggacacccaacagaagctctgtcatgtagactcagccagtgtcaactgtggcaggaagggaataggaagaacaaatattccagtctcgctctctttctccccattcctcccttccctcttcctctctctctttctctcttctcccctccaatcctgtataaacccaatctgaagccaaatccagccagcattcaggtgataaagtcaacagaggtcaaccttccagggtacagatcagagccaagaaaggctgatttagaaagccaaacagaaaacaatcaacaattacatctcattgtcaaaaacacttttaaaagacagtagatatcttttaaactttattacaaaaaatatgtgctttttggtaatactttttttttttttttaaagatagggcagatagccccaacacactaccctgcacacagaaaataatcattggtcttcactagtgaaataagcagtgggttgctaagggccaacttgcctgaacaggctacacaagaacctcagagcccaacccattgtgaagaaacatgggttacttctgaggttctagaattcccagaagctctgcttcagcactggaagcttttgctcgc

SEQ ID NO: 8584 - DNA, 2300 bp, Homo sapien
tttatttcttttaaaattaataactgattggaaggtgaatttccattcaaaaatcatcatttttttatttgcaggataacattggagatgcaaactaaaagttctcagctataatctaaacatcttctaatcgtacacacagagacataactaagtacctcatcactctcagagatgaggtataagccagggcttactcttctggactaactgaatctccagaactctgtgttagagggaggggatcgtgaataaagggctttataaacttccatagggttcaaaacaatagggcgaaagggattcctgaatactttctgggcacaggtctggaatttatgacataagaagaatttggtggtggggggtcccttaaggcaaaaagtaaaaggattagagtcacaaagaaaaggagcagagtgaggctcagtaagaaaatcaggtattagggccacaaggctaggcagtattcatacatttgaggagatgttaggggtaagtcgataaaggagtttaaatataagcaaggaatacaggtggatcagtacaaatcattggctgggagaaggaaatttctgctgtaggggaagtggtataataatattatagaggtgtagttaggtaaggagacgtttccgacagggcagaggaagagaacatttcctcctttctcatgggtgccattaggcaaataattatggggttcctggaaggaaaggaggggagatctcaaaaggcaagagaaaggaatgtaaagatgcaagggaagatgctaaatttcagggaaatgagaggaaggaaaggaagacttctgtccgtgaatatgctcaacacaaaaatcgatgctgtcatgtgtgcgtgtgtgtgtgtgtgtgaatacgcatgtgcatatgtgtgcacaagtgtgtatgtagtacattaatacttcatggtgttattttaaaacttcatcagggtagtcagtgccaggtcaggagttagtatataactctcttcctctgtgcatggaaatgccagtttgatcttttggcatgtgataataacctccaaaatatcatggatgcaaaaatcttttttatacattactcttgctgtccccaaccacttcagccagcatcttgcttagaccaccatcccacttggctgtagacctgcattgtgccctgttgcaacctgcatccttccagttgctgctcttctcatatagagaagatgctcctagcaatacacgctttgccctaagcatgggcacaagctcttctgtcagttctctacaatgacaatgaagactaagctgcaacgttcattacaatgcactgaatgcatagcaataactgaaggaaattaacagaaaacttaaaatgagatactagatacggctgctcttagaatccacaggttcaataccctggcctgccatcaagtgagaaggatcagcttacctctctccagatgaagtagtcttaaatctctctctcccaactaaagtctaagttgcagccaccaggaagcctcaagaaaggaaaacagttccctcctcagcttacatcttctaccctagggtctgcttctttccaggatgattgacagtgagaaactttactctcctcatgggaaccctctgtctgcctctgagcctaacctttctgtgccctctcttctccattcctagaggtatgtattttttaagtctgcgttcagccttccttttgcctttctgcattccaatgatttatacttatgtattctctcagctttaatgaatgtcttgttgtagatgactctcaattctacccatccagcccagctttatccttgcattctcttacagtacagtatagtgaaaagaccatagaacctggcatcaaaaatcctgagtggtagaactggaataaatcagactcaggattgacctggccattacctctccccaccaagttgcaaggaagagaaataacagagtcattgatttccctaggagcaggttatgccttccaagaacttccacagagtccccacccctaacccttcgcaggaaagcccaaccttgcaggtgtataaataggcactctcgaagcttcgtgctgtagcctggccctccctctttccaaaatggacaagtccctcttgctggaactccccatcctgctctgctgctttaggggtgagtccctagggttgacagctggtaagagtcctgaatttaggaacaggtgagagcacccatgacagaggccttctcatgggagtcctatggcaactgaagcatgatgagcttctgttctaatgttatgccttct

SEQ ID NO: 8585 - DNA, 2300 bp, Homo sapien
gattaagaaactcactcaaaaccactcaactacaaggaaactgaacaagctgctcctgaatgactactgggtacataacgaaatgaaggcagaaataaagatgttctttgaaatgaatgagaacaaagacacaacataccagaatctctgggacacatttaaagcagtgtgtagagggaaatttatagcactaaatgcccacaagagaaagcaggaaagatataaaattgacgagctattgtctaattttattccttactgatatattaagttacagccccatcagcaatgtatgacagtgctcattttactccatcttgccaacacagttgtgttactaaattctgattattgcaaatctgttaagtaaaactaatatcctaaaattaggagcaaggttcaccatatttcatgtgtttaagaagcatttctgtttcttttttctgtgaactatgacattattattgactgcgtctctcccctttgaattgttaatcttttaaaaatcaatttctggaatatctttgtataatagggagattcgcccttagtctgagatatgagttgcaaatatttttaatggtttatttgttatttggtctttgcttatggattaatgattggttttccatctatgtagaagattttttaaaaatatagataaacatatcttttttatggttctgttttttgagccatatatagaaaagtaaccctcacactagactatagaaactccttccattttattttctggcacttcactgttcatttataccctccaggtgggcagcaagtccaggatattaaacacggtttcattgattttctttgtaaatctgcctaagtagcatagcatttcactttgaaatgtgaaacacttgctacctactatcttgggacccttgctggaatgtagaaagtctcatttcttgtctttattatagttcaaaaaaccagtctgataaagctggatgctctgtggagaatggactggagggatgcaaggcaggatatgggaagaacattattaattcctcccacaaatatttgttgggcatttcctttgttcccagcctctagatgccaagtgtgccatgataaaccaaagaaaccccttgctttgttctagtggaggagtaaaaaagtgagccaatagcaatgtaagatcagcttattagaattgcaatgaaacataccacagggaaaaaggtaggaaatgaaggctgtcattttctagagattaagcagaaaatgctgctctgtctgagggagtgacatttgagcaaagacctgagtgagccagggaaatgtggagagaaaggagattggaggggaggccattgctcataatgacaaagccattgccggctatgataaaaactctggattttctttcaaaggtaataaaaagtcgtcagagtgttttcagcaggggtgtggcatctatgacttgttctctgactgctttatgaagaaatgattatgaaggggcagaggagaagcatggaggccagaaataaggccattgcttggtccaggcaagacataatagactggattatggtaatggcagtggcgacagagaataataaacccatgtgagaagttagtaggtagaatggataagacttgctgttagattgctcaatgaggatgaaacacaagaagatgtaaagaacacctcccagatgtattaaaacctgcaacattgtgaggagagactgggcaggactgaataactgttgggtgctatgttcactacctgggtgacgggatcattcgtaccccaaacctcagcatcaagccatatacccctgtaacaaccctgcacatgtaccccctgaatctaaaatgaaagttgaaaatactttttaaaactctgcaatattgaagtaggagcaggtctggtgaatcaggaacattaccatttcattttcattagaggatttgcacaaaatcaaagtgagtaccctctttagaatgctgtgcagcaatcagatatggtggtttggcttggaacattgccatactgcctgtccctgaaattttatgattatataatttagatgactagcccaaggacagatcacaagagaacaacttgctccttccacaggaagctgcacctgacagaagctccaggatgcttgttctctttctcctgggcacagtctttctgctctgcccatattggggtaagtcctggagacagaggggaagctggtggttggttaagagacggacagatgctgggggaagagaaagttttcaaaattggctcttggggcagtggcaga

SEQ ID NO: 8586 - DNA, 2300 bp, Homo sapien
tttcagagcaatggcccaagctgtaccagagcccctttgagatgaagctggagctggagtggccaggatgtgaaagcagtgtcccaaggctgcacagggcagaagggccctgggcctggcccctgaaaacattctttcctcctaggcctctgagcttgtgataagaggggctgccttgaagatttctgaaatgtcttcatggcctttttcccattgtcttggatattattagccgagagctgttatccaataatatattattacataataatagctattattggataacagctcttggctcccttttagtcatgcaaatatatctagcaagtagttcctccataggccactggaattcctctcctgaaaacattcattccttctctgccacataagaattttccaaatttttatgctctacttatcatttttttgttttgttttgttttgttttttgacagagtctcactctgtcaccaggctggagtgcagtggtgtgatctcagctcactgcaacctccaactcctgggttcaagtgattatcctgcctcagcctcccgagtagctgggactacaggtgtgcaccacacccagctaatttttgtatttttagtagagatggggtttcactatgttggccagaatggtctcaatctcttgacctcatgatccgccctccttggcctcccaaagtgctgggattacaggcttgagccactgtgcccagcctctacttatcttttaaatgtaagttccaactttaagttatttctttcctcccatacataattgtgggctgttagaagcagccatatcacatcctgaacactgtactgcttagaaatgtcttctgccagataccctaggtcatcattcttaagttcagtcttccacaaattcccaggccgtggacacaatgcagccaagctctttgctaaggcatagcaatggtgacctttgctccagttccaaagagcttcctcatttttatctgagaactcctcagcctggcctttgctatccatatttctatcagtattttggtcacaaccacgtaacaagtttctaagaaattccaacattcccccattttcctgtcttctaagccctctaaattcttccaacctctgcccattacccagttcccaagcttcttcaacattttcaggtatctttatagcaacaccccacttctcagtatcgattttctgttagtgcatttttgcatcgctataaagatataccagagactaggtaatttgtaaagaagagagatttaattagctcacagttctgcaggctgtacaggaggcatggtgctggcatctgctcctggtgagggcctcagggagcttgcaatcatggtggaaggcaaaaaaggagttggtgtattacatggcaagaatgagagcaagagagagaagggaacaacagagagaagggaaggggaggttccacactcttttaaacaaccagctctcgcttgaactaccagagcaagaactcactcattacaatgaggatggcaccaagcaattcatgagggatctgcccccatgactcaaacagctcccaccatgccccacctccaactttatggattacatttcaacatgagatttggaggggacaatcaaaccgtaacaatcacacacacacacacacgcagacacatagagaaaaaagggtgagtagcgactgtagtcccagctacactggaggttgaagcaggaggatcgtgtaaaccaaaaagtttgaggctgcaatgagcccctgcactccagcctgggcaacagagtgagaccctgtctcttaaaaaaaaaaagtgaggagaagacagatatggggcagggaaggcagagggaggatggagagtcaggggtggaaatctaattcaactttagccagaagcattccctgacactgctcaccagcctgcactttccacattagtacagatttatggctccttaagagaagggagtggggaaaggacggttctgcctcatgcctttatcagggactcctccctcctttctatttactggctgtgatcgaacatctaagctttataaagcaagctagtggctgccctttccaatacctcactcagcacaccgtctgtcacccaaacaagcatccaatgaggaaaatgaacacactgctccttgtgagcttatcttttctctacctcaaagagggtaagtttgaacaatgggggtggagggaggcaacttaggggtgctgttctctaaacctctactctccaagtctcactcacatgctccagctgagaccc

SEQ ID NO: 8587 - DNA, 2300 bp, Homo sapien
ctaagctccatgctcagtcctcattcttttttacttcttaaaagtaggctaagtaacttgtccttatcacaaaccagggagtagaggaggcagaatttgtgcctagataatatgataccataatatgagcttatattctacctacttttatctccacctggaagtccccagggtatctcaaattctacatgcccaaaatctaactctgcctctcaaaacagttttcttcctgtattccctatctcagaaaacagaatccagctgcacaaacaggaatcctatgaataatccatgacctgcctctctttcacatcccaaccccagtcaatccatttcaagtcatcatgagttctagcaactaactatctctatccccttcttgaaatctctggctattatcctcctagcctaaaccaccacagtcttccacctggaataatccaactatctcccacttggacttcacatacaatcttctcctcttcaaatccattctcctcagtgctgccaacagataatttcaaatgcaaaactgaatatgtagcccttatctgactaattagccatgccccaaccctgcttaaaacacttcagtttctatagctcttatcaaatctcttgccttggcctacaggacctgcatgatttgacccctgcctatctctcagtctcatctctaccattattttctttgctggtctttctgtttcttgactcttccattcttatagacctttgagtatgcttttcccactacctagcaaactcctttcaccctcttcacttccctccacgtcctttcacctacttatccttcaattcttggttcagtgacactatgccaaatctccctattattaaatgttctcattgaaccatttgcctttccttagcattgaacacaactgtaattttataatacagttgcctcttgaacaacacaagtttgaacttcacaggttcacttatacgtgaatttttttcaacaaaaggcaatggaaaatgcagtatttgagagatatgaaacctgggtatacagagggccaaccttttcatataagtgggttctgtaggtctaactttaggacttaagtatgcatggatttttggtatatgcaggggccctgaaaccaatacccagattatactgagggacaactgtaatttgtgattgtttcatcaatgtcaatttctcctatcagaccaaaagctccataagggcagaaattgtgtctttttattcactatcaaatcacgaagacatagcacagcacttacaacaggtgttcattaaatatttgcagaattgattatcaaatacttttttaaattttttatttattattttatttatttatttttttttggagacagagtcttgctctgtcgcccaggctggaccgcagtggcgccatctcctcggctcactgcaagctccacctcccaggttcacgccattctactgcctcagcctcccgagtaggtgggactacaggtgctggccaccatgcctggctaattttttgtagttttagtagagacggggtttcaccgtgttagccaggatggtctcgatctcctgacctcatgatccgcccacctcagccttccaaagtgctgggattacaggcgtgagccaatgcgccccgcctttttatcaaatacttttaagaagtaaaaaagaatgagggctgagcaagacgattggagctgactaccaagatcactggtgacctttgaaagtacagtttgaatatactgatgagggtagaatccagaatgcagggacttaaggagcaactgagcaaacaaaatagggaagagagaatggacaaaaaggctgacagaagggagcagcagtctcaagggaaagctggttattttcattttgttattctttatgccattattgttctgcctccaatactgagaagacttaaacagagaagaattgaaaatattagcgacaggatgtaattagtcagacaagggaggactatagttgaaaagtttgtctgaaaatgtcaacaaagaggtgaggtaagcaaagatatcataaaggagtggttaacttggccgggcgtggtggctcacgcctgtaatcctcacattttgggagggaggccaaggcgggcagatcacctgaggttaggagttcaagatcagcctggccaacatggcgaaaccctgtctctattaaaaataccaaaattagctgggcatggtggcacgcgcctgtaataccagctactcaggaggctgaggcaggagagtcacttgaacccgggaggcggaggctg

SEQ ID NO: 8588 - DNA, 2300 bp, Homo sapien
gttcagtagatttctgggaaccacaagcattattaaatcagatctaagaaaaattggaggactaagcaatccacaaaaaaaccagggttgggtagaacacaagataccacttgcaatatgaaatattcaggagtagatccttcaagctgctatgtattaaacgttttcaaagatcaaaatttaataaaaaggataacagaaactaattggggctgcacacagtggctcacgctggaaatcccagcactttgggaggtggaggctggcggatcgcttgaggtcagagttcaagactagcctggccaatatgatgaaaccctgtctctactaaaaatacaaaaattagctgggtgtggtggcacacgcctgtagtcccagctactcaggagactgaggcatgaaaatcatttgaacctgggaggtggaggttgcagtgagccaagatcgtgccactgcaccccagcctgggctacagagagagactctgtctcaaaaaaaattaaaaaaaaaagaaaaagaaacgaactgggggatccataaggagaatgctgatgttcaaagctggaagaaaaatgattccatctactctttggtttctaagacagattggagattcaaagccaaagaaaaagtcatgctggcataagataaaacctgagcatattaaatttgctcctatggaaagaaaagaatatatgcactaaaacaaaggtccccaacccccaggccacggacaggcacctaggaaccaggccgcaaggcagggggtaagccgtaggagcttcatctgtttctacagccactccccatctggcattactgcctgagctctgccttccgtcgcatgaacaggggtgttagagtctcacaagagcgtgaaccctattgtgaactgcgcaagccagggatctaggttgcatgctccttatgagaatctaatgcctgatgatctgtcactgtctcccatcacccccagatgggaccatctagttgcagaaaaacaagctcagggctcccactgattctacattacagtgagttgcataattatttcattatatgttacaatataataatagaaataaagtgcacaataaatgtaatgcgcttgaatcatcccaaaaccataccccctctctgagccatggaaaaattgtcttccatgaaacctgtctctagtgccaaaaaggttgggaccgctgcactaaaggagtgttatgatattgcagatgtaggggcagtcactcaaatctccacaacctacttctgtcatcttccctcctttgttctttccattttcttcctcccacaaattcaaagtgccttagaggtagcacaaaggccctgaggcaaagagggagagtaagagataatacgaagtgtttggaggaaaaggattaaacatttctcccctcccactgaatcctggatttaagaaatggtgtaagatgaacttgacaactagcacctatttgtttaaggtggaaaatgcaatgctcaggactcaagaccagttgagataggtttgcttggtattgactaggatattgaaccctgagggcctctcctcttgcttttacagatctcatcctcagcaatccccaagcactagatttttttttttttttttttttttttttttacaggtacagatgcaaaaagagttaaaacatcgggtttaaaaaaaaaattagtggctgggcacagaggctcacaactgtaatcccagagctttgggaggccgagggggtagaatcacctgactaacatggtgaaaccccatctctactaaaaatacaaaattagccgggcatggtggtgctcgcccgtaatcccagctgctcgggaggctgaggcaggagaatcgcttgaacctgggaggcagaggttacagagagctgagatcgcgccactactctccagcctgggcaactgggcaacaagagggaaactccgtctcaaaaaaaaaaaaaaaaaaaagttgagagtaacaccatgtgaaggagacaggcacattccaaaagaaaacaagtgcatgtcggagcaaggcagtcggtggctggagcacagttagagtaacgtgggaggagctgtggagacgcagccacgggtcacgccagggccctgcacaccatgcagaggaaaggaagagctcagtgcgccagggtttcatacagccgctctctcaggccccaaggaaacgtctagagcgcacaggcggactcaccccagactgttcgaaccgtccctgagcgcccgccctcgtctcccggcaccactggccccgcagcagccagttg

SEQ ID NO: 8589 - DNA, 2300 bp, Homo sapien
atattaaatttgctcctatggaaagaaaagaatatatgcactaaaacaaaggtccccaacccccaggccacggacaggcacctaggaaccaggccgcaaggcagggggtaagccgtaggagcttcatctgtttctacagccactccccatctggcattactgcctgagctctgccttccgtcgcatgaacaggggtgttagagtctcacaagagcgtgaaccctattgtgaactgcgcaagccagggatctaggttgcatgctccttatgagaatctaatgcctgatgatctgtcactgtctcccatcacccccagatgggaccatctagttgcagaaaaacaagctcagggctcccactgattctacattacagtgagttgcataattatttcattatatgttacaatataataatagaaataaagtgcacaataaatgtaatgcgcttgaatcatcccaaaaccataccccctctctgagccatggaaaaattgtcttccatgaaacctgtctctagtgccaaaaaggttgggaccgctgcactaaaggagtgttatgatattgcagatgtaggggcagtcactcaaatctccacaacctacttctgtcatcttccctcctttgttctttccattttcttcctcccacaaattcaaagtgccttagaggtagcacaaaggccctgaggcaaagagggagagtaagagataatacgaagtgtttggaggaaaaggattaaacatttctcccctcccactgaatcctggatttaagaaatggtgtaagatgaacttgacaactagcacctatttgtttaaggtggaaaatgcaatgctcaggactcaagaccagttgagataggtttgcttggtattgactaggatattgaaccctgagggcctctcctcttgcttttacagatctcatcctcagcaatccccaagcactagatttttttttttttttttttttttttttttacaggtacagatgcaaaaagagttaaaacatcgggtttaaaaaaaaaattagtggctgggcacagaggctcacaactgtaatcccagagctttgggaggccgagggggtagaatcacctgactaacatggtgaaaccccatctctactaaaaatacaaaattagccgggcatggtggtgctcgcccgtaatcccagctgctcgggaggctgaggcaggagaatcgcttgaacctgggaggcagaggttacagagagctgagatcgcgccactactctccagcctgggcaactgggcaacaagagggaaactccgtctcaaaaaaaaaaaaaaaaaaaagttgagagtaacaccatgtgaaggagacaggcacattccaaaagaaaacaagtgcatgtcggagcaaggcagtcggtggctggagcacagttagagtaacgtgggaggagctgtggagacgcagccacgggtcacgccagggccctgcacaccatgcagaggaaaggaagagctcagtgcgccagggtttcatacagccgctctctcaggccccaaggaaacgtctagagcgcacaggcggactcaccccagactgttcgaaccgtccctgagcgcccgccctcgtctcccggcaccactggccccgcagcagccagttgagaagggcggaggctgattccaatgaagtggcagaccgttaggcggcctctccaaaaagccagctatgtcgccgttagccaaggtttgagggtcttctccttctcttcgagggcccaacctcccctccagatttagtacaccagaggcgtcgcagcaacggctgctgcctgcgcgcctcagctaggcgggctcggatatttttaaggccacattggaaatcccgggcatgctcccgccggcggagaaggcccagacaaaatgtgcgccaatcaggatacagacttggaggacgtttaccctcaggaccaataagagggagggcggaccgggccaagggtgccggttcgctctccggatttaaacctcagcggtcggcggttaaccgcaggctcggcgcgtgggccggcagtgcgcctgcgcaagttacgcgaaagctaacagaatctgcggtgctctgctggcgactggcaggacgcggtgcagagagcggacttccgcgacgcgggtaagccgggcgaaggccggaagcggagggacgcggggacctggtggctgccggcccactgcggcgggagccctcgctccttttcccaccgtcgggacggtgcagagtggcagcttccctccgtggattccaggtcctgcctggcgagccgtcc

SEQ ID NO: 8590 - DNA, 2300 bp, Homo sapien
tttgtttgaaatgcttggtctttgcccatttgactctcaggttgctggattttttttttttttactttttcattaaaactgatgtatatattcatgaaatatatattgaggaaggtcgcactttaccatcacttatttttttcttctcagtttgtcatttgccttttattttttgctggcagaagtttttccttttaggtcacatctttttctagtgtctgggtttctagactgttttgcttagaaatgcctttcctactccagaatttcagaaaaaagtcattccatgttttcttctagtactttcagtttcattttttacaatttaaacttttaatctattatagatacagaaactcatagtaaaaaactaagctacctatacttagataacatggccttagaacagatgtggagatggtcttctctaactaaagtaaccatcagtcacagattgtctaggaccatcccaattttaaggatgtagtacagttgtcctcagattattgaaatattacaggaatttctacactgacatctacattacatcagactgactttttaaactattagaggcacagaaatcttttatcaaaatatgcatttaattcagctttagaaaggggtcagagtgcttaattatctttttttctcccatcaaaattgcttaaagtgagaaaatcttgtctctagcttctacttccaatgtgaaatacaaccatcggtaagcttcttcagttaggctagcttctattgcaccacctaatattcatctaatgaatattagatgatggagcatacaagtcatttatttgagataatggaaagcaatagaaactcagagcagataaaagtagcccatataaagaaatcttatgactagcaaattgaacaaatacagtgagaaatcaaatggaaatgttttagagaaaaaaatctgtaacatcagtcctcaatcaattcagtgaagatagagaaatgaaatctatagacattctccctgaattttgactgctttaatgaaaccttaataatgacaactgaataacaaacagttctttccctctgtgaactggccagacaggatggaaaagaatgctatctgtggatgatcaacccacaataaagctaatgcttgtattcctggaaaagcaaaagtatattctttgggcattaaattaaatcttatataccattagaacatcatcaaaggaactagcattgaaactgttgtatccctttgctctcttttcagacagggcagacctgtatggttcgtttattcctggggttgtcatatcatggcttataatgacacagacagaaaccagactgagaagctcctaaaaagagtacgagaactggagcaagaggtgcaaagacttaaaaaggaacaggccaaaaataaggaggactcaaacattagagaaaattcagcaggagctggaaaaactaagcgtgcatttgatttcagtgctcatggccgaagacacgtagccctaagaatagcctatatgggctggggataccagggctttgctagtcaggaaaacacaaataataccattgaagagaaactgtttgaagctctaaccaagactcgactagtagaaagcagacagacatccaactatcaccgatgtgggagaacagataaaggagttagtgcctttggacaggtaagggccaatacactgtttctcaaagcaagcaatactaggatattctaggtatacacactgagtactgagattatttgtgtctctaaaacccagtatctttgtctaactccacaggtgatctcacttgaccttcgctctcagtttccaaggggcagggattccgaggactttaatgtaaaagaggaggctaatgctgctgctgaagagatccgttatacccacattctcaatcgggtactccctccagacatccgtatattggcctgggcccctgtagaaccaagcttcagtgctaggttcagctgccttgagcggacttaccgctattttttccctcgtgctgatttagatattgtaaccatggattatgcagctcagaagtatgttggcacccatgatttcaggaacttgtgtaaaatggatgtagccaacggtgtgattaattttcagaggactattctatctgctcaagtacagctagtgggccagagcccaggtgaggggagatggcaagaacctttccagttatgtcagtttgaagtgactggccaggcattcctttatcatcaagtccgatgtatgatggctatcctctttctgattggccaaggaatggag

SEQ ID NO: 8591 - DNA, 2300 bp, Homo sapien
tttttgtaggaattatgcatcatttggaagggtattcctactccagtagaaattcaaactagtaacatctggaatcagatgcaaacataaataccaatatgaacctagcctgtttgggtgcagatcaaaataggaattctgctcaccttaaattgtaatttatctgttcttgatatttctgacccaacggggaccatctaaaatctgaaagttgtcagttttaacaccagaggccagaagaatgatagtacagtttgcttgttcacagagaaaaagttctaacataaaggtgaatgaccttgaccgttactatctgcgaaaatcattttccctgtaacatttaaagccacataattcacacattcacccagttctatttgttaggcatttgtctggaaaagaagtaatcaatgactcaggtacatgtaggatatactcaccgcaaaaaagtagaaactgcaaactgtccaccaacagtggaatagtaaatgtctttaaagacattagaatattaaatagtcattgggaatcttgggaaagtaatatgggaaggtgaaattaagtgacatgaatgtatcataaactatacaggatgatctcagtacacacagggaaagatcaaaacctaacgagtagtgggattaaaggtaatttgtatttatacctcgactttttatgaggtcaaaaattacatggtgattttaacatgcaaaacactccagtgattatttggatctcaaagtccaacattaccaaagtctccaaagttcaactcccgtgctaactaaagaactaggccagggagtgagtctagttggtcataaggcagatttgtggcaaaaacaggacttggtacactacagtgctttttccagcacaccttaccctaattcagggtgaagtgcaggagttcccaagcagacgtttaaagtaacaccctggccagggctgcgaagtaaccacagagagggaattcgtgtgtcccctaagcaccaattacaaactaaaacggccatcaccagatgttccatacattgggccaggcgccgtggctcacgcctgtcatcccaacattttgagaggccaagacggggtggtggcgggggggagggggggtcgctcgaagtcaggagttcgagaccaacctgggcaacacagcgagaccgtgtgttaattaaaaaattaaaaactaggctgccaagatggcgcacgcctgcagtcccagctagttggaggctgaggtggaaggatcgcttgagcccaggaggtagaggctgcagtgagcagtgatcacgccacttcactcagcctgggcgacagtcttaaaaaaaaaaaaaaaaaagtcctaatctcaggaaccagtgggttaacacataaatagcattcctcttgataaactttatattaatccaaagggaagaagagggagtactgtccaaaggattagcagacacgcactatgatcactagaaagcaatcgtggtctgtatgtaaggcaatccccaaaataatttgaaaattgctgccacagcctcccacatactcctgggttctcaacttctactgttttatgagcacccaattctaagtggggcagcagagcacttttgtactccacagtacaagtaccactgaagctcccgtcacaacggaattaaagacgaccctactgcggcgagtttccaccgagagctccagaaagtaccaggcacaaaagaaaaatacatggtcttaagcgaggtctcatttccatacggcaatgctttcctgaaaagaccaaagtatgtgaaagagggcaaaaagaagacaacagacaaccgttcagcagtgtgtccatttgtcccttcccctgtggaacccagaaagtaacccactccaaaaatcccacacttactttccggcagccggccgcgccgcgtttccgagaaaggaagctgtcactgtgcgtcttctgcgcaggcgcccgagccctcatgggaggtgtagtccaagtttgtgggaaatgtagttctgagaaccgagcttggtgctagaatctacctgaggttttctagtccagctaccgtttctccgcccacagggcagaatctgggcctgtggcgggacagcaataaaaggaggaattgtagtgctacgctaaaataatagaaaaaaggtaatttttcaaattctgctatccttatacgaaaactaaaagattgaagatcttggctcgattttatacctagttaaatgagaagaaagttaccattgagagacaaaaacatttactattagaattcaaattaaaagctgaaatg

SEQ ID NO: 8592 - DNA, 2300 bp, Homo sapien
aacattttgagaggccaagacggggtggtggcgggggggagggggggtcgctcgaagtcaggagttcgagaccaacctgggcaacacagcgagaccgtgtgttaattaaaaaattaaaaactaggctgccaagatggcgcacgcctgcagtcccagctagttggaggctgaggtggaaggatcgcttgagcccaggaggtagaggctgcagtgagcagtgatcacgccacttcactcagcctgggcgacagtcttaaaaaaaaaaaaaaaaaagtcctaatctcaggaaccagtgggttaacacataaatagcattcctcttgataaactttatattaatccaaagggaagaagagggagtactgtccaaaggattagcagacacgcactatgatcactagaaagcaatcgtggtctgtatgtaaggcaatccccaaaataatttgaaaattgctgccacagcctcccacatactcctgggttctcaacttctactgttttatgagcacccaattctaagtggggcagcagagcacttttgtactccacagtacaagtaccactgaagctcccgtcacaacggaattaaagacgaccctactgcggcgagtttccaccgagagctccagaaagtaccaggcacaaaagaaaaatacatggtcttaagcgaggtctcatttccatacggcaatgctttcctgaaaagaccaaagtatgtgaaagagggcaaaaagaagacaacagacaaccgttcagcagtgtgtccatttgtcccttcccctgtggaacccagaaagtaacccactccaaaaatcccacacttactttccggcagccggccgcgccgcgtttccgagaaaggaagctgtcactgtgcgtcttctgcgcaggcgcccgagccctcatgggaggtgtagtccaagtttgtgggaaatgtagttctgagaaccgagcttggtgctagaatctacctgaggttttctagtccagctaccgtttctccgcccacagggcagaatctgggcctgtggcgggacagcaataaaaggaggaattgtagtgctacgctaaaataatagaaaaaaggtaatttttcaaattctgctatccttatacgaaaactaaaagattgaagatcttggctcgattttatacctagttaaatgagaagaaagttaccattgagagacaaaaacatttactattagaattcaaattaaaagctgaaatgaatatgataatctcaaaacaaacgactaggtgccctgagagtgaccgaacagagcggggagcgttgcttcagcaccacggagagatcatgactgcagtttcgtgtgggtttttgtatttttgcccccaattccagaaatgctgatcaaaatctcaaaattacaattagaaaactggggggcgggggggaggtggaatttggttctttcgtccaaattgagcggtcattaaatcattagtaccagggatccagggatctataccggattatgcaaacgcatgtaggacgtagaggttataccgaaaggtaatgtttttaacaagagaccacatttcagaataaaagctttaaaaagcctatgtggaacatcacaggtatctagggcaggaacagcagttagagcttgaacagttctgcttcctttccgcaactgtggcattcgaggtcattcgtcatatcaaattcatcagattttgtctccactttgctaaccaattcgctaacctttctgacatcttgtgatgtggaggcggaaatttccagggaaaccgacacggggcgtaaagcgcggcggggagtccggggggctcccgcctggagggctgtgtgagcggcgggccgcggggcggcgcggggggcgctctccactctgcggaagctgccccctctgccctccggtccgcgccctttcgccccgctctctgccctccgccccgctctctgccctccgccccgctctctgccccccgccccgctctctgccctccgccccttccgcgcgccacccagccttccagcgcctgcgcgccgcaccgcggtggtcgcgggcgcggacgcggacgcctgccccctaaggaagcccattggccagcggatggggccagcaccgcctcgcgccggtggtggaagcacgtgctgggggcgggagcagcaatcgcagccatggcgtcgttactgtggggaggcgacgcaggggcggcggagagcgagcggctgaacagccacgtaaccgccaccgagccggggggccacagccgcgggggtggagctcccactcgcagagggagat

SEQ ID NO: 8593 - DNA, 2300 bp, Homo sapien
aggtcgctctgctttgccctaacagcactcacctatgtttcggactgcagtactcttaataccccaaaggttcttccggggttggctgaggtttgaaaactattgagagacacaaatttcaaccaatattaggatgcaagccctcaagcagcccagtgcttccctaccacaggggctgggagggattcagggaaggacacccgggtattgcttcctttgcaatattaggtagcagcagattcctttcaaggttgggtttcctgtatgagttaccctaaaattggagattttctgtattccctgtacatgcagtttctctttcctaggcctctagtttagagttgggcagtacttggggctcacggcaccaacaaggggagggtggctaggaaagtgcgctggcaaatggatggaagcgaggtgaggcttaatgggcaaatgggcagagtagaaaactcggggtctagctgggactaccagctgcgttcccaccctggatttccaggggtcgtcatttttgccctttctaaccaaaggtcttgcctctcgtgggggtggggacggggtctccctctgtggccctcttccaaacccttcccgcatctcccctccagcatctgacgccccacttcgaacgctcgcgggctctccctcccctcccagccgatctccctctgcgagtgggagctccacccccgcggctgtggccccccggctcggtggcggttacgtggctgttcagccgctcgctctccgccgcccctgcgtcgcctccccacagtaacgacgccatggctgcgattgctgctcccgcccccagcacgtgcttccaccaccggcgcgaggcggtgctggccccatccgctggccaatgggcttccttagggggcaggcgtccgcgtccgcgcccgcgaccaccgcggtgcggcgcgcaggcgctggaaggctgggtggcgcgcggaaggggcggagggcagagagcggggcggggggcagagagcggggcggagggcagagagcggggcggagggcagagagcggggcgaaagggcgcggaccggagggcagagggggcagcttccgcagagtggagagcgccccccgcgccgccccgcggcccgccgctcacacagccctccaggcgggagccccccggactccccgccgcgctttacgccccgtgtcggtttccctggaaatttccgcctccacatcacaagatgtcagaaaggttagcgaattggttagcaaagtggagacaaaatctgatgaatttgatatgacgaatgacctcgaatgccacagttgcggaaaggaagcagaactgttcaagctctaactgctgttcctgccctagatacctgtgatgttccacataggctttttaaagcttttattctgaaatgtggtctcttgttaaaaacattacctttcggtataacctctacgtcctacatgcgtttgcataatccggtatagatccctggatccctggtactaatgatttaatgaccgctcaatttggacgaaagaaccaaattccacctcccccccgccccccagttttctaattgtaattttgagattttgatcagcatttctggaattgggggcaaaaatacaaaaacccacacgaaactgcagtcatgatctctccgtggtgctgaagcaacgctccccgctctgttcggtcactctcagggcacctagtcgtttgttttgagattatcatattcatttcagcttttaatttgaattctaatagtaaatgtttttgtctctcaatggtaactttcttctcatttaactaggtataaaatcgagccaagatcttcaatcttttagttttcgtataaggatagcagaatttgaaaaattaccttttttctattattttagcgtagcactacaattcctccttttattgctgtcccgccacaggcccagattctgccctgtgggcggagaaacggtagctggactagaaaacctcaggtagattctagcaccaagctcggttctcagaactacatttcccacaaacttggactacacctcccatgagggctcgggcgcctgcgcagaagacgcacagtgacagcttcctttctcggaaacgcggcgcggccggctgccggaaagtaagtgtgggatttttggagtgggttactttctgggttccacaggggaagggacaaatggacacactgctgaacggttgtctgttgtcttctttttgccctctttcacatactttggtcttttcaggaaagcattgccgtatggaaatgagacctcgc

SEQ ID NO: 8594 - DNA, 2300 bp, Homo sapien
tgcttccaagagcccctcagtctcaggcacatgggaagcattggtcccctacctctcttctgccccaccttggcccaacccaggagtccctccaggaagtgcccacagcccagggtgctcacctccacacataagccctgagcaccctggactgtgcccatggcccctggactctgagctctaagagggcctagccttggggtggacacgggccagtgcatactacatgcccctaggatggatgcatacattcagagatgagcatgtgcgtgaatgaaggaatgaagctggggaggtgtaactggccttccttgctctccagatggtcctgacaagcctgtgatcaccatggagccgctgggactcactgaggagggcttctgggccagtgagagggaagaggtgaccctgagctgtctggctgcctccaacccacctagtcactatgtgtggctccgtgaccacacgcaagtccacacggggcctacctatgtcatcgccagagctggccgtgtccacacaggcctgtacacctgcctggcccgcaacagctacctggacacccgcacccagactactgtccagctcaccatctactgtgagtgtgggggtcgggtgacgcccagacctgtcctggggacaactcacgctggagcctttgtggggctgttctggggcagaccccgccgtcccgtggagaggcgtgtgccaaagctgctcttgttggagggaggtctccaaccaagtggagttggaggcagggaaagaggagaagaaaactgtgggaaggggaaggggaaggggaagggagggggaagctactgacactacatagcaccccgccgctaagtgattattcccatggccctgcggactgaactgaggcacagagaagggcgatggcagtgaggcaaggtgtgctggctcctgggtgcccagggacagagacgagaatgggagatagggccctccatggggcctctgggattccttggggactccaaactcctgtacactcggtaacctcctgcccctgacctgagagctcagcctgttcctcaccagcccctcagagagactcaatctttcccctaacccacttctccctgctcccctacccactgacacccctggcctccagactcccctgcctgggcctgggggctgcagggcactggcagtggagcctgctccagcctcacccacttccccatccagatccccctgagggacagccctcctgtgcagtgcatcccagccctgaggctgtgaccctgctctgtgcctggcctggggggcttccgcctgcccaactgcagtgggaagggcctcagggacctggccctactgcccccagcaacgtcacctggagtcacgcagccgcccagctccccagtggcagcgtcttcacctgcactggccagcacccagccctggcaccgcctgccctctgcacagtcatgctctgtgagtggacacaggaaaccccagggctctgacattccaggcagagtgtgggtagaggtcagggtagaggcggggggcctgggatctgggtggctctccagaccgcaggctccaaaacacgccatgtaacaaggaggtgggcggcactcagctctcagtccccatctcccatctttcccatccacactgtgctctgttcccctcactttgggcttggagccctgacacctccccactgtccctgcctgcagggtcagcaggctctcaccgcccttacactgcacttctaccgctctgacgcatgttgggcttgaaacttgccttcagcattctctctgccaagtgtgcagagagaaactcccagccatcagccaagacagagtccagatgtcatcctgtcctctttccggaagccccagggagtttgtctttctgtctatattctagcacacatcaaatcataataattgtttaatgtctgttcccaccatttccctggcacatgatcaataaatgatgagtgtgtgaatgagtgagtgacaaagtaatgaaggaaggagggagtgaaggaaccaatgaaggaagggggatagggtggaactgccaagcccttcctccttccacagggccatactgagccatcattccttccaggggagcctctcgggaggcctacctgctggagcacagccacaatgggggaccagttcatcatgctgagctgcgagtggcctggcggcgagccccctgccacgctgggctggcttgacgaacagcagcagcccctgggcggcagcagctcctcgatggccgttcacctcctgcaggcccaa

SEQ ID NO: 8595 - DNA, 2300 bp, Homo sapien
agatgatgacctctctgtgtcctcccacggcagaagggacagaaggggctagctagctccttgaagcccttttataaggtcatgaatcttgctcatgagggtggtcctcatgacttagtcagcttctaaagtctccacctcttaatactatcacctcttaatactatcacctcttaatactatcacctcttaatactatcacctcttaatactatcacctcttaatactatcacctcttaatactatcacctcttaatactatcacctcttaatactatcacctcttaatactatcacctcttaatactatcacctcttaatactatcacctcttaatactatcacctcttaatactatactcaatactatactgaccttgtgttcacacagctccctgttcattgcactgaagatgtctccttgtacttacccacgtgtgtgtctgtatcacagttagactgtgagctctttgaagcttgggactgcacattgtttcttaatgttgaacaaatggatgaatgattcattaatgaaaaactgttttacacctgaaatgatttctctgctttacaaaaaaagggggagaggaagtaattaatatcaacaaacattgtgatttttttcttagtctgactatgagtaacagtaggcatagtgaattcaaatggcactgtgagatctggaggtgcacaaagtgcattatgtcccaggagaagaacctggaattctctgtagccacaataaatttgcaagacttctattaacatccacacaaaactctcatttcagttaaatcctctatagaaagacttacttgccgaatgaaaaatcgtttaccatagcttgttaataacatatagattcttggtctccaaaagtgaacaatagaacagtggaggacaaactagagttaagagtttttttctggctgggtgtggtggctcacgcctgtaatcccagcactttgggaggccaaggcgggagaatcatctgaggtcaggagttcaagaccaacctggccaacatggcaaaaccccgtttctactgaaaatacaaaaattagccgggtgtggtggcacgtgctgtaatcccagctacttgggaggctgaggcaggagaatcgcttgcactcgggaggcggaggttgcagtgagccaagatcgcaccattgcactccagcctgggcaacaagagcaccccagcctgggcgacagagtgagactccgtcttaagaaaaaaaattgtgttttttttttccgtcctgtactgactttctttccaggggctttacaaaaaccctgaatctagctaatgcagaaagctaacctgcttgaacaataccacactttcaaagcatttctttttaaaattcacgtaagaaggtaagggaggactggcatatttctcctgaagttcagtactgagtatttataaacttaactattattagggatccttttgtagttaagctaatagtaagtaatgatgatggggaaaaaaaagagctaactgctaataataacaatttataaagaagttacagtccttgaatgcccactgagtggcaggtgcttttcacaaagtatcgtatttacgcttcacagcaacattttgaatagaaatttatttttcctttttctgtttgaacaactgaagttcattgagttcagataacttggggcaggtccaacggacgagttggaaagactctggggccaaaggctcacaccacgcctctcctagcccctgagttttgctacctgcttgcgtttatgtgcaggcagggcgggtgggtggtggtgggggaatcagatgaagctgcctaaggaattaaacatggaaagtggtggaaaggcgaaggaggtataagcggtgggccgctggaaccctaagagagaccaggcaagaaccgggagaagggatgcacccgttggcggctcagagaacttaggtagaggcgaggggcggggcggggcgaggggcggggcctgaacgaggctagggcggggcccgaacgaggctagggcggggcccgaacgaggctagggcggggcctcgggggacagagtcgaccatttggagacctgccagaagagccgtctctccaagggaatgaaaggtgaggggagcgtgagtgcaggcatgatgggaatctccgtgacttggtaaggcaactcacccttacctgtcctacacccaagaaaagcctcttctatgctcccctggggtatctctcttgcagagtaggcaggtcaatgacgaggagagggtcctgcccagagcgtgcccccctccgtc

SEQ ID NO: 8596 - DNA, 2300 bp, Homo sapien
ccagttcagacacatgcagattttgctcagggctagaatgtccctgaggtaagtaaacagcctttggtgacggttgtggcggtctctgcctctggggacaggcagctgagtcccagttttgaatgagcaggactgccccccacaccatcccgacatccttggatgtataaggagggaggggtgtggagcttgcataggatagagtggattttctgggagtctgagtgggaggaaattcaagcactgcattgtggggcacaggagagacagactggggggagacatgtgcatttacattatttacagaatggaaattcagacacttgagtcacttaagtggcaggtttccatgaaaattaggtttctatttttttaataaaagaaaggaatatgtgtgtgagagcctgtgtgtatggtgtcttgcacaagtgagtgtttgtgtgagtctgtgtgtggacagcaacccgcaagagtgtgtgggtttgagaccgtctgtgtatggcatcttgcatgagtgtgtgtgtgtgtgtgtgtgtgtgtgtgtgtgtgcgcgcgcgcgcacctgtgtatggtgtcttgtataagtgtttttgtatggtatcttgcatgagtgtgcgagagaccgtctgtgtatagtgtcttgcgtgagtacatgactgcgtgtgagcgtgtgtgcatacagtgtcttgtatgactgcatgtgtgtatggtgtcttgtatgactgtgtgtgtatggtgtcttgtatgactgtgtgtgtgtatggtgtcttatatgactgtgtgtgtatggtgtcttgtatgactgtgtatggtgtcttgcttagtgggtgagtgtgtgtgtgagtgcagggagtggggtagggcagaagacggtgataagaaaggcagtatcttctttgcctgcatactaagttcaacacatgcacccatacccatacaaaacccaggaattttcacctttaacaagatagaaacacaactcaagatggacctctctggccatgtcccccagagtgtaacttctcttccacatggggtctgttcttcctccctccccacagcttttcagctgggaaattgatacccacctcccatgagcagcctttctaagcgaccgggagctccctgcaccctcagcctgaccttcccgtgctgagcctgggcccctggccccagcggggcggccaaagctgccgccagggcccatccatcaggctcagcacagcctcccgccctcgcctgcccccaccacatccagcctgtaagtcagcaggccgccgagagggacccccagggcctatctgccaccactgccccctcagcacccccctcggcgtaacagctactgggcagaggaaagtaatgattcctcccctcccagcctcctccttctaaagctgacagcctctccctcctacctggtgacctgctgagatctgctgagaccaaagctgcaggccaaagataaaaaatgcctggctattgactaagacacaataaagggccaatttgcatgttatttgcataccaagttaatgtcaaaatggaatgagcccccgtaccgctgcagctttcctcagtggcccttatcctcaacctttctctgcaggccctgcacggggcaggggtctctttcaggcctgttgatggcaggggtctgatcccagctgggctgcggcacatggtaagccgcccagagggcacctctccactgtgtcctcggcggcccctgcctcggcacactttctcagcaccctgagaaaggccaaatcccatgctggcctcttgcccccgcccactgcgccccacgccccacctgctgtgtttgtgcaggggtggagggaacataatgagaggctgatgttcctgcagctgggctgtgtttggagtctggtggagtgaggggagggcagcagggcaggtcggggcagcaggacggagggccaggcagggccgcagagcctcagggcccagcagtaacagctcacacatgatttttctccccacaatgttctccactccaagcctgtgggcccccaagtcggaagcttccaggactgtaacaagctttagtttatacacaaacagctgcattttcctactaccgtttactgcaagggagccagcgcagcatcctctcagctttgcttggcctcagcagtgagttgaagctcggcttggccagcctgggagagcagggacggcagggcctgtggatgggacgcatcacaggtgggtcctgagctctggggtctgtgattcagtttctcctcccccagttccccagattccctgtcccc

SEQ ID NO: 8597 - DNA, 2300 bp, Homo sapien
ggccatgaagcatctttgccaggataggtagtacatcagtgatgcagagctggaccccagggccacctaagaaggaaaaagccaaaggtttgagcggccaggaaaagatctcgccaaagaactctccttgggagaaaagcccttaatggataaactgtcaatattttctagagccttactactgaagtgtggtccagagactagcaacaatggcatgtctagggagcttattagaagtgaatctcaggctctcaacctagactactcagtcagaatctgcattttacaagctgcccaagtgattcagaagcatattaaagtttgagaaacaccattctagagcatgtggcttcctctcagacatactttgaaaaaccatgaggccttcgagaagcattaaataagagtgattaggaggatagacttcggggttagacattcctggggttctactctactcttcttactagccatttttttgaccttggacacattacttctctttccaactttgctttctcgttataaaatgtaaatatctggaaaacaacttcattggggaatggaaaggcaaaaaactgttgcgaaaataaagagagaaaaaaattatacaaacacttggtgatgtgatttaattccttgtctttgtgaacaactatctccgtatctccccaaaaagcattaccttcttctagctaaaatgggccttttccctctttcacaaatgcattttttaaatcaatctttcctgattcacttcagctgtccctgacaactacatgcaacatctgttgaaagacatttgaaggtccactaaattccagtcactctggggttgtatgttacatatactccaacatacatacacacacacacacacacacacacacacacccccttttttcttatgtatcattttctcattcccagttctgatggaagataacctttagtctagaaccacacagcctttgtatatctctacagcgatccctgtagtctgcacacagcgtattctacgaattgcttactgtcagatgtttagaaagggaggactgtcttatttatttatttctgtgttctcggtggttccttatattggacggtagtttacaaaagtttaattaatttgaatgcaaggctttagagtgcaccacaagtaacgtctcagttttcctcggttgtagcagaaagcagctgcaggttcctccacctttcccgcgtggtccttaccatgcacagggagaccgtagggcttattgatgaccacaaggttcttgtcctggtggagaattcctcgggtcagtgccttagcaagcacgttggggtggactcgctgcagctgccgtgtgaaccgcactatttcttgcactctccgctgaacagcgtttgtggacacctagggagaaagaaggagccgtggggaatgcctggtgcggaagccgtggagaagaccttccataaaggtctgggtgagaatctgagtagggaatgactatctttgcatcagacccgcgccgccttcgactaatttgagagcagagatacccatctgtctaacctgcgtaccgacgcagtggttaggactgagcctgacagtagccaaagatccagctcacgggaaaacaccgtacccttactgacccctcccctccgccttctccccattctcccaccttgcgtccgggctattgactcacacgctttcactcagaggaccctcctacctactccccgtctgggaaaccaatgagcgcactgcctctagggagttctggtccctttggactcaccggctccttctttgtgtcttgttcccgtttctgggctcggagcttctccgctaatctctgggcatttatggccgtagaggcagcggcagcggcacaaaatggctttgagacgagagtgaagagactcccgcaaccttggccgtttccccggatccaggggcccgacgcgctccacctgggcgccgccatcttacaaggaagggcggggcgagccaagaccacgtggagaagggcgactacaatgaggcgggagtgggtgggccctgcaggtcacgtggtgcggggtggggcctgggcgagtcacgtggggacggtgcgcgctcagtgcggctgcgccggccggtagctgcagctggagcagtggcgtttggaggagactcggtgagtgtgtagggaagccgggctggggctgggaaatgccggtgcctcaacggtttaacgttttctgcgtccccgggatttccgttcaagaagagcactggtctgagaaacgtttctccttttggt

SEQ ID NO: 8598 - DNA, 2300 bp, Homo sapien
ttgtttcccgccacagaaggccaactctgcaagaacaggtgtagtttcttgaatgccataaggttagggtagaaacagcctctcccatccccgacacaaaaccataaaagtcctgtacccaaaacaagtttttaattaatgtaatgatatgaatttaagtcccgatgtcaaaacttcagggtccttggaaaattgagcttcaagtatctaagtaatatgtgatgttcaagtgaaattagaacctaggtctggagcatggaaggtaataattcttttagggtggaatttctcaacttttatagacctctgtcttactggtaaatttgcagggggtgggtggggaacaggagaaacagatgtttcccaatctcccttggaaatctttgcatttgtatctggatctgcatttacacctgccttataagagaaacgtacacaagccttgcttctttcccactttacaaatacatcttcctctaccttcattcttcaggccaaacattgacagaaataagacaattcaaaatgttcagacacacctagcatacatttatgatgcacttcagccatctaacagatatcgagtttactatgtgccaggtgagtggattaaaaaaaaaaattcttccagggactcacagatcaacagcagctgccaagagtacgccttgacctgcataactcaattaattcaaactcaaaggagttacagtgtagggggaaaagaccagacctcatcactgaccacctagattgtaactagttttcctactatcaaaccctttccttccccactatcaaaccctttccttccccatctgtcctgcattcaactgccagattcatttccagaattccactttcaaggagtctctctgccctactcgaaaagcttcaaagactcctcactacgtatcacctctagttcaaactcttcaacttgagtcttctatgagtagctccacctgatcaactttgtttcttgttggtacggctcccttctgccaaaccctttaggaggtgtagaacccaaatctaattcaactacctattctctaataactcctcaggcagccttcattccaagcagtcttaaaaaattgttccttctatcgtcacagatccattagttttcaggacattctttctgaactcagcataagctttcctcttaacaaatggcaggtatatcccaagttatttttaacactaccatcccaaacagatgtttatcttcccagccacccctgagtgaaatcagagggagtcgcctgcagttcgggcaagggaatcccaacatcgcatctcgtgagaggaggtatggtgtggttgcaaactatggagaggaaaaataaaggaaacaggaaaagtgaaggtctgtgctccgttctttcagctttttctttaggaggagtagggaaggtagggaggagacccccaagaaatgaattcttgaggaagggcagaaaaaacactcacagtgcttcctaagtaggaaataggtgctgggggccctggataagggaaggggccgtcatccttaggagaagggtacaggttacaacgcgaaacaaagaggctgggagttggaagatgaagggtggagagactacagagatccgggcatccgatcaagagggtccccgacgcgtcccgcaggggactggcggatcaccggagattcagtggctaagagggacggcgtcggtgcctaggagggctctggggcgagcgtttatgggacatcgctcctaagggggcgcgggggcggggaggagtttttgagtgggatcgtgtaccaaaaggagaaacgtttctcagaccagtgctcttcttgaacggaaatcccggggacgcagaaaacgttaaaccgttgaggcaccggcatttcccagccccagcccggcttccctacacactcaccgagtctcctccaaacgccactgctccagctgcagctaccggccggcgcagccgcactgagcgcgcaccgtccccacgtgactcgcccaggccccaccccgcaccacgtgacctgcagggcccacccactcccgcctcattgtagtcgcccttctccacgtggtcttggctcgccccgcccttccttgtaagatggcggcgcccaggtggagcgcgtcgggcccctggatccggggaaacggccaaggttgcgggagtctcttcactctcgtctcaaagccattttgtgccgctgccgctgcctctacggccataaatgcccagagattagcggagaagctccgagcccagaaacgggaacaagacacaaagaagga

SEQ ID NO: 8599 - DNA, 2300 bp, Homo sapien
tgatcttgtctcactgcaacctccgcctcccgggttcaagcgattgtcctgcctcagcctctcgaatagctgggactacaggcacccaccaccatgcccagctgatttttgtagtgttagtagagatggggttttgccatgttggccaggctggtcttgaactcctgacctcagatgatccacctgcttggcctcccaaagtgctgggattacaggcgtgagccaccgtgcccagccacaagcttattcataaatccttctttagttcctactctgataactggattttatttataactaaacctatgatgggtttttattcagttatttttaatccattatatctgtctaaaatgttgtacacctgaatgtgaactcgaaagtaattgtgtaatgatgaatgaatgaagtgaacttgagtgacttttttgtacctcttcatgttgtaaaacatttattttccttttaattctaagaataactgtaacacgaatctacttcatatctttcttatccttctgttcttggttttgctatcaatggttttggattccatgctcacaatgtggggacctccaggatatttcacctggtgcagccaagtgaattcacttaatcactacagacagttacacttgagggtttttaatggtaaaattttttaattttcaaaatttgttatttatttatttttgagatgggttctcactctatcaccaggctggagtgcagtggcatgatcatggttcactgcagccttgatttcccaggctccagtgatcctcccaactcagcctcccgagtagctggaactataggcatgcactaccacacctggctaatttttgtatttttggtacagatggggtttcgccatgttgctcagggtggtcttgaactcctcagctcaagcattctaccttcctgagcctcccaaaatgctgggattaggtgtgagccactgcgcccagccaaaaaacttgtttttaattttcagctctatttaagttggaaatcctcaaggaagtgaaaaggggtgaaaatgaagtggaatgtatttactaaacatttttttttttggttttgttttttgagacagggtctcgctttgtcacccaggctggagtgcagtggcataatctcagatcactgcaaccttagcctcctgggttcaagcagttctgcctcagcctccctcctgagtagctgggattacaggtgtgtgccaccacacctggctaacctttgtatttttggtagagatggggttttgccatgttggccaggctggtctcaaactcctgagctcaagtgatcctcctgcctcggcctcccaaagtgctgggattacaggagtgagccactgggcctagcccattttaatttttatggcaggaaagtcttcccttcattaagacttgtcaatttttcgtttgtttgtttgtttttgttttgagatagagtctcattctgttgcccaggctggagtgcagtggcatgatcttggctcactgcaacctctgcctcccaggttcaagaacttctctgcctcagcctcccgagtagctggaattacaggtgcccaccaccacacccagctaattttttgtatttttagtagagatggggtttcaccatcttggccaggctggccttgaactcctgacctcttgatccacccgccttggccccccaaagtgctgggattacaggcttgagccacccgcgcctggcctcaaattttaactcatagagaatatcctttataatgatggcatcttctggaatgccccagacttggaagaatctgcatttgtacgcagtatgttgtgtttactctgttgacataaaagtaagctactgagggttatttctcataggtaacccacactatttttgtagtagaaattcaattgttaaggactcactagagtccttaaagagttatcttgcccttaaagagttattcaatttcatttttaatgaataacctatgccatttatgatggaattgtttgtgtgatcatactacttgatctatgggaaatatctgatattttaaaagtctccttacttagcaacatgtgtcattattttcaggatataccttctcagaagctgcacaggaggaaagcagtgacaaagaaagaagttgtcattctttgcacggtaaaatcatcacctccagtcaccaacttctaattcaaattaggttttaatttgttcattatttcttcttggaacacttttgttccctatacatatgcgttactttggctttataatagaaaataacaagc

SEQ ID NO: 8600 - DNA, 2300 bp, Homo sapien
gttcataaggcctggggattataggatggtgaccatttgagtgagaagcaggtaagcaatgacaaaaggaaggaccacctcagtccttagcaccgtgttaacacctttcatgtcccagtatatccaaagaactcaaacttgccttccttcttggcccccttttttttgctattctttgctttttccttgggcttttccccccgtgtctcaatcatggacctcacaggtttcttggccttttcagaatcttcaaatttcttcatggtagtgggagcacggatcttactgctctcctctgcttcactaaacaaaaaggagaatggtttatctttctaccccatgcagaaggaaaaataacggtccagagaaaggactctcacacccaagaggacaatgagaactgggtagcaaattaggaatgtctttgaacacatcaatttaccacctttgaaccaccttcagagaggtcatcaaatcatggaaataaattgattttagagaaggcaggtctctcaccgaaggagccgcaggaagtcattttggaaatcaaaagtgccatttaataaacttaaagcactttgctgttggatctctgtgcggtacttgtcccgaaacagccgatgcacgtcatctatcaatttgtctacatatgtcagtgtcaggatcttctgaaaaccaacctgtttaggggaagaaacagccaacagatctgcttacatactagcctagaatggagggacgccaactcaaccctggctttcagagataggttcagctacctggccggtttccctgtcctgagaggcagccaagctccctgcctgggcccagtagctgctgttttcccccatctacctttctagttttttcagttacgtcatcatatacactggctgcaattaatcagagttctcttaaaaatcagggctatgttaacaatgcaatcgtccctctacaacaccccacttaccacaaacaccagctcaaactggttgtccagtttatacttgagtgtgagtgcctcatgggtgaaggagttgttacctccccgttcctggagaaagagtatgtctcagtgttcagactatccccagaaaacccaggtttgggccctgggtttggataacctttgggaaagagccaaacatttcccccaaactcaaatctgtccccaggacaagaggatgttggggcacttctctctggcattccaccagaaataagataaccaagttgggggaaaaagatgagagagagagcaagacacatgggagccaaaagggaagtagtcatgtaaacaatcagattactagcagctatacaccatttagttttgtaaaggtgttttcccatctgttatttcacctaggctcgaaacaacaaaaccaagctgctggggataaatagagggagcggaggagaatcccaaaggcgccggaattcggctagagttgagacaccagaggcgggggccgtcattaagttgcggggtagtctgaaggggacgagaaaacgaagcggagtccgggttacgcgtgagtggtcagtgtgaggtgggcggggagggtgggaggaggcgcggaatagagtcgaaggggaccatggatcgggtcaggaaagaagagcctggagttctgatcccacggggacggtacctgcagcagcacggaacgaatcaacgcgttaacgggtccggtgcatgagtcgctaacgccctggaagcaccagagcacaagcccgcccttggagaaaatggtgaagaagtcgagcatggcggcagcggcagaggagctggggccggcgccgggaattcaggccgcgttcgccgccgcttcctgctgcgccaagcgcgggacacgtcacaccagtggccccggaaatcggctcaaccgtacttccgctcagaacgccgggtgccctccccatctccgcccgggggcgcgcaggactgacgtatcgcaaggccagccaatggcgggtgggagcgggcctgggtggggctccaggagaggtcacggggagacggccacctagagcattgggcggggcagagccctgagggccgctggccaattggcgcgctcgtctgaatggcgtttggcgcggagcagtgacggctgcgataatagcgaggcagcagtgcagctttcagagggtccgggctcagaggggttatgattcggagggttctgccgcacggcatgggccggggcctcttgacccggaggccaggcacgcgcagaggaggcttttctctgggtaaagttgaggacgacagagggtattgtggttctgggttg

SEQ ID NO: 8601 - DNA, 2300 bp, Homo sapien
tgtcctgccagtgtgggccatggtttcgggtcctgaaggacacacagtcggaggttggggacaacccagaaccacaataccctctgtcgtcctcaactttacccagagaaaagcctcctctgcgcgtgcctggcctccgggtcaagaggccccggcccatgccgtgcggcagaaccctccgaatcataacccctctgagcccggaccctctgaaagctgcactgctgcctcgctattatcgcagccgtcactgctccgcgccaaacgccattcagacgagcgcgccaattggccagcggccctcagggctctgccccgcccaatgctctaggtggccgtctccccgtgacctctcctggagccccacccaggcccgctcccacccgccattggctggccttgcgatacgtcagtcctgcgcgcccccgggcggagatggggagggcacccggcgttctgagcggaagtacggttgagccgatttccggggccactggtgtgacgtgtcccgcgcttggcgcagcaggaagcggcggcgaacgcggcctgaattcccggcgccggccccagctcctctgccgctgccgccatgctcgacttcttcaccattttctccaagggcgggcttgtgctctggtgcttccagggcgttagcgactcatgcaccggacccgttaacgcgttgattcgttccgtgctgctgcaggtaccgtccccgtgggatcagaactccaggctcttctttcctgacccgatccatggtccccttcgactctattccgcgcctcctcccaccctccccgcccacctcacactgaccactcacgcgtaacccggactccgcttcgttttctcgtccccttcagactaccccgcaacttaatgacggcccccgcctctggtgtctcaactctagccgaattccggcgcctttgggattctcctccgctccctctatttatccccagcagcttggttttgttgtttcgagcctaggtgaaataacagatgggaaaacacctttacaaaactaaatggtgtatagctgctagtaatctgattgtttacatgactacttcccttttggctcccatgtgtcttgctctctctctcatctttttcccccaacttggttatcttatttctggtggaatgccagagagaagtgccccaacatcctcttgtcctggggacagatttgagtttgggggaaatgtttggctctttcccaaaggttatccaaacccagggcccaaacctgggttttctggggatagtctgaacactgagacatactctttctccaggaacggggaggtaacaactccttcacccatgaggcactcacactcaagtataaactggacaaccagtttgagctggtgtttgtggtaagtggggtgttgtagagggacgattgcattgttaacatagccctgatttttaagagaactctgattaattgcagccagtgtatatgatgacgtaactgaaaaaactagaaaggtagatgggggaaaacagcagctactgggcccaggcagggagcttggctgcctctcaggacagggaaaccggccaggtagctgaacctatctctgaaagccagggttgagttggcgtccctccattctaggctagtatgtaagcagatctgttggctgtttcttcccctaaacaggttggttttcagaagatcctgacactgacatatgtagacaaattgatagatgacgtgcatcggctgtttcgggacaagtaccgcacagagatccaacagcaaagtgctttaagtttattaaatggcacttttgatttccaaaatgacttcctgcggctccttcggtgagagacctgccttctctaaaatcaatttatttccatgatttgatgacctctctgaaggtggttcaaaggtggtaaattgatgtgttcaaagacattcctaatttgctacccagttctcattgtcctcttgggtgtgagagtcctttctctggaccgttatttttccttctgcatggggtagaaagataaaccattctcctttttgtttagtgaagcagaggagagcagtaagatccgtgctcccactaccatgaagaaatttgaagattctgaaaaggccaagaaacctgtgaggtccatgattgagacacggggggaaaagcccaaggaaaaagcaaagaatagcaaaaaaaagggggccaagaaggaaggcaagtttgagttctttggatatactgggacatgaaaggtgttaacacggtgctaaggactgaggtggtccttccttttgt

SEQ ID NO: 8602 - DNA, 2300 bp, Homo sapien
tcctatccataatcaagttctgcgggctccggcttccaagtaactcctcaatctgtcccctttcttcctctgccaccatcatcctaggccaagccactatcatctctcaactggacaaatgcaaaagcatcctaactgttcccactgattccccgcttccatcctaccccctgctgtgaacatgtttacaatatagctagaaatatcttttcaaaacacaaatttaatcacaaaccctcttgcttaaaaccctccaatgagttttccattactctaagaaccaaagtccaaagacttaaacacagcctgtaagatactgcacaatctggcttctgttcatcttatcctcccctacactccaggccctttagttccttgatggcaccttatttcctcccaccacagggaacctacatatgctctctgcttttaaactgtgtccacttccttgcctagttaattccttgcttgggaaagcctttcctgacccccagaccaggtcaaactctacatgatctcttggacacaactgcagtttgtattgttacatactctaaaatccatgaggggggaggctgtgtttaccttcaccactgaatctccagcctatcgcaacacccggcatattctaagtgctcagtaagtatcttaaataaatgaatccttttgccatttcatacctcactcaaactcttctcagcagcactggaatctttctttggtctggccttagcttacctgtccacactacatttcatgctactactcacaccgtctatctagatggcttttgccagttccttgcataagaacaatatttttctcctagtctgcactcagttatttagagactggaacacacacctttcttaagccagtaaacatcctccaaggctgatctcagttcccacctgctccatgtacttctaccgttatactagctagcagtgcaaagcattaagttgagttctagctaatctttttttttttttttttttttttgagacggagtttcgctaagtcgcccaggctggagtgcaatggcatgatctcggctcattgcaaccttcgccttccgggttcaagcgattctcctgcctcagcctcccgagtacctgggattacaggagcccaccaccacacctagctaatttttgtatttttagtagagacggtgtttcaccatgttggtcaggttgctctcgaactcttgagctcaggtgatccacccgcctcgacctcccaaagtgctaggattacaggccccgcgcccggcctctatccagtcttgaactggcctactgtctattgaaattttccctctctaggtacactctagccattttccagaacattcactgaatcccgtcttctcttcactcctttaccgcaacagcactaagtacagcatcctgaacacgggcaggacttaatgcacatctgtgccaccgattatcaatcagtctgactgtaagcttaaatggagaatgatgtgagacctgccacctgaaaagggccgccttgggagccatacacctgcacagcccctacaagctctggtaggtaagctaacccccttccccaagccgacccactgtcctgccagtgtgggccatggtttcgggtcctgaaggacacacagtcggaggttggggacaacccagaaccacaataccctctgtcgtcctcaactttacccagagaaaagcctcctctgcgcgtgcctggcctccgggtcaagaggccccggcccatgccgtgcggcagaaccctccgaatcataacccctctgagcccggaccctctgaaagctgcactgctgcctcgctattatcgcagccgtcactgctccgcgccaaacgccattcagacgagcgcgccaattggccagcggccctcagggctctgccccgcccaatgctctaggtggccgtctccccgtgacctctcctggagccccacccaggcccgctcccacccgccattggctggccttgcgatacgtcagtcctgcgcgcccccgggcggagatggggagggcacccggcgttctgagcggaagtacggttgagccgatttccggggccactggtgtgacgtgtcccgcgcttggcgcagcaggaagcggcggcgaacgcggcctgaattcccggcgccggccccagctcctctgccgctgccgccatgctcgacttcttcaccattttctccaagggcgggcttgtgctctggtgcttccagggcgttagcgactcatgcaccggacccgttaacgcgttgattcgttccgtgctgctgca

SEQ ID NO: 8603 - DNA, 2300 bp, Homo sapien
gaggaagaaaggggacagattgaggagttacttggaagccggagcccgcagaacttgattatggataggatataaatgtaggtttggtggtggtgatggatatccaggataagcatggcaccgcttagcggtgacatgcttcagagggtgccgtgacttggggtgtgccagggcctcttggtccaaggcctggaagacccaagtggggatgacagtgcagttgaatatgtgagttgggatcaggagaggtctatgcaggaggtaatgtagaaaattaattttaggaaattgaatcttgcagtgcttggcacaatgcatgaagagactgatggcatgtggactattcagaaaactgtggcaacactgttgggtgcaaggtgaccttatgagatgggctgacagtggggactgccaactcatgtgtctgtttagctcaccttttcctgtgcccatcctccaaccccccaaccatgtgggaaggaaatgtttggccctctgaccctaactacatcccacagactgggatggaaaggtgtctgagattaagaagaagatcaagtcgatcctgcctggaaggtcctgtgatctactgcaagacaccagccacctgcctcccgagcactcggatgtggtgatcgtgggaggtggggtgcttggcttgtctgtggcctattggctgaagaagctggagagcagacgaggtgctattcgagtgctagtggtggaacgggaccacacggtgaggtctggggtagggcagagtcatgagtggggcaagaaagatgactcattttattaaggactctagcgacaagggaaggagaggaggggaagacctcaatctcggagggtccaacggacagagattgtgctttggactttgttgagaaattttcctaggatcttcctcagtcgaaccaggaagcttggcaataaggtttgttcttttgaaagcagatatcaccatattggatttttcgagatctcatagctctggtcatgagagcctgcattcaagctataattaagtgtctcaattttctctttttttttttttttttgagacagagtcttgctctgtcacccaggctggagtgcaatggcacaatctcagctcactgcaacctccacctcccaggttcaagtgattatcccacctccgccccctgagtagctgagattacagggacacaccctgatgcccagctattttttgtatttttagtagagatgaggtttcaccatgttgcctaggctggtcttgaactccgaacctcaagtgatctgcccgccttggcttctcaaagtgctgggattacaggcatgagccaccattcccagccctcaacttgcttcttttgggtcccgttacttctgaggttttttgcattttattgtatttatttatttcgagacagggtctcgctctgttgcccaggctggagtacggtataacctccacctcccaggctcaagtggtcctcccaccttagcctccagagtagctgggaccacaggcatgcaccaccacacctggctaatttctgtattttttgtagaaatggggttttgccacgttgcccagctggtctcagattcctgaactcaagcaatcagcccgcctcggcctcccaaagtgctgggattacaggcatgagccacccacccggctggtttttacactttaggtgttcctgtttgcattgccagctagccacgagtcttgctactttacttcaatcataacctttcatttcccaaatggtaggtcaaacgttaatcgcctgcccttggacttccaggccattaccattttgtaccactgtgtcagctctttccagatgactgaccctctctgctctgcacatccactactaatgattttaaacaccattgccttcaagttgacttacacatgggtcttagattatagacttgcaaataggactccccttcaactttaggtgtatagctcgaagctttcattgcagtattctagtcacatgtgatagggtactggtctacctcaacttttcttgtctttccacagtattcacaggcctccactgggctctcagtaggtgggatttgtcagcagttctcattgcctgagaacatccagctctccctcttttcagccagctttctacggaacatcaatgtaggtgcaatgatatccgggatgttggggtggttacccctcctttagcccagagtggggagcagcccagctagcaaggtagccagagagcaagaatgggtcagccaactaggagaggggggccctggccttcttccta

SEQ ID NO: 8604 - DNA, 2300 bp, Homo sapien
cctaggatcttcctcagtcgaaccaggaagcttggcaataaggtttgttcttttgaaagcagatatcaccatattggatttttcgagatctcatagctctggtcatgagagcctgcattcaagctataattaagtgtctcaattttctctttttttttttttttttgagacagagtcttgctctgtcacccaggctggagtgcaatggcacaatctcagctcactgcaacctccacctcccaggttcaagtgattatcccacctccgccccctgagtagctgagattacagggacacaccctgatgcccagctattttttgtatttttagtagagatgaggtttcaccatgttgcctaggctggtcttgaactccgaacctcaagtgatctgcccgccttggcttctcaaagtgctgggattacaggcatgagccaccattcccagccctcaacttgcttcttttgggtcccgttacttctgaggttttttgcattttattgtatttatttatttcgagacagggtctcgctctgttgcccaggctggagtacggtataacctccacctcccaggctcaagtggtcctcccaccttagcctccagagtagctgggaccacaggcatgcaccaccacacctggctaatttctgtattttttgtagaaatggggttttgccacgttgcccagctggtctcagattcctgaactcaagcaatcagcccgcctcggcctcccaaagtgctgggattacaggcatgagccacccacccggctggtttttacactttaggtgttcctgtttgcattgccagctagccacgagtcttgctactttacttcaatcataacctttcatttcccaaatggtaggtcaaacgttaatcgcctgcccttggacttccaggccattaccattttgtaccactgtgtcagctctttccagatgactgaccctctctgctctgcacatccactactaatgattttaaacaccattgccttcaagttgacttacacatgggtcttagattatagacttgcaaataggactccccttcaactttaggtgtatagctcgaagctttcattgcagtattctagtcacatgtgatagggtactggtctacctcaacttttcttgtctttccacagtattcacaggcctccactgggctctcagtaggtgggatttgtcagcagttctcattgcctgagaacatccagctctccctcttttcagccagctttctacggaacatcaatgtaggtgcaatgatatccgggatgttggggtggttacccctcctttagcccagagtggggagcagcccagctagcaaggtagccagagagcaagaatgggtcagccaactaggagaggggggccctggccttcttcctagtggtggtgccgcaggtctggggcactgagcctggggagctgtgggggaagaaggcaggaaaactctttctggcatccttaagtcagtttctttcaggagcttctgtctgcacacaggagtacctggccgtagtcgatgctcctcccctggacctccggttcaacccctcgggctacctcttgctggcttcagaaaaggatgctgcagccatggagagcaacgtgaaagtgcagaggtgggtgcctggcacagcctcttagctgcttggcagccaaaggtgttgggtgactcctgcaccaggttaggaagcgagaaagtggagttgataagacagatccctgcggtctaggacctcagtgtgtcaggaagaaaatacacagacctgcaatgccctgggagtgctgtaccacagatatggacaaaacactgcgaggtgcttcctaatttgtcagatcatgaaaaccacctggaacacatcccagacctaataaaccagaatctctagggaaggagcccacaaatctgggtttttaacaagaaccttaagtcaggagttagcaaactttttctgtaaagggccagatagtatatattttaggttttgctggccatacagtctctattccaaccactttgctatcacagcatgaaagcagccatagacaaaagtgcaaatgaaggagtgtggctcatttatgaaaacaggcagcaggtcggatttggcaacccctgctctaagtgattctcatggtcaggtgagggtgggcatgtttgtgatgcaatatggccagaggctttatttgtatgtttatttaacaaacacccaagtctcagagtgacatcaattaatatcctaaatgctgtacagatattaactcatttaatcatcagaac

SEQ ID NO: 8605 - DNA, 2300 bp, Homo sapien
cctgtaatcccagcactttgggaggcggaggtgggcagatcacctcaggtcaggagttcgagaccagcctgaccaacacggagaactcctgtctctagtaaaaatacaaaattagccgggcatggtggcgtgtgcctgtaattccagctactcaggaggcagaggcaggagaattgcttgaaccctggaggcggaggttgcagtgagctgagattgcgccattgcactccagcctgggcaacaagagtgaaactccatctcaaaaaaaaaaaaaaagcactgagcaactctcctgtcctcccacagggctgtacttcaagctgtgggcaagcccttaccatcgcctccgtgcatctgtcttcccccctgagctgtgcagagctgggaccaagccttcttcatccttgcctgacactcagctgccccaacacttggcccatacttggcgccgtcaaggcctgtttatctgagtgttcctcgagtgtccttctgctctggctggagcctgaagaaccatccctggcctcggggaatttttactctaaagtgggagataagcagcagagcacaggctctttacaatgaaaagcactatggcctttgagggatggaggtgggaagggctgggttaagcaaagctttcctgaataagctgcaaaaatgggccttgatccctttgtagctcataagcaagatgactgggtgttcacgcacatgtgtgaggtgtgcctcccttaaaccttgttaagggttgttacccgtgtgatgggaaaaaaaagaaaaaggaaacaaaaaaaccccaaaaataggccttgctagaagaagggcgttttgcagagcggagctggggaaaaggagggccctgggcggaggtgtacttggtagagtcaggtagagtcaaagcaaactgggcatttgggtgcagtgccaagtgcctgatctactttatgtagactaatccttgcaagaacaccagcaaccagataccataatgtgatgaaggaagcaagcctagaaaagttgcgtgacttcaccaaggccacacaactagtaagcgatgagcgctggttgtgaacccaggcagttgactccagagccctcccaggatgggcagctcatccgctttggcgggctggtgagaaaaggaggaaatcaaattggagggggagatcatgaatcttacatggcctaattaaactacctccactctccagcatttcgtgcacatagttttaggatagggtttcccaaactggcatggcctggagcaagacgctcaggaagacattcacatttcttgtagagtgaaacaagtgtggggaatgctccgttcccttctccccaaggtgcttcacagcgctcacgaacatctgaagagctctcagaagtgggaggcaaaggcatctctttcacccaggacttccagcatcttgcctacaccacgctgtttgcagcggctctgcagcatactgcagcgctgttcataacgcccatgtgggatcaccgcttagagaagcaaagaaagcactttggcagaagacggggtttccaccctcctcggcatcaaccagtgtctgggacgggaactggcggccgctgcggcctggcttcccagctgccgcccgggtctgcccctcccacactgcagccccgtacacccctcgctgtgtgtgacctttggaaaagttccatctctccaagcttcatgtttctcatttgtataaaaggaaaaaggtatgaacaccccccttgcagggtgttaggaagattaaatgggcggaatagggtgtttttttttccttctcccccgcctagaacaaaacccaggtttcaggttgtcacggtgggcgccgggggaccctggccacgggctcctctccgagttgctgcggaccgccccaacgcaagcggagaggacgggagcccggagtcatgcagaagccaggctggcaggggctcgggccgcagtggacacaggggctgccccgtcccgcgtctcccgcagccggattgtgcccgagagtctcccgggtctggactgggcctggcggcgtgggaggggcagtgcggcgggcggcgcttccggagagcggggcctgcgcgctgctcttccccgcggagcccgcgcagtccgcgcagccctcatcgcaactgggcccgcgcgcaggtgagcccggggcggggtcgcgggggaccgggaggcgcggcggggctccgtggggtgggcgacggagcgcggccggcctgggccccagagtcccggccccaccgagagccgcaggggtgcgcgccgcctctgg

SEQ ID NO: 8606 - DNA, 2300 bp, Homo sapien
ctttggactgggaagaatcaccatttttcttctggcagatgactgtattccttataggacaggcaaggtttcattcatctgttctcagtaagtttgttgttgaactgaaatgaatttcattatttcctccaatgtgtacttttgtgcccccctctcacttctccctatcatgacccctcttttgctgaaaaaaatttttattattttttctatctctagttctagaaagagaaaatttattttttaaattataaactattttgccaggcgccatggctcacacctgtaatctcagcactttgggaggccgaggcaggtggatcacctgaggtcaggagttcaagactagcctggccaatatggtgaaaccctgtctctactaaaaaaacaaaaaaaatcagctgggtgtggtggcgggggcctgtagtctcaactactcgggaggttgaggcaggagaattgcttgaacctgggaggtggagattgcagtgagctgaaatcacgccactgcactcgagcctgggcaactgagcgagactctgtctcaaaaaaaaaaggccaggcatggtggctcatgcctgtaatcctagtactttgggaggctgaggtgggcagaatacaaggtcaagagatcaagaccatcctggccaacatggtgaaaccccatctctactaaaaatacaaaaattagctgggtgtggtggcgtgggcctgtagtcccagctactcgggaggctgaggcaggagaattgcttgaacctgggaggcagaagttgcagtgagccgatattgcaccaccgcactccagcctgggtgacagagtgagactccatctcaaaaaaaagaaaaaaaaattattttattatgcacaaaaggattaacaaataatatgtccactcatgtgcctaccacccagtttaagaagcaaaaccttatcatcccttatagtggtccctttgtgccctgaattgcagtctccccttcccccaccagaaataaccagcattttgaattttgaacttcttgcttttagcttttctctatacatttactacatatgtatgcacctccaccagcatactgtgtagttttacatggttttatattttatgtaaacagcgttacagcgtttgtattctgcagattcctttccttgttcaccaaatgtgagatttatccatgcggatggatgacatgccagttattaataatacactttcatcccacgatgtaaatatgccaccatttagttacacattcttctccaaatgggtatttggtgttcctaggtttttgctattaaaaacaatgagcctctgaacttttttgtacattttcacaagcaagattttctaggatttagcctagaaaatcctgctggggctgggtgtggtggctcatgcctgtaatcctaacactttgggaggccgaggcgagcgcatcacttgaggccaggagtttgagaccagcctggccaacatagtgaaaccctgtctttactaaaaatacaaaaattagccaggcatggtggtgcacgcctgtaatcccagctacttgggaggctgaggcaggagaattgcttgagcctgggaggcagaggttgcagtgagctgagatatcgcaccactgcactctagcctgggtgacagagcgagactccatctcaaaaaaaaaaaaaaaaagaatatacatactatttttctagaagatgccacagtttcttccaaattggctgtaccaatttaagttcctacaatttgtgtttaagagttcccactttttcatgttcttgctaacgttcagagttatcatatttttaaatgtttgctaatctggtggatgaaaactggtaaactattgttattttttttccttttcatcatttttatgaaaaaaaaaatcaagcatatactgaaaggaagaagtttgatgaatccctatgtgcctgtcagctagcttcaacaattaccaactctgagctactcttttatcaataataccctactcatatctctcactccccacaagatcatttgaagcaaacctcagaaatcactttattcctaaatatttaagtatgcatctctaacttattaaaatttttttggttttgttttttgtttttctgaaacggaatttcactcttgttgcccaggctggagtgcaatggcgcaatcttggctcactgcaacctctgtctcccaggttcaagtgattctcctgcctaagtctgggattacaggcatgcaccaccacacccggctaatttttgtatttttagtagagatggggtttcacca

SEQ ID NO: 8607 - DNA, 2300 bp, Homo sapien
gtcccagctacttgggaggctgaggcaggagaatggcgtgaacctgggaggtggagcttgcagtgagccgagatcgcaccactgcactccagcctgggcgacagagggagactccgtctcaaaaaaaaacaaaaaacaaaaaacaaaaaacagttcttaatcattatcttgtttacctcatgtaccccatttgaatatacattttatgaaagaagaggcctcgttgtcttgcttagaactaatagccgctggcacatggaaaatggagacctggaaaggttaagagacttttccaaagttgcacagctagtcagtgttggggcccgacttcatggctctcaattatgggctctttttgttaaaacatagctactttggcagggtgcggtggctcacgcctgtaatgccagctctttgggaggcccaggcgggcggatcacgaggtcaggagttcgagaccagcctggccaacatggtgaaaccctgactctactaaaaatacaaaaaattagccgggagtggtagcagccgcctgtaataccagctactcaggaagttgaggcaggagaatcgcttgaacctggaggcagaggttgcagtgagccgagatcgcgccattgcactccagcctgggggacagatcctaagtctctcctaataatgctttctgcatcacacacacacacacacacacacacaaagtagtcctttttttttttttttttttttgagatggagtctcgctctgtcacccaggctggagtgcagtggcgcgatctcagctaactgcaagctccgcctcccgggttcacgccattctcctgcctcagcctcccaagtagctgggactacaggcgcccgccaccacgcctggctaatttttttgtatctttagtagagacggagtttcaccacgttagccaggatggtctcgatctcctgacctcgtgatccgcccacctcggcctcccaaagtgctgggattacaggcatgagccaccgcgcctggcctaaagtagtcttttatccaactcctaatctatatttctggtagaagtaatccaaaaatcaaactaacacatggtacactttgttattgaccaaaaactgactgtaaattgcatcttgttgctaacgttgagaatggcaaaaactgtcccacacccatgagatctgtctgaaaacctaaactcaaatcactggcaaaataaatgtgtggctgactgaagcgatgtaagtaccaactctttttttttttctttgagacgtagtctcgctctgtcgccagggtggagtgcagtggtgcgatctcggctcactacaatactccgcccgcgttcaagcgattttcctgcctcagcctcccgagtagctgggactacaggcgcgggccaccacgcccgggtaatttttgtatttttagtagagacggggtttcaccatgttggccaggatggtctcggtatcttaacctcgtgatccgtccacctcgacctctcgaagtgctggaattacaggcgtgagccaccgcgcctgtccgtaagtaccaactcttcacaaaatttagatctgttaaataacaccagtgaaaaacgggctaaccagaaacaatggtcaccaaagaaaccctcaacagcagaagttacaagtaataattttatatggcaaaaaaaaaaaaaaaaaaaaaaaaaaagagaaacgaaaccctgggagacgaatcatactgcaaatcatatccctgggtagcagggcagaaatacaggtaaacaaaatagagaggagggggatgcctctagcccggaaataagtgggtggtggagatggttcttctggccatattcgtttaccttttttgtcagcagaaaagtactgagtctacaaagtaaaaaactgaccacgatgaaaatttctgcaaagtaattaaaatgggagaaaaatggaaatggcttaaatactcggtataaaaaatcgaccaaggaatcaaatgggctcacggatttgcgtcagaaacgttgcttccccgataattggtcaacgtcggtgtaactatgattaaaatgtcagtattcaaacaagggctccaacactaccgtggcccaagggcgtcttcggctcccaccccggggcgtgggcctgggggtccctcttcactgcgcagccacctctagcccgccgctttcgggactctcagccttcttttcccttccctgagggccggccggcaccacaacggggccaaaggcagtaactcggttgaaaggcgcgccctgggacaggtcagcgggctccgccatgcgcgg

SEQ ID NO: 8608 - DNA, 2300 bp, Homo sapien
gcgcatcacacctcatttatttatttatttattatttatttatttttgagatggagtttcactcttgttgcccaagctggagtgcaatggtgtgatctcggctcactgcaaccttctcctgccaggttcaagtgattctcctgtctcaccctcccaagtagctgggattacaggcgcccgccactatgctgggctaatttttgtatttttagtagagacggagtttcaccatgttggccaggctggtctcaaactcctgacctcaagtgacctgcccaccttggcctcccaaagtgctgggattacaggtgtgagccaccgcacccagcctcacacctcatttattcttcacagcagcccttttggagacaggtctcaaagccaggcagtctggtcccagtatctgtgccctaagccagagatactatttggctccttagatgtgaggtacttataacttcccagtaaaaactgcagtgggatgtctggatctggagcctttgagatcatctagttacaaatgtctgtttgtgagtcatccagctagacttcaacctcagcctggtgtttggattctcagtctgtcatctaagagcagcgtgacattgtccttaatttcggagccctggtttccttgtctgaaaaatgtaactaatggctcctccctcctgggtgttgtggaaattgagagaggtgccatatatcatgtgcctgctattgtttccagcacagaatgatgccaggatggcagccaccatcccctactctaggtaactgttcagagggacaggcacagcaatgggcagagctaagacacctgggagacgtggccaggccacacatggctggaggggaagtgcaaggcagcaggcagaagcagagagcaggaggtgatgaggaaggagcaagatgtctcacgggaggtcaaggcgggagagagggtaccgagggagctgccaatgtcacctactgcaaagaagtccagccaggtgagttgcagaaagctgatggcatcaccctctgcccagtttatcagcagggctggccaagttcttgggcatggtttcagatggtggcactccccattacatagctctctgtgtttgtgtgaattttgttctttcattctcctttttttttatctgggcccctggcctggaggcttcccgtggatgcagctccctgccactgtcccagaggcctctcccaggagacaggatgtaccttggcccagggtgcaggctcaggagccagatactcatggttggaattggctgacccagcgtgaacttccttgcacttgcattcttcttaactgtaaaatggggacaatgtccaggcgcggtggcttatgcctgtaatcccagcactttgggccaaggtgggcagttcacttgaggtcaggagtttgagaccagcctggccaacatgacgcaacccatctctactaaaaatacaaaaattagctgggtgtggtggcacacgcctgtaatcccagcttcttgggaggctgaggcaggagaatcacttgaacctgggaggtggaggttgcagtgagctgagatcacgccattgcattccagccaagtgtgaaactccgtctcagaaaaaacaaaaaacaaaaaccaacaaaaaaacctgtctctactaaaaatataaaaattagtcgggtgtggtggtgggcacctataatcccagctactgaggcaagagaatcgcttgaacctgggaggcggaggttgcagtgagccgaaatcacgccactgcactctagtctgggcgaaagagcaagactccatctcaaaaaaaaaaaaaaaaaaatggcgacaatgatagcagccacctctcagggttgctgtgacgctgagagcagtgccaggcagagtgcagctgctctcacagtcatcactccttcctgcagtcactcgtcctccagccccgctcttatttcctctctcaccacctcctttgctctcaccgcctttccctcttttcctgtccccagtcagttttgtagcctctggcataccatcccaccacctttgccactcgtgggggtctcccttatactggctgtgctaggtgctttcatgtgcgtgttctctgaaaaccttcaccacccttatgtagatatcatcagccccattttacaaaggaggcatcagtcgctcacccagtgacagctgggagatgaaaccaggtctccttggctcagaacctgttcactctcactcttatactagtcacaggcagatgccccttttctgtgaatcagggactggccgtggggaggcctgctt

SEQ ID NO: 8609 - DNA, 2300 bp, Homo sapien
taaccaggcttgggataagctgggggagaggcctgaatacagcttataggttagaaaaggcacgccacctgcatagtaacagcacacacttatatatagcaggttatgctttcagaccaaattcgcatccattgcctgatttaatgccaacaatagccctttgaataagcagttatttcctttcccctccccccaccccagtaagaaaactaaagctatttagtggcagagacaagagttggaactcaggtctccaggaacaaatgctggttcttaagttccattttctggtagagtgacatttacgtgattcacggcaagaactgcaaactgtgcttagatctagttcatcaaatggccaagtttagaggctgggctgacgcttggatcagttctgtcagattcacttagttatgaagggcagctgcttactccctttgggccagtcttcccatctgtagaacaaggaggctcttccctcttcctcgacttgcccgaggcagggacttagtcattgtgttctttatacccagcttaattccaggcctggagatggcatgcaataaatagttgttgaatggctcacgcctgtaatcccaacactttgggaggccgaggcgggcggatcataaggtcaagagatcgagaccatcctggccagcatggtgaaacctcgtctctactaaaaatacaaaaattagctgggcatggtggcacgcgcctgtagtcccagctactcgggaggctgaggcaggagaatcacttgaacccgggaggcagaggttgcagtgagccaagatcacgccagtgcactccagcctggcgacagagcgagactctgtctcaaaataataaataaataaataaataaataaataaataaatagttgttgaatgcatgtctgactgattaagccaaaggcaccatattcaaacaaaatcagacactggtgcaatgccaaacagcttctgcccgtgcaaggaatgatttagcatggagcacagtcacctgcagaggaacaacttggaggcagactctccttactcagctcacttggagcagagcttcctgagttgggggttcttgacagataagccctccagcttcagcagaagcaggcttggagctgccacttctctgaacccccttgcacttactgtcagtcactcacaccttgcacttattcacatcctatcctgcctcgttcttgaatggagtccatggtgagccttctctgtgccgctggatggtaagcttcctggggacagggaatgggtctgatagtttccttggagcccctggcgctcccggcactgggctgttgatacgtggggctccggaaacactgtgctgacctgtgaaagggactggcctaaggggctgtggattgtcctgtagggtgacttctgaactgttcttcagcctgggcagttcccaggtttatttggggggatgcctgggtccaaagaaccagggtcaggggcccaggggtttcttcctggagacaggatgcctggcgccttcaataacggaaaggaaactgagaaactttctgaggccaagataaagagtatgcaagtgaggggtgcagagagagcagtttaggggcagcaggccccaaccgaagcagaggaagggcccacgtctgggcccaggggactgactggctgccttgcgtgcatggggcacgggaagcataggctcccggaacaggaccctgccccagtttccccagtgagggaaggacaccgttccccgtgggatagagcactgcaccctttcttgattctcattgttcccgggagcgagcgccttggctgcgctgggcatacccaccctggcgccattcacaggcagtgcctgccctggccctgtgctcaccccatcaggcctcctcttccgcctctctggcacccacggcgcccctgcttgcctctgtccgggtctcggaggcgcgaacaccatcccaagcctgcgaccgcgcggcatcacccccgcccttccccctcctccaccccgccctttctacccctcccgggagctcctgggagtcgggccgccgtgtgcgcaagcgtgtccagccccttccccgcccccaacccgggcccgggtccccgcctcccctgcaggcggactcgcccgctcccaggccggacccgcgcccgggacagggacccggccgagtcgagccgtcgcgccagcgctgcgccgccggtcggtgcgcctagcggatcggagctgcgcgcggaaccgtgctgccccgccccgctccacccgtgagggtgagtacgcggcggcg

SEQ ID NO: 8610 - DNA, 2300 bp, Homo sapien
cggcaagaactgcaaactgtgcttagatctagttcatcaaatggccaagtttagaggctgggctgacgcttggatcagttctgtcagattcacttagttatgaagggcagctgcttactccctttgggccagtcttcccatctgtagaacaaggaggctcttccctcttcctcgacttgcccgaggcagggacttagtcattgtgttctttatacccagcttaattccaggcctggagatggcatgcaataaatagttgttgaatggctcacgcctgtaatcccaacactttgggaggccgaggcgggcggatcataaggtcaagagatcgagaccatcctggccagcatggtgaaacctcgtctctactaaaaatacaaaaattagctgggcatggtggcacgcgcctgtagtcccagctactcgggaggctgaggcaggagaatcacttgaacccgggaggcagaggttgcagtgagccaagatcacgccagtgcactccagcctggcgacagagcgagactctgtctcaaaataataaataaataaataaataaataaataaataaatagttgttgaatgcatgtctgactgattaagccaaaggcaccatattcaaacaaaatcagacactggtgcaatgccaaacagcttctgcccgtgcaaggaatgatttagcatggagcacagtcacctgcagaggaacaacttggaggcagactctccttactcagctcacttggagcagagcttcctgagttgggggttcttgacagataagccctccagcttcagcagaagcaggcttggagctgccacttctctgaacccccttgcacttactgtcagtcactcacaccttgcacttattcacatcctatcctgcctcgttcttgaatggagtccatggtgagccttctctgtgccgctggatggtaagcttcctggggacagggaatgggtctgatagtttccttggagcccctggcgctcccggcactgggctgttgatacgtggggctccggaaacactgtgctgacctgtgaaagggactggcctaaggggctgtggattgtcctgtagggtgacttctgaactgttcttcagcctgggcagttcccaggtttatttggggggatgcctgggtccaaagaaccagggtcaggggcccaggggtttcttcctggagacaggatgcctggcgccttcaataacggaaaggaaactgagaaactttctgaggccaagataaagagtatgcaagtgaggggtgcagagagagcagtttaggggcagcaggccccaaccgaagcagaggaagggcccacgtctgggcccaggggactgactggctgccttgcgtgcatggggcacgggaagcataggctcccggaacaggaccctgccccagtttccccagtgagggaaggacaccgttccccgtgggatagagcactgcaccctttcttgattctcattgttcccgggagcgagcgccttggctgcgctgggcatacccaccctggcgccattcacaggcagtgcctgccctggccctgtgctcaccccatcaggcctcctcttccgcctctctggcacccacggcgcccctgcttgcctctgtccgggtctcggaggcgcgaacaccatcccaagcctgcgaccgcgcggcatcacccccgcccttccccctcctccaccccgccctttctacccctcccgggagctcctgggagtcgggccgccgtgtgcgcaagcgtgtccagccccttccccgcccccaacccgggcccgggtccccgcctcccctgcaggcggactcgcccgctcccaggccggacccgcgcccgggacagggacccggccgagtcgagccgtcgcgccagcgctgcgccgccggtcggtgcgcctagcggatcggagctgcgcgcggaaccgtgctgccccgccccgctccacccgtgagggtgagtacgcggcggcggtgcgcgggggcccgcggggcggggcggggcggggagccgcggggtcctcggccgcctgaccccagccggcgccgcgcctcccggagggggtcgggccctgcacgtgggcgcagcgcgggtcggggtggggctgccacagccctgcggagctgctttccggggtccctttccctggaccagattttcgcgggaagccggatcctctccgttcccttggagtgagcaagcgggacagttctgcggaaagtttccgcccccaatcccccagccctgcgcccggactgaagcggcggcccccacctccagcatcctc

SEQ ID NO: 8611 - DNA, 2300 bp, Homo sapien
ctcctgctggggaagggagccctttccaggattaaaagtccagaaaggagcagattcttagttctatccagaaaaccggattctaggagtctaacgaggttgggaggctggcgggggcacggcactctcttcctgagaagcagagggccagtcactgcttcccgtagggaaggcagcccagaggcacctcagcctgggccgccagctcacagagaaggcggccctgttgtctctgaacaacaacccatccccaagctaaagacacccactctgcccaaagtccaagctggcaatttccaattcactcttctaactcttccttccatgtgcaccctcacaacctcggttaccatcttggagtctgggggatctggccccaactcctggcaagctccccatgtcttgacagagcccagggcccatggggcagcttaggatcacccacccagcgcaatggggccaggcacaggagcagtctgggagtgggccaggagcagggcagggaacggtcaaggggcattcccagaccagctctcagcaagcaaaacaacctcccgagttcatttctaggccccaaacagcgggcacgtccccggaacccactctagaattatcgggcagctttggagagtaacagcatgggagaaatattaccaatagtgaatatttatacagctctccctccgtgcaggcgcctttcaaagcacttagcatatatcaactcatttaaaatccccctggcagatgccagggccaggacctagaggaggtggagtctgtaggacgggtccggcacagctcaggagacagtgacacgggtgtgtgtctcttgtgagaactcagcctgtaccaggcctgttcccaaagttcaaaaagaatgagtccgcctgagcctggcttccacgcggtacccgcctccggcggtggaaagtacaggcttccccaagaggcctgtggggggtgccagcttgtgggtggccatgaggtcagacagggcacagctgggcacccgaacactgcctacactcccagccttctggcagcagttcccttaagccaggccctcaggacccaggctggggagcagaggaagcagccacagtaggtcaggcctcaagctgcccagacagagcctccccccaggactgggaatggaggggcagtgctggcagacatgttggcagttctgggctggccgggaggtccctgccagccaggtccccgaggaaacacccacagcagacagctgagcccactccccccatcgcatccctcccactgctcaccacccatgcagccctgaggcacagtggcctaggcctgacgacccccataacgtggccctaggaccctgggcacagccggcctcccactgacaactccacctttgggtcctgctcagcgaccttgcgactcctgcacacaggcggaccccgcaaagcctgtcacctccagcacagtcagctcccaagtgctggacctgaccggggtagttgtgggagaaaccatcgctcgaggatgctggaggtgggggccgccgcttcagtccgggcgcagggctgggggattgggggcggaaactttccgcagaactgtcccgcttgctcactccaagggaacggagaggatccggcttcccgcgaaaatctggtccagggaaagggaccccggaaagcagctccgcagggctgtggcagccccaccccgacccgcgctgcgcccacgtgcagggcccgaccccctccgggaggcgcggcgccggctggggtcaggcggccgaggaccccgcggctccccgccccgccccgccccgcgggcccccgcgcaccgccgccgcgtactcaccctcacgggtggagcggggcggggcagcacggttccgcgcgcagctccgatccgctaggcgcaccgaccggcggcgcagcgctggcgcgacggctcgactcggccgggtccctgtcccgggcgcgggtccggcctgggagcgggcgagtccgcctgcaggggaggcggggacccgggcccgggttgggggcggggaaggggctggacacgcttgcgcacacggcggcccgactcccaggagctcccgggaggggtagaaagggcggggtggaggagggggaagggcgggggtgatgccgcgcggtcgcaggcttgggatggtgttcgcgcctccgagacccggacagaggcaagcaggggcgccgtgggtgccagagaggcggaagaggaggcctgatggggtgagcacagggccagggcaggcactgcctgtgaatggcgccagggtgggtatg

SEQ ID NO: 8612 - DNA, 2300 bp, Homo sapien
ccagcactttgggaggctgaggtgggcggatcgcttgaggtcaggagtttgaaaccagcttggccaacatggtgaaaccccgtctctactaaacatacaaaaattagccaggcatggtggtgggtgcctgtatcccagctactagggaggcacaagaatcacttgaacctacaaggcagaggttccagtgggttcgtgccacttcactccagcctgggtgacagagggagactccctctcagaaaaaaaaaaagaagaagaagaaaaaaaaaaaggtgggccccggcagcagagcctactgtcccggaggcaggaggaaaacctgaagggaatcttgaccttgacctagaagccaaggaggaggcatggccaacaacatcaaaggcctctgagcagcgcagtgaagactgacaatagacctttcttaagtttggcaattagaaggtcattggcctcagcaagagcaatttcagaataaaaacaagagtggagggagtggcataggggtcgggggacagagtaggaagtgagggtgtagtagaggggaagaagtttgatcactgagggaaggagggagatgcaggggtagcttgaggaggagatagagcagagagaggtttgctgtttattttaggaagaggagacttgagcatgtttataagtcagagaatagagaaggagaggtgggagacacagggaaaagaggagtcattgattgggaactattctgggaaggtgaggtggatctggtgtctaggtggaaggatttgggggaaagaggggaggtaggagagtctagacgtagacagcaggcagacaggggctccaggttttccctacagaactgaggacagtgatggccgagcgtggtggctcatgcctgcaatcccagcactttgggatgccaaggtaggtggatcacttgaggccaggagttggacaccagcatgggcaacatggagaaaccccatctctactaaaaatacaaaaattagccgggcatggtgacacatgcctgtagtcccagctactcaggaggctgaggcacgagaatcatttgaacctgggaggtggaggttgccgtaagctgatggcaccactgcactttagcctgggcgatagagcaagactgtctgaaaaaaaaaaaaaaaaaagaagaagaagaagaactgaggacagtaagagtaagtggtcgcttgtgatcacagaaccagcaagtaaaccgcgagcttctgcccctctggtcttcccagaccccttccccggaacattaagccatatcgcttttatgggtccaggggctctgaggggctgggcatcatactgtgcccctgggggcatatctagttctgccccacttggttgggcgggtacctgctgagtactcactgtgtgttaggctgtgaatgctggggcagcaggaggcatggtttctgcctccactgggccttatttcttcaccttgtcccccagttctgcccttgggtaagttctgtggcagaactgaccagctcccttcggccagggacatcttggttcctggcagagcaccaagaagagcagattgtcttcctacccgggggcacctttgcccagcaggtcgggtgagctggcctcttggtgagaggctggtccccttggacatgagtggattcgatgcctgctttcccacccaggtactctactgtggctttgctcctgccctttatgctcagagctagaccagcaatgtgggggagctgctggggaaaggcgccatgttgtcttgaggtagcagccagccccggaagccctggaatgcctggggccactgagcaatcctcaccctcagccccacaaggggagggcgtggctcgtgaaattcctgattgggtatagcccagcaagccccaagactcgcccagtttgcttagcgcaacactgacgctgttttggaatgaagacaagacaatgtagaactttactggggaagaggtcgaagaagggctaattgtcttgttgttcaagactggttagcgctgctcacctctgacgctgctcacctctgacgccaaaggtttttccctggaaggcagccctggaggatacctgtgtatctgtctttcacaaaaggtgaaatgagctctttgtagtgtttcccgcccaggctgcattttagaatcacagaggaggtacggcgctgatttgttttactattccctattcatgcctgggccccacccctaaccaattaaataaacatctcggagagtggggcctagactttatatgtttaagctcctcaggtcattgcattgtgc

SEQ ID NO: 8613 - DNA, 2300 bp, Homo sapien
ttcttcagccataatcaagaatatcaggcttgaccagtgcttctcaaacttggacagatagatgaatcgccagggtatcgtgtttaaatgcagattctgattttataggtctggaaggggccaaagaatccacttgtctgggctctgggatgcccatgggactgatctggccttttttgagcagtgggaataggctgacttctcagtttgacagcaaggaaactgcaggtcagagagggaggtgtgatcgtccacggtaaccaacctgatatgcattcagtactttctgatgtactctactgtgtgccaagcagcatgctacatgtgggactagagctgcgaacaggacagacccaattccaaccctcacagagcttatatcccaactggggagacagacagaaagaaaacaagtaactaagctgatgacagatgggaaaagctatgaaggcgaggagggccatgtgtagggaacgactcagagattgctgtggggtgaggggtaggtaaggcacgcccctttcagaagagctgtcgggggagttactaggacaatacctttaactggggactcctgctgattacaaactgatcacttttctttactggacaggactaggcttcatcccctctggggtttggggatggtgcttctgactctcctgaggcagtctgaccctggtccctgcctggctgtctcctctgactcaagactctgatccttcagtgtttgtgggttcagagcagagcctgggaatgagcccgctggggagcaggacactgactccaccataggacagggctcaggatcattggttaatggtttgtaaaatggaccaggcctcatccagatgctgtccccagcccctatgaaaacatggaaagtttccactggtgcacaaacactagtgcttgcctccctttcctgatcaaccgtcggactcacatgggctgtttgtgaaaatgcctgtcccaggccatactcaggctgaccaaggtggtctggtctccagggaagggccgtgaaatgtatttttaggaagtggtccaaaggactcttctgatccagatcatcaggaagcatggcgtggatggaagaaactggcacttggcatctggtgcctctgtgtggctgtagaagctacagaaatgtcttctgcagtgactgcagcgtggccctggctgagctggtgcttgtgaggaagcctctgcttgtgtgcaggggtgaacagcagctcaccccttcccatgcacagtcctcaccttactaccttcacccttactggaagcatctcttgacttctctttggccagccagaccctcccagctccctgtgctccccatttaaacaccttccctccctgagcttagcccatggctgggtggggaggcgtgagcactgtttgcatttggtcagggcctagaagggatcaaggaggcctcatgaggaccatgtcatagccccaccctcactccccacccctgacctgagcaaacctgtttggctggattgatgatggagaggcaggcagtgaccagaccaagagacgccttggatggtggagaataggtgaccctctgttgggtaaaagaggactcaagccctcacacagtgagttggctaactttttgtctcaacagtgggcgggggtagctgtctgcctcctggagctggcccttcctgggtcaaaatgcagaaggagatggtgagaagaaccacaccagagaggctggagtaggccagcctggcttgggaccgagtcccgagtccctggctggaccctcggttttcccttccgtggcagggctcacctggatccttaatgccgcccttggaggagttaggaggatcctggatgagaaaactcaccctcaggatgattgccccagggagcagcttcctgctttctggtggaagggaggggcagacagtgggtgtgtcctgctccagtgtctaggcaggagagtttgtgaagctgaccggacacctgtggctcttatttcctaggtggcccgaggcagccgggatgacagctctccccaggaatcctgctgcctgctgagaaacatggtcagcaagtcccgtgagtgtcatccgagggctcccccaccctggaggacaggcctcagaagccgtcttcagcaggatcctgggacctctgggggctgtggagggacagacagggagccaggggcccttctcttcatcttgaaggacagtgggtacaatcagggtcaagccctcagccagggccaggagagggccagagactgcttctgttgagttaggggtcggagg

SEQ ID NO: 8614 - DNA, 2300 bp, Homo sapien
agctagccaaactcataatatttgcttgtgtgttccaactgtcatactctaaactgtaacataaagaaagtttctagacacaattttcttttcactgtttacaaccacttttgtatcttatagaaataaaatagaaaaaacacacactgattacaagatgcacagtacctacgaaaatctctacaggatatgtgagatcagctttcttccagagagtgggtaacaattaaaacaccagtttttgtcagcaccaggcctaaggacagcagcctggaacccagaacaagtaggatgagacaggagtctctaggtagagggtaaagatcagcctaggtacctgccagggaaaaagcttcagtgtgagaaggaagctcctagctgagccccgccctgccaggcacacatagtacggacccgcagtgatgcctgttgttatcaatgtatggatagtattggtagtttctagtagacttgagctgctgtgggggtctgtgcatgttggattggacttagaggagggtggtaaaaaccagttcagagaaatttgtagatgttaattgcaaactgctttctcttcaccagaagcaatctctcccttctgagatgggcaacatcatctatctccatcaggcccaatgggctgctccaccttcgagcgcttaattagtttgtctttctggatgctctgtcctcccccatcaaagacaagtaattggttctcttaaacatggggcatccagaactgatggagaagtcttttcaagggatcatggaactctgtgctagggagaagacaggcctcagattctgtcaggtagggttctagatggtgctgctgagaggctaccttattttcacaagttccaatgctagcagggactctcctggccaccttaagtggcgtttccaggagaaaggctgctcctctggtaggctgcaagcatcacttcgatttgtgaggtaagacaaaaaggacaggtgaactaggaggatcacaccggtacctttgtgaggagcaagcatctccccttccttcagactgggttgtttagacccaaacttgcccttggtcctcccaaatgctgctatttccctctatatgattgagtcagcatttctactttatatgaaactgatattatagcaaatcttatcaccatgaatgtaatgaatcttcctgccaagttatcatcttgtgtctctcagaggtgtgtcttctttcccaaggtcactctgggcaacttgagtgagccacaggttcatacaggggccttgggacaatcattaggagaaacccagtacaaataaaaatctgattagactttacctcctctgacttttcaccacctcctctatcctactctaccaaccttcagactcttctagctacaggctttcccagagcccatctctggggataaaatggactcatttagctcattgaacagatcatcaaatgcccactcccccaagaaaagaagcagtttggaccacaggcaggtcagaatgccctagcacttccacaaacagcctgctctcaaaggattgtcaaacgtgcaacaaatcagtgttctctcatcaaaagcatcataactcatttaacattgagcctatatctttttaaatatatcctttttttctagattggaaaaacaatagttgtttcttttttcttttatttcagcagggttccagataataaaaagatttataattacgccagtagatttacttttgctatgccgccctagattatgaaaaagtataattatatgcaattaaaaaatgaacagtatttcttacccgagtgaagctttaaaagtcattatgaatccattagctcagcagaccttacaaacggccttcactactctggactgcatttaaatttacaacagagagaagtaacttttcctcatttccacggtgtgtgtgtgtgtctgtgggtgcatgcattttcacccttctcagccatacctggaagtggccattcatttttacattctaaggccatgttcttagtattgaacttgaccacacagctcataatgctttagaagcctccagctagaacactgaggaatgacctcagaattcttctacttagccttgtccctacctctttactcctctgtaggcagtaattcttttttcttttctttcttttttttttcttttggtgtaacagtatcgcatgagccaagactgtcatgaaactatttggatactgtactctggttccttcatctcctccatctgcatcagcctaaattgtcctagtgagttcacttatgtctggg

SEQ ID NO: 8615 - DNA, 2300 bp, Homo sapien
cccataggcttaatgcaaagctactactaaggtgacggcgctatacatagagttattttcagtcttactgtgttatttggcatatgttatttaaaattatttttcatctcctctgtgtgtttttgatttgcctcttccatttattgcatgatctgttacaccaggctaatggactcaggctcagctgacactgcttcagtaacttgtttgttaatttagctaatgggctgcctcttttgtgtccttttagtttctgttgctcaacatttctgtttctcctcccaaagtttgcttacaaatttccctttgctgtgtttaacagcctctaagggatgcagttaaataaactattaagttaagaatagaaaagtcaacaaagcagacacctactaatttgtagatctttggtgtcaactaccagatgtcagctcctactagcacacttctatatgcccctgcttctttctttcttgttcacaaataccaagggataattttttaaagttaacatccgcatggaaacttggagttggaatgtgccttgtagtgagcagagtcctcaaaagatgtgctactactgaaagaggaaaggctaagagtttcccaaaagacctccccaaggtccagggactgaagacagtaatgactgattttagaattgaatgctaaatggcacatgtcaggggagcgtctttcattttcctctcctctctctttacctctccttctcacagtgcataacgttgaatatttttctgtgttgttttgttatgtccttagagtttgcatcttgtgtgtgtactctgcttgcacactagattatgagcttctgaaggcatggtctgtgcctattattttgcttccctccatggcctgcttataccaagcatgcctaaatgtctattaagtaaatagacccagataaattcatgttgatatcctggaggaaaccgagtttgatttgagtgtggagtgtgaatttcatgacaggtaaaaggcttgaagatccttaggacgcagttgtctatgaccttggcctctcctttgcaattggactcacagcacctcttggagaaaagacaggctcagagtgatggagcgctcattagaggagaggctctgaatgcaaagacaggctgctcccctgtcctcgttaggaaatgcacaaaccaggataatgataataaatgggtgtgtgtcacaagcctacttgccttccctttagttcctgcattttgtcttccaggagcagtgcaaagcaactaagatccaaatgttcaggttttattacctaccccccccccccaccacaaccacccacccacccacaggaaactctcagaaatgcaaagcatgcttatctcttctccaactccgagcctcccgctgcacacattggccaagtccttccgagggaaagatgcgcacccccccttcctagttccctttcagcccagtttccagttcctttgcaaaggcagggcgtgcatgtttttgtgcacatgcatgtggatagtcatccttaacttcactgttaaacaggacatcgtgtggacaaaaagtcacagctccactccaagctcaagatgccttttggtcaataatggtgacaaaagctgaatttttccctatttagggaaaagaaagaacacagccttttcccccactgtccgttttgcatagatctcctttttccgagtgtttcctctttaattatgacctgtctcccctccctctcccctcgcctcagcttcagtgaaaggagtccttctgtcactcgtcactagctcgctcgctcactgtgggaggagcccgcctgaggaagccgtgtgcctgggatgccaagagccagagaatggatcttctccgagtggggacattgctgacaatcccggcttcccgaggcggctaagaacaggcagtttgtgtcggctggctgcagatacccagaggcacaaagagaccgaagccacccggagggacccacggacggacagatggtaggcgcgaacccgagaggaccggcggaggctgagcaccgagagccgccaaggaagagaaactaaccacagccaagttaccccgccggctttccttcgctgcgctaaggaatgaaacccttccagctcgatctgctcttcgtctgcttcttcctcttcagtcaaggtaggacccctgcgctgctggagttggaagaaagtcggctgggttgtcagggcgcgggaggctgtgggcaggaacgtgggcaggcttcgggaactcggactgatggatgcgtctctcggtgccgggctgagatg

SEQ ID NO: 8616 - DNA, 2300 bp, Homo sapien
gctcctcccacagtgagcgagcgagctagtgacgagtgacagaaggactcctttcactgaagctgaggcgaggggagagggaggggagacaggtcataattaaagaggaaacactcggaaaaaggagatctatgcaaaacggacagtgggggaaaaggctgtgttctttcttttccctaaatagggaaaaattcagcttttgtcaccattattgaccaaaaggcatcttgagcttggagtggagctgtgactttttgtccacacgatgtcctgtttaacagtgaagttaaggatgactatccacatgcatgtgcacaaaaacatgcacgccctgcctttgcaaaggaactggaaactgggctgaaagggaactaggaagggggggtgcgcatctttccctcggaaggacttggccaatgtgtgcagcgggaggctcggagttggagaagagataagcatgctttgcatttctgagagtttcctgtgggtgggtgggtggttgtggtggggggggggggtaggtaataaaacctgaacatttggatcttagttgctttgcactgctcctggaagacaaaatgcaggaactaaagggaaggcaagtaggcttgtgacacacacccatttattatcattatcctggtttgtgcatttcctaacgaggacaggggagcagcctgtctttgcattcagagcctctcctctaatgagcgctccatcactctgagcctgtcttttctccaagaggtgctgtgagtccaattgcaaaggagaggccaaggtcatagacaactgcgtcctaaggatcttcaagccttttacctgtcatgaaattcacactccacactcaaatcaaactcggtttcctccaggatatcaacatgaatttatctgggtctatttacttaatagacatttaggcatgcttggtataagcaggccatggagggaagcaaaataataggcacagaccatgccttcagaagctcataatctagtgtgcaagcagagtacacacacaagatgcaaactctaaggacataacaaaacaacacagaaaaatattcaacgttatgcactgtgagaaggagaggtaaagagagaggagaggaaaatgaaagacgctcccctgacatgtgccatttagcattcaattctaaaatcagtcattactgtcttcagtccctggaccttggggaggtcttttgggaaactcttagcctttcctctttcagtagtagcacatcttttgaggactctgctcactacaaggcacattccaactccaagtttccatgcggatgttaactttaaaaaattatcccttggtatttgtgaacaagaaagaaagaagcaggggcatatagaagtgtgctagtaggagctgacatctggtagttgacaccaaagatctacaaattagtaggtgtctgctttgttgacttttctattcttaacttaatagtttatttaactgcatcccttagaggctgttaaacacagcaaagggaaatttgtaagcaaactttgggaggagaaacagaaatgttgagcaacagaaactaaaaggacacaaaagaggcagcccattagctaaattaacaaacaagttactgaagcagtgtcagctgagcctgagtccattagcctggtgtaacagatcatgcaataaatggaagaggcaaatcaaaaacacacagaggagatgaaaaataattttaaataacatatgccaaataacacagtaagactgaaaataactctatgtatagcgccgtcaccttagtagtagctttgcattaagcctatggggttgttggggagaaatttcaggtgtctgcgtgccattcttgcagggaataggacaaatactagaatgcagattctctatcaaaggtagcaacatttgacgttttaactaaagatttatcctttaagctgttgtttaattttgagtgctaattcctcaatggcccagggcccagatttgcttaattcagcccccgagggaactattacaaaaccagggtcacaaggctagtgaagtgtgcaatacgcaataatcaggcacacgtacaggtgtctgcactccacactcgcactgactcttggaaagaagaggggggcctgggagatccaggttggaaggatcttgtttcgctctcccattggcccccaacactggcctcatggcccccttactggctccaggcatccccctcacccccaccaacgagccagctgggcctgttcccctctccactcccctctactccctccctgtaacctccggtctcccg

SEQ ID NO: 8617 - DNA, 2300 bp, Homo sapien
gggtcctgcaggtactgctcgcgttctctgccccacgtggtggctgctgaagattgccgtgggttttccggcactcaggcttgatacgcctcctggtccttttagaggcgggcagctcatcacttaatccaagcttttttttttttctttctttctgcgggagaccggaggttacagggagggagtagaggggagtggagaggggaacaggcccagctggctcgttggtgggggtgagggggatgcctggagccagtaagggggccatgaggccagtgttgggggccaatgggagagcgaaacaagatccttccaacctggatctcccaggcccccctcttctttccaagagtcagtgcgagtgtggagtgcagacacctgtacgtgtgcctgattattgcgtattgcacacttcactagccttgtgaccctggttttgtaatagttccctcgggggctgaattaagcaaatctgggccctgggccattgaggaattagcactcaaaattaaacaacagcttaaaggataaatctttagttaaaacgtcaaatgttgctacctttgatagagaatctgcattctagtatttgtcctattccctgcaagaatggcacgcagacacctgaaatttctccccaacaaccccataggcttaatgcaaagctactactaaggtgacggcgctatacatagagttattttcagtcttactgtgttatttggcatatgttatttaaaattatttttcatctcctctgtgtgtttttgatttgcctcttccatttattgcatgatctgttacaccaggctaatggactcaggctcagctgacactgcttcagtaacttgtttgttaatttagctaatgggctgcctcttttgtgtccttttagtttctgttgctcaacatttctgtttctcctcccaaagtttgcttacaaatttccctttgctgtgtttaacagcctctaagggatgcagttaaataaactattaagttaagaatagaaaagtcaacaaagcagacacctactaatttgtagatctttggtgtcaactaccagatgtcagctcctactagcacacttctatatgcccctgcttctttctttcttgttcacaaataccaagggataattttttaaagttaacatccgcatggaaacttggagttggaatgtgccttgtagtgagcagagtcctcaaaagatgtgctactactgaaagaggaaaggctaagagtttcccaaaagacctccccaaggtccagggactgaagacagtaatgactgattttagaattgaatgctaaatggcacatgtcaggggagcgtctttcattttcctctcctctctctttacctctccttctcacagtgcataacgttgaatatttttctgtgttgttttgttatgtccttagagtttgcatcttgtgtgtgtactctgcttgcacactagattatgagcttctgaaggcatggtctgtgcctattattttgcttccctccatggcctgcttataccaagcatgcctaaatgtctattaagtaaatagacccagataaattcatgttgatatcctggaggaaaccgagtttgatttgagtgtggagtgtgaatttcatgacaggtaaaaggcttgaagatccttaggacgcagttgtctatgaccttggcctctcctttgcaattggactcacagcacctcttggagaaaagacaggctcagagtgatggagcgctcattagaggagaggctctgaatgcaaagacaggctgctcccctgtcctcgttaggaaatgcacaaaccaggataatgataataaatgggtgtgtgtcacaagcctacttgccttccctttagttcctgcattttgtcttccaggagcagtgcaaagcaactaagatccaaatgttcaggttttattacctaccccccccccccaccacaaccacccacccacccacaggaaactctcagaaatgcaaagcatgcttatctcttctccaactccgagcctcccgctgcacacattggccaagtccttccgagggaaagatgcgcacccccccttcctagttccctttcagcccagtttccagttcctttgcaaaggcagggcgtgcatgtttttgtgcacatgcatgtggatagtcatccttaacttcactgttaaacaggacatcgtgtggacaaaaagtcacagctccactccaagctcaagatgccttttggtcaataatggtgacaaaagctgaatttttccctatttagggaaaagaaagaacacagc

SEQ ID NO: 8618 - DNA, 2300 bp, Homo sapien
aagactgagggcactcagactgagtagaatgaacacaaagcagtttgaggaaaggtcagaaccaatgacagtggagaggcccacacagatctcagggttgtcacttgctcacttgtttttttggggatagtgacccaccactcgaaataatctgccctaacactgatggcattaaagagcatttccatttgactccatgatgaaaggtgtggcctctggaacagaagacaatgtgattttaggattctgaagaatcctggagatccactggctcaaacacatcatttaatagatgaagaaaggtgtgcccaggttcattaaggggccacattggttagcagtggccaggccagcgccacatcaaaaggctcaccagactccctccatgaggcctgatcctcaatgaatcaggggagcagacaacctgcccttcaggggatgcttctgaaagttgaatatctggttctctgagccctttccctctgcaatggaaagaccaactgcagggagcagggttaaggtctcgtaatccacctacacagaagtaagcaagaaatctggttcagataaatgaaaaagaaataggctagaagactgtgactgcccaggtcataaaggctgccacccagcgaggacctctgacgaccatctggtctctggaagtgtacgtagcttggagtccttattaacttacctacgactggagagtcaggttaccctgaactcccagtaggaggctgttcaaaatgtgttaaatccctggacaaaagaggtttaaccagtactggcaggatatatgaaaaacaaaaagggaatgcggtttctaatgtatctctgcaacaaatactgtgaagaggcattaaacaggcaattctctgtacatgatgactgcccatctcttaaaagagccgctccctcttcttggtgataatggtgtctcatgaacacagaatagctgtgactgtgagcctggccagcatggcagtggggaagatggagaaggataggacagtggggacactgggcccaggtgggagccctagactgttgcctgggcccaggtgggggccctagactgttgcctcatcctgcagctttcctgcagggccccaagcaagctaacctagaaggatgcatctctaatggaaaggaagagcccagacagatgccatccagggcaatttctcttattaaaatgtcagtgagatgttttataatattttcccacatacagacctgtatatacctctttccaactagaggacaaactttccaggaacaggaattctcatagttattccacatgtctttaagtatccaaaacaggcctttgaacaaaccgagggaataacacatgatagacattgggctgacagccacgaggaaggtcaggagaaagtggcggtgagctgaggtctgcagtgtgcccaaacgccagcctgctccgagcactcgacagccgtacccctcactcctgcaccgggacccagaaccttgcacatcactctcttcgtcccagatctcagaaaaccctgggggcaacacgcagcaaggcttggaagagcaggagagcagggcttggacgctttccgggggagccttgccctcctgtcacttcttggccagccagcagcagaacctggggccggccggcatcctctgtaggctcccgcctccgcgagggtctgggtcacccagctccggctcgccccgctggcggaggtggggggcgggccaggggctcacaggacccagcacttggcaccggaggcttggggagggggctggggactgatggattcggcctccggactccacgcctggcgaagaaacgctggagaggatgccacctgctggcatcccgccggcttgcacggtgggcacaagagacctggagccagcctggatgtgcagaaacccagaattcgggcggttttccaagttgctggctttcggctgtctctgtagggctgccgcctccaccgactgtccagagaccccttcccccgcgcgccgcccccggacgcgaaggcttccagcaggggcggcggtctctctcctctcccctcttgcagcgcactccgaggtctagggactctccgcgcttctccatcaggtggagccgtcggctcctcgccgcctccctcctcctccctcccccggagcgaaccgcgcgcaggcagccttgcagcgccaggaggctaaccgagcccccggaggaggtgaggccgcgggcagccgggcggagatggcggggccgccgtcgaggctggcgccagagcccgaccggctgtgggtcc

SEQ ID NO: 8619 - DNA, 2300 bp, Homo sapien
tcacctgcagattttagcacagaactccactcacagcaggtgttagatgatcacatagtttgtctgcaacctatttgcagatgacacaggtatgacgagcccaaacctctgatccttgaagcttgtctgtgttagctggacatttttgattgtaccaaatggaaatcaaattcaaatcatttcaagtaataacagggatttcatggctcacataactgcaaaatctctgggtgtagttttgctagctgtaggcacaggtagatcagagtttataaatgttgtgaggagtctgtttatctcaatttgttagctctgtttttgtcgaggttggtttggttcttgagtagactctttacatgtgggggcagagatggttcctagcattgctgggcttatgttccacctgattaataatctcagaggaaagagagagcctctgtcctattcctgacaaaattccaatgcccacccttcactgtgacctgattagctacttccaaacccgaaggtgagggcttagtaggctccattggaaccgcaagaatgcagagtgggcagagatgtacactccgtttttttttttgtttgtttgttttttgttttttttttttttttttgagacagagtctcactctgttgcccaggctggagtgcagtggcacaatctcagctcactacaacctccgcctctggagttcaagagattctcctgactcagcttcctgagtagctgggattacaggtgcatgtcaccacgcccggctaattttgtattttcagtagagatggggtttcaccaagttagtcaggctggtcttgaactcctgacctcgtgatccacccacctcggcctcccaaagtgctggaattacaggtgtgagctaccgcgccctgccgaagtgtacactcttaaacagaaatgaggggaatggaggctgagcaggcaagaacaacagatatctgacctagggttatttagcttttcatgggaaaatatattccacaaccaaactactttctttaacactgatatcatttctgatgctaaacaggcattgtaaaaaatgcacacattaatcataagatgaaccaatcctgcagcaagtaaaaagctcagggcacctcgtcttctctatggaatatcataacccatgcaaacttatcctaaagaagtaaccccagatgcataccaagagtcaaggctgttaaatgcagcaatatttaagtaaaatagcaacaaaatattggaaataacataaatatccacaatagagaaatggttaagtaccttatagttttttgctattaaaagtgctgctcctaaaacgtacttgatatagaaaaatgctcaggaaattacaatacgatgttccacaaaaacgccaaaatgcaaaagtatttatatttgacgatcccagatttgtgtgaatatacacagtttcactaaaggctggaaggaaatactccgaggtgttaagagttctctgaatggtaaaattgccagtgaattttttctgcctttatacttttctgtttcccaaatttttgcacaggaacggtatcatttcatgattgaaaaaacacacttaatatttttaaatgcatacttcagtgtcagtgccgtggaaaacacatcccattggatttatggtgcttgcaagtgggaggacccattctttctggggcagaggccagaatacacacagagaagagctttttggcttgcgttgccccaggctaggcaagagggcatcactggcttctgtttctcatgggtcagggttcctgttatttccatatgggtggtttcttcatttgctgctcactcaggcttccggggagatatccacccacctccttatttactaagtgggggaggcagagcaggaggaagatggagagagagaagagagagtgctgaaatctttccccctaaagcactgcaataaaggagcatatgtatcaactaaaaaaattccttggcaacaaaagctttttaattgaacacagtctcttcagccaacttatgtaaattctatcccaattttgggcatctattttgagcacagagagaagcggtatgaatcttgccctaaaattgtgctcaacagaaggggtgacgccatatggatgccatgttatgggagcctgtcacctgctaaccgagatgagaaattacaggttataatccccttcctgctgtctgaggagcccaggtgggtggggagcgctttgggtatcaggtactgggtgatccattgatacttgcttggggccttcccacaggtgtctgagaggtc

SEQ ID NO: 8620 - DNA, 2300 bp, Homo sapien
catttttcccttcaaatttaactctgctgacttctgcactgaggattacctaaaggccaagtttgacattcttaatccagccatttcagagttatctgagaacagaaaaggtacagggataaaggcttgaagtgttaactctgggagtgccagagggagttgagatgggcagtgtccttccctgagtatcctgcagggctcagacctgtaggatgcccccatgagcttggctatattaaagatccttttagatccctgagccccttgtttggttggcctgtttttaaagctgcctacagataaactacatagccactgaaactgctgggaagatatcatttccccaaaagagcttagctggagagacaggacccataagaaggtattgacttgatggaacccaagctgtcaaaggaaatcaacaggagtttattttgcaagtgcctactatgagaccagtgaagtaagtactgggccaggaagaagacccaatattctatggaaatcatccaaaccagaaggaatttttatatcagttcagctgctattattgagcacctacaatgcaccagacatgaagctctgtgctgactggtaaatccacaatgaacaaaacagacgttgtttcttgtcgtcatagaattaatatttcagactatttatatgaaattatgccacattttcttttcaattttattctgaatagcaatagaaaataacagggaagcacagcagaaatgcattcttcacttagattaaaagatcctacgagattctcacacattattcataggcatgattgggacactggcagtggagcattgcgatcaaacacacacacacacacacacacatacacacacacacacacacacacacaccccttacctcatgcatgctctttgtttagaattagaggaaagaatagtttgcagtttctagaattttaataaagagaaattagagggcaaactcctccctattgaggatcttacaatcagtttgaaaaggctctcacatgtgagacacctagagaacaattcaaaacaatatatagtcaagttatcctattactcagtccacttgcatcagatttaaacataaattctgcctccttaagggagcagactgcttctaagaacttggcattaatcactgggatgcagatgggtacaaatagatgctgccaactataaatgagtcttatccattcaataccttaggtctcatcaggaatatgttatatgtcctgaaagtcataaaagtgcattgtaaaaagattacaatactttcacatttgattttaaaatttatctgcattgcctgagttcactcaactatccgaaagcctactatgtctaaggcacaatcgtggtccctggggataacacagtgaacaatacagttccacatggcacctgtcctcaggaagcttacattttaatgtatgatctaagaacaggttaaaaaacacacattaataattgcaatctgtgagaagtctatgaaaaatagacaattgtggaagggatctgctttcgatagggtagttagggaaagcttagggatgcataagggttagcaacattgcagccaggctagagagcgagagagaaaggccaattggatacaggtaatgactgtgaagatggaccacgtgggaaacagattcaaggggtattaagaatttactgtttcaatggttgatggggaagaaagacaagaggaatcaaagataactgttttgtttttcgtttttgtttttttaactagagtaaatgagtagatgggatgcgttttgttacatgagggaagaagaagataaataaaggaaaaatgtatttgcccatatgatgttcagaggatgaggggctttatatgtgatggtttctgtttttttaatataagatgaactgcctgatcaaaatttttgttgcaaaattttaaaaaccaatgtcttcttctccagctgtctccaaaccccagattttgtttggcttatagttctcactgagtagccactttttcaatttgctcttcttggcattttaacttccccttcccctcttagcacgtctgccatctcttcctgctctgggtgtcacttagctctgaaaacataggcatcggagtgtagcagactgactcagagtcctcccaagatgcagattctactgaaatccaaacccaaggggtctacaaaatgggtatgttcaaattttttttttgttttcattactgactgtctcctattttaaggcacccagatggcttggggggaatgtaaatcagtgctttct

SEQ ID NO: 8621 - DNA, 2300 bp, Homo sapien
gcaaccctattccttgatttggacattcactcattttgtttctgtgcttcaggactggattaggaaacggatgattgactatctgagttgtcactatggaagaattagaaagaataattttcctcattgctagagtggaaagtgtttacagtttaatcatggtgggcttttttagtatctaatttgggtggatgttagcagcagtgtttaggctagtctggggaagaaagttgaggagcaaactggggaagagagaaaggagttgctctgaggaatctgcatttgaaaatagagaagtactcacacttggattaaaaaatgccaacattttctcaatacaacatcaacaaaacaaaattccccaaagcaactctagatttgttcacttcttctcctgatgaattcatagtgagtaaggcagaattgattcaagaacctttttttttttgtggttcatttggacgtgtaaatgtacaattcattcatcagctgtttctctaggcttttcccaggaccagaagggtctgttcttgtcatctggaggccagcattgttttctcataccttgtggaaacacagctggattgcaacagtctttgttctttcaaaaattaggactatcacatacaaatattttcctctggtcactaaggagggatttaatctggagtttagaccaggagccacagatttttctgttcctggcttcctccccgatttgctgtgggaaatctgcaaattactaaggcttcaagggcacaaaactgggattagatgaaggtaagcctgtgtgtcaaaacttaccagaggcagaggttacagttacagtcaaatgctgggagttcaaatgtgcttagaaatcaggaaacattaaaaatagctttctctgagattgctcaggaagatttatgtttaatctttctgttaatcaaagatggagctcagtgcctggttctagctatgtatttagatatatacatgtactggttgatttgttaattaggacaaactatctctattacaaccaatgtattagtggcaaaccatgaattattcgggttcattttgttttatctctagtgttgggggttcccaaatggaacagaaactgtgcattgtgattctgtcatggctgccaatgatgtactccagaaattcaaaaccacagagcctctgcatcacttttttggtggcggtcgtgggagggttgttagttttatctaaaagaggagagtctgtgaaaggaaagacaaagctttggccaatggtgacataattagaggaacagaataattagaaataaatcataacttccccttcaacccaaccactgctggaggtaaattggaagcttacggaagctcatggctgggttctagtttggggtcccgttctggactcccctgccaacgcaggagcattacatgggtgggctctgaaaaactgaagcctccttcagaaacacacgccctgactcaagatccggctggagtccaatactcctaaagccctttgaggacacgggctcacgaatcccctgcgcctgcctgcacgctcgccttcatccacatgcctcacgtcctgtgtgtcagtctttgtgaatgaatgatgtacacgcacttggaaaactatgctgctactgggagggggcgagagcgggtgaccaagccctcaagaatgcgtggagaatcagacggactttcccgaaacggtggaggcggcctgtgcacccagcctgcacacccgctcccggcccttcccgcccctgcctgggctccgaggcccggggctccacgcactgctcctccgcggtcgcggcccggccccgcgctcgccagcccttcctttcgctttgggccgcgggcggagattggccgcggtgctcggccccgcccccggctccccgccctgccccgacgccccgcccctcgctcccccaagcggacatcgcccggcccagggcgcgcggacccagcggccgagacgcggcgccgcgagaaacgccctaaagaggaggggagagcgcgggagggcgagagggagggagagcggccgggagatcgagagcgaacgaggcagccgccggcggagaggagggagcgggcgagggccgggcaggaggagcgggcgcggcgcgggcgaggctgggacccgagcgcgctcacttcgccgcaaagtgccaacttcccctggagtgccgggcgcgcaccgtccgggcgcgggggaaagaaaggcagcgggaatttgagatttttgggaagaaagtcggatttcccccgtccccttccccctgttactaa

SEQ ID NO: 8622 - DNA, 2300 bp, Homo sapien
ttggcattttttaatccaagtgtgagtacttctctattttcaaatgcagattcctcagagcaactcctttctctcttccccagtttgctcctcaactttcttccccagactagcctaaacactgctgctaacatccacccaaattagatactaaaaaagcccaccatgattaaactgtaaacactttccactctagcaatgaggaaaattattctttctaattcttccatagtgacaactcagatagtcaatcatccgtttcctaatccagtcctgaagcacagaaacaaaatgagtgaatgtccaaatcaaggaatagggttgcgtaaagcagcagtttggagagatagccaggcgccaccacaggctgccaggaaagttacctccagatgatattaattatgaatatttatgccatcagaagttatgcatcgaaccctggatttggatgaagagcactaataaggtcatgttaaaatattttttacatatttaagatataataatctgatcaggtctgccagggtcatgtttcattaatctaatcaatgttgataaatgaaatttttattcattctctttaggacacaagtagatttttctaaatgttcatatggactttaaatgatatttctatgttatcatacgctaaaacattgatgcctagcctagtgcctaagacattacagagctcaataaatatgtgttgaatgatgaactatcaactttttggtcactatgggcttcctaattcaatgattaagtgagtttgatatgctctggcttgtgaagatgaactaaaaagtgtcagaggctgtgcccttttcccttcatagtagagcagaacctctatccccagcactcacgtccactcggttacatgtatgcctcagtgtccccaccagccaaacaacagcagccaagcgttgcctttcatccacttgggcaagatacttcaataccatatctggtttttaaggcactcaggaaaaaaaaaaatcaatcaaataaatacttctgtgcttgtgcttgtactgcagcagtctgttcctcctgcatttgggaaaaaacagaattgtatttttaagcattccttagacttcggctaattatatcctaccaagtgctgaattgccttacactaggaacgtgaagtcaataagggccaagaaaagtccgcaggagttggggaacagaagagtggagctagacaataatattaagaaaatagtcaccttcatacaggaattcctcaagcacatggagtatgtaaaaagcatactttcttttttatttatactcctccctcaactccaccccaacttcaataaaaaagaaatataaatatacacttaatgttgaacaatcatggaagacagactttccctctccagaagtgtcctagcatgttatctactcctgagtcttgaacttcaacaaaacaaagaatctctgagttttgagctaaaatatgctttactgaaggtaggtacaaaaacattcagaccactaacggctgatccagaaccagtttatgactcacagatgttgatttactggtataaatgtaagatttagaaaaaaaaaaaaaaaaaaaaaagccctcaattaacaacaacctgtctgagctgcatttgtggtctcatttttctctgagaaaaggcaacagtctctgtcatacacagaaacaagctttgaaagcttacttctaaggcaagtggtttctatgtgagaagtttagtcattaaaagtcacactagggaagaaaaatgcctggcacttcaatatctacattatcaagcagcaataaaatggaaaattagagataggaaggaaaattaaaataactctcttaattaaacttggatgccaaaaagccttagggtcagttaagggacccaagccaggggactcagatggtactgttgctgactgcaggctggctctgtgacctcaccaaagccacttaacctttttgtgtcacaacctcatctctgtttcagggaataaaatcagccctagctctccctagaatggaacacagactcattggctattgtttagaaggcacaataaacaatgagggtaggaggagctgcagtcaggagggaagaagggagggtggggtggggttgggggagaggggaggacttgggagcctgtttgccctggaaagctcaatataagaaaacaaagaggatagtagtgtgggctttggaataagactcaggttcaaattcttactctaccaactagccagctgaattgccacaggtaagtcatttaaacaatcccgaacc

SEQ ID NO: 8623 - DNA, 2300 bp, Homo sapien
gtattaagtccttattagatatgtgatttgcaattttttttctcattctgtggacttccctttcactgtcttaatagtgccccttgatgtacaacattttaaaactttgataaagtccaacttatctattttttcttttgttgcccaagttttttttcctgggataagctgtcatatcccaggaaatcattgctaaatccaatgtcatgaagttttcttctttgattttttctaagaattttataattttcattcttatgttcagatctttgatagatttttgttaatttttgagtatggtgtaaggtaggagtccaatgtcatgctcttatatgtggatacccatctaatgttatatttttgaaaatactgtttaaaacaaaacttactgttttcctgggcattctctaggcaatttatgacagtggtggcttattttgcactattaagatttctagtttatgttcttccacaccgtaaaaggccgtgtcagaggagggagctaaggtcctgaagagttgctttctatataaactcagcatagacaactccagacttcagaaccccttgacagccacactgtacacccttatagagcaagaatccaagtcttctcaactttgtttttttcaattatcctgcaaacatagtgaatacagttgtaattagttatgattggtataattgaccgtgggctctttaaatggggcagtgtgctgaaattgactgggttacaggggcaggctgaagcttccctagctctcttcatagacttcttttgtagcatgtattacatttttggggggagatcgttgatttatgtgtctgtctcctcactacaatgcaaacttgctatctttctagtgcctagaacagtgcctggcacaggcaatttattaaactaaagtgaaccaatagcattacctcttccttacttccaagttaatgtgcaaaggcagaagatgagcagtaaaatcttgctttacttacaatgtcatcttaactgcattgccagctttatacaatgaaggctgatgatgatatggctccaaatgacagttattagattttcaaggattttctaagtttgtatctttattaaaaagagaaagaagccaactatgacaaatcttaactcccacctcctactcaaagaagatggaatcttttaggataaaagtcttagattaagcagccaaatactgacttctcaaaaaaaattgtaataactccattcatagaaatgagattatgctgtaacattcttaccatagtcctgaatatgtgaataaaagatgctgtgtattttcacttaggacagatgtaagattttcatattgtttacattttccctaaatgagaaatgtatgaacacttctgcccttttattcctgcaccacggaccatgagtcagggctgctaaaagtatccttattttagagattgcctaaaaccagacttatatgaaaaggggatttttagctttacttttcagaaatcccaagtccatatccagtcagctctcttccacaaaattattttcttttctttagaaaatatcacatttcatatcaagttattagagagaaacgggaagcctgagcaggtgactgggtggtggacgtcctgtgtttctaaagcaatccctttccctcacctgagaccttgcctaggttaatgggggctccattgagaaagtcaaggaacatgaagcatgaatatttacatattcagcagagagtaaatgcatcagcaaatgatgaggtgagatacagtgttatcccactgaactagttcccttttgctcatctccctccctgttactctccaaggctgagttatattcagctgaagcacaatttgaagaatacgaaataatgtgtgatttggtgccaccactgtcaatcaacagtgctttccacctagactgctgtgcctgtgccagtggctgctgtcctggtgccaggggcaagaggaagactgccttttttccagctttccctggcttgaccacaccccccaatttaaggaggcagctctattagaaacattatggtctttgcatcctcttaagctacggagcagaggattcccgcaggtagttggaaagagaccacagactttgagggaagctcactcaggatctgctctccggcaaagtagtaagtgaggtgtgtgtcagtttctgcctaaaacttttcagtccattttccttttcctgctttaaaaaaatttctgtggaattaaagagtaagtcggtagggagattcaggatacaagtgagttttctctttctcttt

SEQ ID NO: 8624 - DNA, 2300 bp, Homo sapien
ctggcagccagcacaactttgtcattactctatgtatcttggctctgcccctcacatcacattaacctcacaatgcctcagtttctcgcctgcagaatggactacctcctaagattgttgttaatattaaatgagctaatacagacacaacgcttagagcagcggctggcgaaggtaagatctgagaggtagctatgaatgtcgttgcggttatccatcaactactgcatgtcagtgtctccaagtgtcaccctcttccctctctccctttcccttgttcttccctgcccctttcctacctaaagcgctcttatgtgggcaattacctcctttacctctctgtgggacccctcagagcccagaccactgttcagatcgtgaccccggtggagccggcacccttggcccctaggggccaggctgggctcctccctcatggggcctgggcgcctgggcctgcggtgtttgtcaacaactcctgagccgggtgcctgccggacaacggcaggggcttggcagcctgcaactgtttgtgcccctctggcaaatgttcgatggagggagccggtggaacagactcaagattgtccctgccacgcagacctttcgccgccatcaatgcacccctttgtgcaacaatacaaactttgtggctgctgaaaaatccatttttccaccttgaaaagagctcctgcagcgagcagcttctctggcggcccacagctcccagactgccgtctcctcgcctccgctttgtccctgacccgtggcctgagtcgggttccggggctcccacgtgcccctctagggctcctcatccctgaggtcctgggtcccggggtgtgtatggactcgagggttcctatgagtgggagagagactgcagctcccctccccggggccatttacaatcctcagtgcagagctagaagtgagagctcctcttgccgggctcgggtactccgagtggtgggagtacccgagtactcttcctaaacttctcaggaaaactggggacagcgaatccgtgcgcgccttagtctaaccttaaagtatgctctgtaacctcctgggagtcattttgctatccatccattcactggttattgctacatgaattacactgtatttcattcattcattcactcactcaggcattgtcaatgaaacacccctttttgggccaagcctctaggattaggccttcccttcctgaaatgacgagtgactgcttcacacgggaagatgcgtccgtgtgacaagttttcctttagagagatctgaggagggttggacgcataattggcaatccttggacaggacccgagagtctgcatcccatcacacagggccagggactgccctggcatttgcccgacactcgagggagctcagctgggcctcactgaccggtctggggagcacttggaggcggggcttcaggatggggagggcggggcagagatctgggaaaagtatgcgggtgtttgcagcactgcggagagtccttcctcctccgctctcggactgactcagatggtcctaagctttgggtccctactcggagggcgtcaggtcgcggctgcatggcgtgaggggacccagtcaccgcccctcccatgagcagggcctcctggtgcgcactccccgccccacccagccagcggattttcatttaacttgtaacccaggtgtcccagcttcagtttgtttacattcttggaaactgttgtggaaaagaaaaaaaaaaaccaaaacccttcgatgtgctgtcaaatatagcaatctgcgcttccgaagggcgggcggggccaaagaaggtgggctcgaggactgagcgcgtgtctcacctgtaggagaagcgcgtggcgcccgcatacccgcacacaaccccacatacacacgcccacatgcaaacaggcgcacgcatgcacacatgcacagacgcgctcacacacaagcgcgcgcacgcgcttaatgcagggaacacgctgtgcgccagccgctcagagcaccccacccgttgggacctgacgcggcgagctgctcggtcttcctgcacaggcttcgccaggctctcctgctccaagtttcccaaacactagccgccaggagcgttgcttctcaacctaggattcccgagggtctgtgccactctcatctggccaggagcgccctagcttgagatccacgagccgagagtagggcccacttccacccctacccctttttcccggggaaagggaaaagggaccataggcccgggtggggtagaagctgggggtcatcacctgtttaaa

SEQ ID NO: 8625 - DNA, 2300 bp, Homo sapien
ttggagtcctttctggctgaatgaggagcaatgtggctggggtgtgcgggtttctggtgaggtccgggtgggaagccgtctctccgcattctcctgaaagctctgttgtagtttgaaggtcggtagagcctgggctgaaaaggaaacaatttggggtttgaaaggatgtaattcattcttcctttcccgttaacctctttcctctctggaaagcacgtggaaacgctgaagggaggagtgagagggcaggcagcctgccgcggggaggaaagggttaagcctgatttcttttaattgaactccagaactggtggccccaggcaaagggggggactgaccccgctagcggtaaccagatgtggcggtcccaggggagccccggagcagacccctggattgagaagcagacaggagcggggggagtcagcccggcccccatcccaccatccaccccacccccacccccaacacgcacaccaagtctcaattgctggcaggctgcacccgccactccaggtctggtcacgttcagacccgtgtctgtattcgaacccaaaattggagccgaattgatgagactaatttctagagagggagggggagggagggagacgagtgagctctcgggctcaattgctcctgaagaaataaagaattaataagtcaccttttttcgcctctgtggacacccttttgaaattttttcttccaattgacttggatctcctctggattttttttccctctttcccccgtcggactcttaaataaaagtgagcaagtccaaagcgtggtccggagagcgtggacaaggtaacctgttttggatgtccgggagaagggagtccggccgaaagggcccagcccctcgaggctgctccaactggggcgcgcggcggcccaggagggaggcggggaggtctccgggttgggccggggaacgccggcctccaggctgggtagggaggacggtccagagcgcgggcctccgggtctcaccccgggaaaagtctgggtctgctctgcgctgttgcgtgctgcgctcctgggacctgctgactgtcctagagggaacgtcccgcggtagtgtcagttccctggggaccaggaagggcgactcttgcctgggagtcagtgcttgggccgtcgggtccgggtaagcgctgggggtttggctcgagaagatgcggataggtggcctagggcgccgcggatctccgccctctgcgggcaccgggagcccagggtcgaggcgcgccgccccgaggggccccttctcctaacaatgcgcccggaatggagtccgcgccctgacagcgcgggtcagcccgaaaccgcccagaatccgcttcgatgagtgggtgagccgctctgggagtctgccgcgtctcggcagcggagggcctgagtggaaaaattcttattggatgcactttttaatggttggtttgcctcggttttcgtccgagtcttccccggcagtaggcgctgggttacccgcagccctagccaactctccctccataccccccctaccccacccccaaaaagtttgtctccggctggaaaaagcattaatgaacgtatctgtgggaagaaacggaaagtgaatgagtcaggagggccaccttcggccaaccgcctcaggaaaagcaaagaagccaaaggtctttggctttggattttgggggaaggtgatggggggaggttcagacttcgggaatcagggcgcggacgctgggcgtggaccccgtcattgttcccggctagctcttatctcccaggagcaagtatcctgtgtgcgcagcgcatgaatgtgtctgggcatctccgcgtatatttatatagtgtgtgatgcgaaaagcaggaccagcaggggaggaagagggggtgtggggggggagggaagacgagggagagcagaggggagagaagagagaggagagctcgaggcgagagagagagagagagagagagagagagagagagagagagagagagagagataggacttcctccccgattcgcaaagtgaagtcacttcccaaaattagctgaaaaaaaagtttcatccggttaactgtctctttcgctccgctacaacaacaaacgtgcacaggggagtgagggcagggcgctcgcagggggcacgcagggagggcccagggcgccagggaggccgcgccgggctaatccgaaggggctgcgaggtcaggctgtaaccgggtcaatgtgtggaatattggggggctcggctgcagacttggccaaatggacgggactattaaggtaagcggcgg

SEQ ID NO: 8626 - DNA, 2300 bp, Homo sapien
ttgcagagccagccataaccctggcccttctttcgggctgtgcttgtccattgttgactggctgtgtggttggtgctgtactcttctggagttaatgacgagagagtgcctctgcccgactgtgactttgttagacacgcttctcctcaccatcctggctatatagcgtcattactttccattccctaacctgcgttattgttcttcagaagatatatcaccactcaactgagattgttctctgtatgtgtcagctccctccactagcgtctacattcctggagggttttgacccctgttttatcctcaatacacagtgcagagccttgcaacataatagatgcatcataaacatttgttgaattaatgaaatatgcatgatggtaaatttggacctgtgttctaattttctgaccaatctgtcctggtatgcccattcccaaaagcaaagttcaattaatgtgtatccagctaaggtggcaggctttaaaacattattcctgtgacttgtggcaaggaggtgctttggccccattttctagataaggaaacagattcaagaggtgccttgctataaggcacatgaagttaatttaatgtgtatccagctaaggtagcagactttaaaaattcttcctatggcttgtggcaaggaggtgctttggccccattttctagataaggaaacagatacaagaagtgccttgctataaggcacacagctactaggtagcagagctgagaatgaacccgggctttctgactccaaatccactgttcattctctatttcccaccttcattcaccatgtctgtcttctctgtctccccatctgtaatgacaccacgtgcactgagtcaggcattcatagataaaattaactggattcaactgaagccagcctaaaattaagatgcagtttttgaaaccaggtcatttcttaaagcagcaaacagtatcatgtgctttttaacactgataatatcagtgtgggaagcaggggcgtgggtcgggtgttgtttaatactgcaagttaacctgtctgtgacaaaagagtagcgtggctccagcaaatattgcttctcccaatgtgacggtcagagcctttccaggagccgttcttggaaaagagaagagaatataatatggagggacttataaggagggcaacaagattgggattttgtaatcacatagagttgtgcaaattatgcacaaaataaagggcttctgtgaagaaatccagacttccctggcttcctgcaccaaataccacctaagtgccaagacccacaggtattttgaaatatagacatgacttatatttgaggaagaactatgcaggtgcataaaatcacatcctagaatcactcaaacctgatttttccaggcagttcaaactggaaatggacaccctggatttgtgtacacaaattagattctctctagagtgtcgtcaacctcgatcagtgtagggctggatttagtgcacatacaggcaagtgttcttgtaaacacatatgagcacattttaggcactgagaagattggttagatactactgtagaggtaacctagttccactgtttcatttttgtgatgactatgaatctcaaacaggcttaatggacggttcattctcaccaagagagcagaagaatgctggcctctctcctggtccactgtcctctccaagcacagtatttgaactattgtgggaacaggatctggaaaccccaagatccagaggtcacatgcgaacagaaaactgtggctttcacacaacttaaacaccaacacacacactaaaggctcaatcttgcagaatgcttggagactgaaggtagctctgtggggactcagcctagccaggtaacttaggtgaatgacaggttgctcacagggagggtttggaggagctcatggctcctaccacccacaaaaaaaggaaggactttcactcccatccttggcctgaagtgtcaggttcctgctctaagcctgttctcgaggcctgccatgccaatccctgtgtgtatctaaagaggttagcacatcctgggtacacagaccacagcttcctccttttgctcagggcctgtgcgtagagtttaagcagtgtggagatatttcttcacttttccttagggtgtccacatcaagaccctgaggccatcttaccacccttctggatcagaagaggccttcagagtaagtggtaactgtcctgattggggcgagggagttttctagaggggagcatctcattactaaacccagaaatacagagacacttgcat

SEQ ID NO: 8627 - DNA, 2300 bp, Homo sapien
gcataaaaatgaagcacatatttttatggagaaaaggaaattcaggaagaaaatatgtttgctttcaagaatttgaagggctgttaaatggaggagacttcagacttatttagaattttaatgagatttctctgaagcacaactagaacaatgttctttataacagtttctcctttcgttctatgaaaaaaacctgtcaaatggtacaccaagtgcagagtccgttggccctagcttgcctttgcagcccagtgtctcactgaggctttctatgctccattatttgcttacttggaacttctttcagctcccccatgttttctttccttggttgcccctgcctgggtcacacagaagactaccctgtagtgtggttagtagtgcacacacaagacatctccattagagtgggagccaccagatactatgtgatataagtgacagtaagctcattgattttatattctcattgattaatgtatttatcatcattcagcaaatatttatagagtttctactatatgtgactctaactcatcttcagggcttggcctcagggttacagttctgctcatcaaaataggtgctccccagagtgctcccactgtttcatatcctggcattcatcactggtcatttcatagattattgacacatttgcaccaccctctctgctgaaatgggagttgcatgataacaaggactgagtccattacttctctgatgtctagcacaatggtcagcacacacagtcaacattgggtatcaacatatcatcattgaatagtgattgataaataaattaatgtatacataaatgcaatgagttttctgccagttgaagtatgtttgcaaagaaagggtggatccccagctgatggggatctttttaaaaagttattctttttggcattataccaaccatgctcggttgtggttgatttccttagttcacttccccattagactatgaactccttgagaacaggaagagttctatttgtctttgaaatcctacagaacaagcatacaatcagtgtttgggaagtgcacaaaatgtctattttctgagaatggattgtttatagaacaagaatgctgaggcactaaagaaaaagtggcagtaatgtaatccgcttgttttgccaagccactaaaaataccttggtaaatattagctaatgtgcagccctttgcttgctattaagatttactgatttcaatagaaaggaacctaaaaactgagcatattatataacccagacaccagggacaatctctaatcacctaagagttcataaaatacatattggctctgtctgtggttagattaaatgccattatctaaaaaaagtaggatctgtgcaataataggtctgccatgtgaatgacagttttggttagtggatgaatttatcctgtatcattgcattctctaagaataatccctctcactctgaacaaataaatcaatagcattggctaacccagtgcatgtaaaaaacaccttcagtaaatgccaggttttcccgaataataaagacttccaacaataaagacttcttttaagtctgtttcttacataactgttgtatggagagattaacatggtatcttgtttcttcctggtgtgatcttacttttgtcttgtaaatatgtacttatgtctgtatgttcacctgcatctttgtgaacccttggaaaactcagtatttcagtgggtttcagagaataggccgggagattgatgataagtaagtgtttccggccagttgttattaggcacaacttttaggagaaacaagtgagcgatagagcgtggccaaggagaggaaggcaatgctggaacccaatccatgcctgctgcccagagaccttagctgatggcttgtcatgtcttagcatgttggtattcaagccatgtgatgttggaaagaaaaaatacctattcagcttggggcttggtctgagaacaaccaattgccttggtttaaatcacacgactccactatcaaattaagtgtttccaagtttacacaaattagcgtcagtccactgactgtcgcctacaataaattaggctgagtctaaaagaaatcagtctgcatagaaagaccaacaaccagcaccacttccttgctttttccagccatgaatgcttccagtcggaatgtgtttgacacgttggtaagtggaggctggggaaatcacctctctggaaagccaggcagataatgtttcatcattaatgcagtcatggaaactcaacgttattcaagtgatcaatcagggggtacttc

SEQ ID NO: 8628 - DNA, 2300 bp, Homo sapien
cttgcgaacccaatcaatgcttcaagtgattaccagctgtgaagtgtgaggaacagtgggaagagagcaactcaggaggggtgtggggtaaggactcctctccctcagtctcctagtgggagatggccctagggggtgggctgaggaggaagacagaaggctgacactcggagtaggttggatttcaaccctgttcattcaatgacaagtgtattacatatgctatctcttgagcttcccactgtagacttctgaggtgagaagctaggtaacttgcagttggtagagcagggtctcaaccccaccactgaagtgcaaagtctgtgatgtaaagttctgcattgccccgggaccagggtggctggtgaatggccaagagaaagtcaggtcagcctgaccttctagggcaggagtccccacacctggtctgtggcctgctaggaaccaggctgcacagaaggaggtgagtggtaggtgagcaaagcttcatttgtattttgaccactccctatggctcacattactgcctgagctccgcttcctgtcagatcagcagcggcattacattctcacaggatcctgaacccttttgtgaactgcgcattcgagggatctaggctgtgcgctccttatgagaatctaacgcctgatgatctgtcactgtctcccatcacccccagatgggactgtctagttgcaagaaaacaagctcagggctcccactgattcgacattatggtggtgttgtataattatttcattatatattagaatataatacataatatatattatatgatatattagaatataatacgtaatatatgttatataatatttagaatataatatgtaatatatgttatataatatttagaatataatacgtaatatatgttatataatatattagaatataatacgtaatatatgttatataatatattagaatataatacgtaatatatgttatataatatattagaatataatacgtaatatatgttatataatatattagaatataatacgtaatatatattatataacatattagaatataatacgtaatatatgttatataatatattagaatataatacataatatatattatattatatattagaatataatacagaatatatattatatattagaatataatacataatatatattatatattagaatataatacagaatatatattatatattagaatataatacagaatatatgttatataatatattagaatataatacagaatatatgttatataatatattagaatataatacagaatatatgttatagagtatattagaatataatacataatatatgttatataatatattagaatataatacataatatatattatattatatattagaatataatacataatgaaataaggaatataatagaatattatttcatagaatagaatagaatattatttccttctataatagaatagaatatttcattatttcatcccatattcattatttcattctataatattatagaatagaatagaatattatataatgtaatagaatattatttcattatatattagaatataatatataatgaaataaggaatataatagaatataatagaagtaaagtaattattataagtaaacacagtagaaacaaagttcacaataaatgtcatgtgtttgaatcatctcgaaaccatcctcccccaccacctccctggtccatggaaaaaatgtctcccatgaaactggtccctggtgccaaaaaggttggggactgctgttctagggccactgagtgattcacaggacaggagacatttgtgaggggctccttggggacccctacttccctgccctgtaacatccagcctcatgtgcgcacgtgttcaacttcatgcctttgacttagacacatcgacatgagcataccggccttctggttccaagccagggttccataaacaaatccttcttagttagccttggtagctcaacacctttggtatctcactcacttaactgccacgcctactcttgttggatccggttataaagtaaactatgttctttgagaactgttgcatacagatgagttggcagccggtctgagctggcccacagactcataaaatcaacagggcctcgggtaccctcacctagcatatccaaactcttgcatcaaaggtgcagggacttgctcacatcgagaatctggttgctttcttggagaccaagaaaatgagtttttgtttctacatttactccagcaatccatga

SEQ ID NO: 8629 - DNA, 2300 bp, Homo sapien
ctgttgctttcaagcaccgcctcagcaattttcagacaatgaaagacatacttagcaccttgtaccgctccctgagtagttcttttattgcattgctatcctcagatgttgtctgtgctctttgagaggcttgggcctctcaaagctcctccaagttgcaacaattgctcaggactagaatccccaaatttcgcgtttttcagttctcaggtgagacctggacacaaatttttctgtctcccgatccaaggtcccatcactgagaaaatctttgcaaaacagtatttcccagagcaccctatattttgctttaaagtcagtccaggtcccctgacccccaccccgtaatggcaaaaggaatatcatggtctttatacctaatccaaaagcaactgctgccccaggacagagcccctcctcagggctcagcagatgattatagtgtgtgttatctggacctgagaactgcacagccaaagcctctcccaagaactaggcaattagggaattaagaactttctccacaatagtgttaagccctgaggtcaaacaacatatggtgcagtgcgtgagcacctaggcaagctgagtcccctaaggggacacagagctttcctgttagggcctgttgcagccacatttaacaatcaccccctctacagagagaagaggggcaatcaggaggcccactctggccggaccgctctgtgctctgtcccaggggagggtgcctgggcaacgggctgtgtgtacgctggtctccgaggcaagaggacccccaggccactgttagagactaagtttccctgtcactgtccttacaggagaggatggacttggtgccctccagtattagtgacaagcatttttctcattgcaacgtaataaaccagttttctggtcgtagacatcattcacctagcacttgtgctaggtgctagggcaccccacgtttgaccagctgtgtctgccctgagagagggggctggcagggggggtgttgaccccaaaaggctgggtaacggagaggggccagaaggaacaccaccgggtgagaagggccaccccgaacagaccggtcctcagaggcacctgccggccctccccagacagcagccctccctttcagcctgccctggcagctgcctttcctacggcttccacgaattaaagaacacactctggtcatcatctgtcctcaaggcaggtaggaatccaaaagggagagccgggaggtggcgcggaggacgccggctctgcccacgcctgggcaaggttgagctccgttccctccgggctgctcccgcctcctgtccgtgcagggcgcgtttccagccatcgccgcccagccgccgccgcacgccggggagagatcgtccggggtgagcagcgagcccggggacagctagcctgggtcctgtccctggacctactccccctgcagctggcggatcaggcccccggaccctcactccacggcgggaatcagagccgtcgggcgggggatgcagcgcccagactgtggctcccccgccttcccaaaggaatccccccatctgctccatccctctcgggaaacggcgaaatgctgccaaccgtccgcttagcgcaccgcggagcgactgagcagccccgccgaggctccgagccaagatttctgccctaatagtttctcccttctttctgtctgctccaccgcacccactaaatacgcggcgctcacacacggacacgcgtgacacgcggcgctcacacacaggcatgggacgctcacacgcgcgcgcgcgggtctccgtccctggcaccccgcagcaggggtgcagccgggggcagggggagccgggggagggcgcagggggccgcggggacgcgagcggagggctggatgcctgccgggctctctctccgccttcctcttccctcccagtcctgccgagctgacggcgtcccggatcacatggagcccccgccccaccccagcccgccccccgccgccaacgccggtggcccttccagtcgcgttactacccagagattcatttgtaccagggacggagggagagaggagagggaggaggggacacacacacacacacacacacacacacacacacacacacacacagagagagagagagagagagagagagagagagagattgttccagctgctctcgctagagaaagggagtgacccaaggggccgcgagtgaagggacaggatggcttaggtacctctgcccacaggaccccacaacagggagaggttccagctacagctcctccgtggggtcatggca

SEQ ID NO: 8630 - DNA, 2300 bp, Homo sapien
tttgaagctagggtttttgcagaactgtctgtagaggacagacagggaggaatgctgtggctggcctaggtaagctgagcatcctagctactctctgcaggacgcagggaaaggcactgacttgagcaaatcctattaagcctcatcaagcctgatacttctcttcttccatcctctcctgtgtctgtgaatgggaagctgtgttgagacatgatgaaagcttttggaaaagacagagcttcaagtccagcaaagtggtttaatccctttgataggaaaacacaagtggagaaagactcaaaagaggcaaaatcaaaggaagttgtatttcagatgatgcgttagtgaatgtgacatccatttagatggacctctgaatgaagaatgtcaaacatcacgcacccacagggaggaaaacttggtgtcatggcgtggtctagaatgtcaggagtcagggccctaacaacttggtaagagccttgcttgggggtcagcagggcttcctggagagaccactggcttgggagtcttttcacagactcagtctccctatctgtgatcacaagcatctttatcaatttcctactttctaagatatgctggatcaaaatgtaccactctctgagctttgaaacacgggatgaagttggaggaagaggaatggaggagggcgtgcttatgtctcatatggagatatttgtatactcttctgtgggaatatatatgactgtactcataggaaaatgctccaaactggttggtgaacaggctgccccagtcccctcaaggccctttagggttagcaggaagcattcgaggtgttacacttgaatgtaacaccagaatacatgctggggacagagaaggcacttgtaagtaggcagaattccaacacaccctcgtgattcctgccccctggtatacaccccctgaggaaccccaggaaatcctcactcccatgactggggcatgtcatatggcagagctgaactgaagaaagaaagttcatctggggtgagcttgacccaatcacaagccctttgaagggattgggcttttcccgaagtaagagattcaaattattagaggaattagacagagggggcttctcctttgctggttttaaagatggagggggccacacggcaaggaatgtgggtgacctctgggagctgagagcagcccccagatgatagccagcaaaaaagtgaggacctcagtcctacaaccacaaagacctgaattctgccagaaccacaggagcttgaagggggccctgagttccacatgagaatgctggcctcgctgacaccctggttttggccttgtgggaacagagcagaggacacagtcgcatcaagcctggacttctgacctacagaactgtgagctgataagtgggtgctgtttccagccactatgtctgtggtcatctgttatggcagaaatagaaaatccagtacagaaagggaagtcggatcataaacagttaggaaggctgactctggcatcagatgacctaggttcctattttgcctggagctgaggcacatttggaaaagttacttctctaagcttccgttgctttatttgcaaaatggggataacagtactcaccaaaaagagctgctgcgaagatgaaatgaaaggtgtgtgtacagtgcctggtttacaggagccctcctgagaggtagctcttaggattttccaccagggggcagggctgggaaaggggctggaggggtgggggtgaggggcaggagtgcttcaaacgccttgaggataaggaaggagaatcagcaagtcccgagttcctacggtgtgtcagcatcgtgctcccactcccgggagagaggcattatcttcagtttacaaaaggggaaaacaggtgagagtttaaaaacctcgcccggaatcgcacggctagtgctgcaggctccccggattccgcagcagctgctctagatgagggcatgcctagaggctctgctccgctgcagcgtctacgagaccgggaacccgtgcccctttcctccccccgccccgcccccccagaagccacgcctgaggaattttctaagacctttccctttcgtccctcccacgcctaaggtccaggtcccagggctttcccttgcaccttcatccctggccctgcagaggcctgcttctcgcttccggggtcgccagagcgcccctcccgccaccccgccatctcttggccggatcgtgcgagagaaggggaggaggttgggacgggggagggtggctgcgacaggggaggggagcctgggagaggt

SEQ ID NO: 8631 - DNA, 2300 bp, Homo sapien
ggagccaattgtagggattcatggaaagaatacatgatacaaacataagtataaataaaataaacatacgtattcataatctctcctcaaattgaaatttaatgcaatatcccattaaccccattttaaagatgaagaaagagaggtagagattatctaagacaaatagctaaaggcccagtgggcaatttgcagggcaagcattgagctgaccagcatgcagcctctactgtttagatttcttttaagggtaagtaaaatccccatccttgaaaccctggcttccagtgttgtgtgcctatcaagtcaaaaggattttcagggacaatggagatgaaattctttaatcaggttttcgagatccgttctattaattatgcactcattaagcacacattaattgaggaactactatagccaaacccctgtgctaggagctggacataaagcagtgaagaagataaacgcagagccagccctcccatagttgatattctagcatttcctctttgaagctagggtttttgcagaactgtctgtagaggacagacagggaggaatgctgtggctggcctaggtaagctgagcatcctagctactctctgcaggacgcagggaaaggcactgacttgagcaaatcctattaagcctcatcaagcctgatacttctcttcttccatcctctcctgtgtctgtgaatgggaagctgtgttgagacatgatgaaagcttttggaaaagacagagcttcaagtccagcaaagtggtttaatccctttgataggaaaacacaagtggagaaagactcaaaagaggcaaaatcaaaggaagttgtatttcagatgatgcgttagtgaatgtgacatccatttagatggacctctgaatgaagaatgtcaaacatcacgcacccacagggaggaaaacttggtgtcatggcgtggtctagaatgtcaggagtcagggccctaacaacttggtaagagccttgcttgggggtcagcagggcttcctggagagaccactggcttgggagtcttttcacagactcagtctccctatctgtgatcacaagcatctttatcaatttcctactttctaagatatgctggatcaaaatgtaccactctctgagctttgaaacacgggatgaagttggaggaagaggaatggaggagggcgtgcttatgtctcatatggagatatttgtatactcttctgtgggaatatatatgactgtactcataggaaaatgctccaaactggttggtgaacaggctgccccagtcccctcaaggccctttagggttagcaggaagcattcgaggtgttacacttgaatgtaacaccagaatacatgctggggacagagaaggcacttgtaagtaggcagaattccaacacaccctcgtgattcctgccccctggtatacaccccctgaggaaccccaggaaatcctcactcccatgactggggcatgtcatatggcagagctgaactgaagaaagaaagttcatctggggtgagcttgacccaatcacaagccctttgaagggattgggcttttcccgaagtaagagattcaaattattagaggaattagacagagggggcttctcctttgctggttttaaagatggagggggccacacggcaaggaatgtgggtgacctctgggagctgagagcagcccccagatgatagccagcaaaaaagtgaggacctcagtcctacaaccacaaagacctgaattctgccagaaccacaggagcttgaagggggccctgagttccacatgagaatgctggcctcgctgacaccctggttttggccttgtgggaacagagcagaggacacagtcgcatcaagcctggacttctgacctacagaactgtgagctgataagtgggtgctgtttccagccactatgtctgtggtcatctgttatggcagaaatagaaaatccagtacagaaagggaagtcggatcataaacagttaggaaggctgactctggcatcagatgacctaggttcctattttgcctggagctgaggcacatttggaaaagttacttctctaagcttccgttgctttatttgcaaaatggggataacagtactcaccaaaaagagctgctgcgaagatgaaatgaaaggtgtgtgtacagtgcctggtttacaggagccctcctgagaggtagctcttaggattttccaccagggggcagggctgggaaaggggctggaggggtgggggtgaggggcaggagtgcttcaaacgccttgaggataaggaagg

SEQ ID NO: 8632 - DNA, 2300 bp, Homo sapien
catctgactccccaggacagctgggatctaccttggtttgccattaggcagtcagctcagtggttgacaggcctttttccaggttgttctactggggacacagcttcccggtgttctgcctggtggaacctgcagctggagtcaccctcagaatggtggcaggggaattcctgcaagggactgcccaaaccatccccaaatggggtcagttgagattccaaagaagaaatcaccaagttccaaagcacttattaggggaacttacatgtagagcgctgcactggtcctcatgacagacagcaagaaaagaggtgctccgcttaagtatgtctgcggcaagggctctgggttatggagttatttggcccaaggttgggctaattcctacatgtttagcaacatgtttaatctttcagtatttcaggtaacaacctaaacagggtttcagtgccagggaatgtttccagggctcaggcctgcaggaaaagacatgcagctggccaagtgacagagcagtctaggcattctgtgtttctcgatcaggacagataagtaagtgggggttcctgggggaccctatacccgggagggagggtaactgcgaattcaaggaagacttacttataaagaggaagaagggttgaaagatagtatccctaaggtgatgtttcccagggccagaagctcatagaactttctgaagggagcaggtcatcagccttagcatgagccccggagcatcagtgtctgctggccgttgtgtggtgagtgctgtgggtcagcctttgggctgcagccagataaacctagacccaaaacctcacttggtcacatgctaagtgagcttcattcttctcttctgaaaaatggggggataataatggtatttatctaaccatgttgtgaggattaaatcagccaatggataaaaatttcctagtgcagttcctggcttctgagtgctcagaaatgttgtctgttattgttaattaaagaggtctttcccaactgaatgagagtcttaaagctcgttaaatgggttttgaggggactatcagacacctgtattgcaggtgtgtgggtatctcttggaagtgtggtaggcacccccacaaacacattacgccctttgaagagctttggggccattaacatcctgtccagttccatttcttagaggacagggaatcaaattttctaatggcgggcctacacagcaatttgtcattttaataagcactcagatggctgcagacttcacactcagacggtaggggtgaccaattgacaaatcagatacatgctgccttttcctttctgtctgctgctaaaagacctcaagataaatagagacagcaaggaatgaaagaaacagcacaggcttgggccagatgagcaggaatccaaaaatcagctctgcctgatatttggtggcctgggtgtcacttaacctctttggaagcctgtttttttatttatccatccaattactcagtaagtactttttgaatacatccatgtgccgggctgtgttctaagtgcttggaataccagagaacaaaatgaacacaaacttatgcccctgtggagcttacattctgatggtgggagagagactgtttgaattaagcctgattcataagcaaacaatatagtatttatatagtggggattccaatatctaatgccagtgaattgctgtggcgataagaagccacaatccacatgtaatgcgtgggacacagtaggtatttaataaactattgtgattattctttttaaattgctcccaggtttctcaaaccctttcaacacttaatgtgtagtttgcacctagatattgttcatttattcattcaacaaacagctagcaagcatctattttgtgctagactctgtactaggcaccagggatacaaaagaaccctataagagagtgaggcccctgcccttgaggatttcacgccctgacccctggataacagaagagaagcctgggagagccccggggtgggggtggccttccatcttgtgttctagtgaatcagaacagcccacttcactgatggtgtctttttaactcaaagcatcccagctatggctggcgattctaggaatgccatgaaccaggacatggagattggagtcactccctgggaccccaagaagattccaaaacaggcccgcgattatgtccccattgccacagaccgtacgcgcctgctggccgagggcaagaagccacgccagcgctacatggagaagagtggcaagtgcaacgtgcaccacggcaacgtcca

SEQ ID NO: 8633 - DNA, 2300 bp, Homo sapien
ttgttagtagctcagactaagcccaatacccttgaattcatggttctcttataaaaactgaaatgctgaatatggcttagcagaggataattggcaggaagcaagactttcccgctgtgtcaagagatgggaataggccaagtctacaaagctgacctgaatccatttgtccaattggtgagcctgtctggcctatccccaggggccagaccctgccctcgccccaagcagtagatgcaagagcagagaaggatggtcaagtctatctaaggagacaggctgtatagaagtgttctgattgcatgggagcaaattttaagagaagtaccatgcatggataacaatgttcaagccacagtaaccgcacactggtaaactgtggttaaacttggtgcaaaagtaattgtggtttttgtcattattttcaaatgggtcttaaaaaggagtgttgggggccaggtgcggtagctcatgcctgtaatcccagctctttgggatgctgaggtgggcagatcacttgaggtcaggagttcgagaccagcctggccaacatggtaaaaccccatctctactaaaaaatacaaaagttagctgggtgtagtggtgggtgcctataatcccagctactccggaggctgaggcaggagaattgtttgaacccaggaggtggaggttgcagtgtgctggaggttgcggtgtgctgagatggcaccactgcactccagccggggtgacagagtgagactctgtctcaaaaaaaaaaaaaaaaaaaagattgctaggggaaggctggaagcccagggaggaagcaggtgttccctgcccagcagtgattgctccctggttgctggaggaacgatggaatcagagtcacccgaggaccaaagctccacacctcttgctatcccagactctctggaacaccaggaagaaaacatatttggacaaaaattattctttgcaacattagaacttttgattctggaatgagacaaggaaatatgtatgtatctcagagagacaatgaatttttaaaaggaaattgggaccgtttctcagggtgagatgtcttatccggttaactgcgagcccccagggatttctactcagagtgttcatcacatcaggtttccattctctacaataaaaacatggctagggagaaattacccagcactggcaagaaagagctccaaaatagaagcagcttttgaggaatttggagggataaaacggaatagtatgtctgaaagttggcaacatgtaaaaaggctaaaaatgacaattctgcctgtgatactatgtctagtgtgcaacgcttcattcaaaaggcaggcacgtctcccctccaggcgggagtgggaatctcagtggggaaccgggaactgcgtttgagctgatgcagactcagggtcaactcgacaagggagcccggcacccagacacagcggcgttcacctcaccttgcaccgtctttgtcggtcttacaggcatcagctttcccagcctcatttgagccgggatctgagttgcatttctttctgggtcaggccttgccattagggagagatgaagtcaactgatgagcgtgccagccttgaggaaggacagagtgcgggaagcagagtgtgggaagttggaaaaaataatctgcaaggtaaacaccttcaagtcaatttcaagaggctggctagaaaccgccaggacttcagggggccctgtctcgcgggtctccctgcgccctcagcactttggcttggtataaggccaccttgtccctgaagagaggcctattttaagctgagcaagaaaaggtgagaaagactaaaatcagctttgtgcagagacgccaatttctgctgcacacatggaaacgatgtgcacatacagcgagctggcccagctcccggccacgtggctcacactgtccgtgctcacccacccgttgccttcacccccagcagcactggttgtgaaaagggtaactgcctgagccaccccaccactgcgggcctgccaaggacaggcaggaactcagccatgccccgcaaggagcccaggggcatctccagggacggctccccagcctatgggctcgctccctgagaggccgtgctcgggctcgcctgctcagctcactccgaaagcctctgctcagacctgcacccagtcacagcagcacagatgtgcaggaggagaccatttccacggaccctccgactcctaggaggcaggtgaggagagggggagggaggggaccagcgctggtgcttcaggtatgctctggccactgcgattca

SEQ ID NO: 8634 - DNA, 2300 bp, Homo sapien
accacagcattctgtatctacgatgttcttactttgacactgttattcattttttccaggtgattctaagctcttccgacccagaagacccagatcttccagtgatgcactgtctgcctcttttaatggagaaatgctggggaaccgctgtaactcctatgataatctgcctcatgacaatgagagtgaggaggaaggagggctgcttcatatcccagcccttatgtctcctcattcagctgaggatgttgacttgagcccaccagacattggagtagccagcctggattttgatccaatgtcatttcaatgtagtcctcctaaggccgaatcagaatgtctggagagtggtgcttcctttttagattcaccaggatactccaaggataaaccaagtgccaataaaaaggatgcagaaacaggtagtagccaatgtcagactccaggaagcacagcaagctctgaacctgtctctcctcttcaggagaaactgagtccattctttaccctggacttgagcccaactgaagataaatcatctaagccatcctcctttactgaaaaggtcgtctatgctttctctccgaagataggacggaaattaagcaaatcaccttctatgagcatatctgagccaatttcagtgaccctaccaccacgggtgtcagaagtcattggtacagtctcaaataccacagctcagaatgcatcatcttcaacctgggacaaatgcgttgaagaaagggatgccacaaatagatcccccacccagatagtaaagatgaaaacaaatgagacagttgcccaagaagcatatgaatctgaagtccagcccctggaccaggtggctgctgaagaagtagaattgccagggaaagaggatcagtctgtctcaagcagtcagagtaaggctgtagcttctggacagactcagacaggtaccgtttgttttcctccattctttctttaagttaagagggatcttcaatcctgtgtgccatctgtgccttttaagagagaaatttgtccacagctagcctttaatcaaagagaatgcttttctgggtggtgctgatggctcagagccctaaattaaaagcagtccaacaaaactccccaaaagggccaatggtcctgcttcaaatcttcacaaaagtccccttatctctttggacggtgagaattcgtggataatttttgcacaactgcgtagctcttgattctgtttttctcttctaataaaatatctttattgtagccttccaagttaacaagccagctacaccatcaaatgtaaaaactgttcataataacagtctacaagcacttgaagcttgttttctaagcaatcttttctgagccaggtgagggacatgctttttttcccccccatctctgtaacaattcaagaagagattgcagtctttatacactgtttgttttagttttccttctgaaccagatgtgttttcaacagcatttgcatgtgggatagaagatcatggattgccattttgaaatatggaaggcacctattttttaatgatcacatggggagtgtttggctttccatttaggataacgtaagctaccttttcactctcattttttttcccaatttcccactaggagcagttacccatgacccccctcaggattccgttcctgtcagttcagtctctcttatcccaccaccaccgcctccgaaaaatgttgcccgaatgttggcgctagcattagctgagtccgcacagcaagcctcaactcagtcattgaagagaccagggacctctcaggctgggtatacaaattatggagacatagcggtggctacaactgaagataatctgtccagttcttactctgcagttgctctagataaggcctatttccaaaccgatcgaccagcagagcagttccacctccagaataatgcaccaggaaactgtgaccatcctctaccagagacaacagctactggggatcctacccattccaacacaactgaatctggggagcaacatcaccaagtagacttaacagggaatcagccacatcaagcatatttatctggggacccagaaaaggccagaattacttcagttcccttagactcagagaagtctgatgatcatgtaagtttccctgaagaccagtctgggaagaacagtatgccaactgtctccttcttggatcaggaccagtctccaccccgtttctacagtggagatcagcctccttcttatcttggtgcaagtgtggataaactccatcaccctttagaatttgcagacaaatct

SEQ ID NO: 8635 - DNA, 2300 bp, Homo sapien
atctgtttgaaattgccttgggctttgcattatattggtgttttgttgattgaataaagtcagaatttgcattaactatgaaaatatagaagatccttttctagaagcaaaactttgtagcacttacaagtaattatgttgttgggacaagcatttaactttatatattcatttgctatatatgaaagtcagctgaacagctgtatttcttaaaaatctggcatggtgttaggactaaacagttcactttgctgtaatgtgtaactgtaacatgatctaaatgagtctactgcagaagaaagactgtcctaataatgtatgaactctcttactcacttaaatatcatgacatagaaccagtcttgattattcaggaattagttatctaatttaggtgggcaattaaataaatataccctcatcattttttgtagtggattaatttttgctccttttaactttaatttacaaattttattttacttttgtaaactaagacaatcttattttttggcaactttggttccagtgaatactacaatttcatctgtttctttacaaattctctttagtgccgcaggttcttcaaagctgcacagcattcattgagagatatggcatcgtggatggaatctatcgcctttctggtgttgcctccaatatccagagactacggtaaaatcttatatggcactttttcactccttcttaactaattaaaatgcaaatattttaaaacagattcacttactttgataacctattttcattaaagataatttagataaaataggaaataatatacatgttattgtctctgtatacttttctaaatggcatttttttcatctgtagtatcagagaaccatgcaccttaatctcttcagtacttgtattttgcctctttatagtgtttgaagattttaacaaattgagtttgaaccgatgacagccatgagagaggaaatttgcattataataaaattattctttaggtgttaattaaaatggatgggaatggaacattttctaatctcctttgaccctgattctgtgtttatgttcaagtatgcatctctacatatttcacatcctccccaaatcttctctgagacaaaaacagtgacaaactctgtgcctgcaatattttatttttgcttaatctcttggattctagactattcttgacatgccattaccctttcttttttactgtagtacatgataactgccattattctgtagagattttaatactttaacagatcatagagcccatctcagttttgggaaatacatgcttgaaaaatacataaattagtccttgtactaaagacagtttcagtcttcagtttaagacaaagtaaatctcatattgtacacacacattaatcctctaggtagatgataagtggtctcatgcccgtggatgaatattaattaacctcctggagagtgagcttactctgccttactattctgcgtacaacttttattttactcattctaatgatacagattttcctgcctattaaaatttgttgttagctaggaattgctttatgttgtttctgacttttttatcctgcttcgggaaagcatttctgtgttgtacaatctgtatctgaggaatttctgctcataattgttcatagatcaattgccattcaacactagtctctggaattgccaaaatattggatattcaagtcattagcaattaggagtcctgttttcagactgttgtactataagagctgttcattcatatgtatctcagaggctattgtccattttaatattaaagctgtgcccttaatttccacatagaaagacatctatcttgtactaagacatccagttgttgctgaagtccaaacacaacttaaatgaaatataattaatggaagataatagcaactcactgagatagagctgaacacttttggagcttatgctttctgtttttaagacacatatttgctctcctcaatcaaatgatttgcttgtcctcttctgtctacgtcagccatgaatttgactctgagcacgtccccgacctgacgaaagaaccgtatgttcaggacatccattctgtgggttccctatgtaagctgtacttccgggaactcccaaaccctctgcttacctaccagctgtatgagaaattttctgtgagtacaggctacttttgaatctaattctttgtggaactttgctgtgcttttgttcaaaacacatgaactttggtttggtcacatgtaagaaatagttctgtgactgaaatgactccttaaaaa

SEQ ID NO: 8636 - DNA, 2300 bp, Homo sapien
gtacccatgaaaatttttttaaatgtatagtaggcttcagtaagactctcagtaatcatctgcaaacttagtagggggatttaggccatctggcttagtcttctatctaacagctaatctttgagctcatgatattgttgtatgttgacttttagcataattatccctataagctgcacttctcagcaaaagtcatttttaagggatttactttcagtttttttagttgtctttctaatgtatcagtcggtggaattattttttcaaatattaatttactcacctttttccttgatctataaaggatttaagatgatgtacttagtatattatagacgaatgttaatggactatctgatgcttgtgtgggtgtgtgttttgtatttatatagccattaggttgacaagtgtgttctgtgtcattatgggattgtcctctttgcaaaatgagaaagagttttcttttttcagttatattcaacagattacaagtgctacgaaaatttctaaccatcaagtaaaataatttaaaaattgacaagaaatgcaaaccgcttttacaccattttaagtcttacttattataaagatctccaaagtaatatattacagtaaaactcaggttcctcttataatcctgtaacatccttaagtatgcattgggaagatgactggtttaccaagcttgattcaaacgtcatgggttacaacatttaaatttgctgacagtctcataaggtaaggtggtgagaagatatcgggggaaccagcccccagtattttaatgtaggttcttttctattttcccaaagtgtcggctggtctaagaaataaaggtaaagagtacaaaagagacaaattttaaagctgggtgtctgggggagacatcacatgtcggcaggttccgtgatgctccctgagctgcaaaaccagcaagtttttattagcaattttcaaaggggagggtgtttacgaatagggtgtgggtcacagagatcacatgcttcacaaggcaataaaacatcacaaggcaaatgggggcagagcgagatcacaggaccagggcgaaattagaattgctgataaaatttcatgtcccgctgtgcatgcattgtcattgataaacattttaacaggaaacagggttcaagagcagggaaccggtctgactaaaatttactaggcaggaatttcctaatcctagtaagcctgggggcaccgcaggagaccagggcgtatttcatcccttatctacaactgcataagacagacactcccagagcggccatgttagagacctccccctgggaatgcattctctttcccagggctgttccttgctgagaaaaagaattcagcgatatttctcctattcgcttttgcaagaagagaaatatgactctgttctgcccggccccacaggcagtcaggccttatggttatctcccttgttccctgaaaattgcagttatcctgttctttttggatgcccagatttcatattgttcatacacacatgttttacaaacaatttgtgcagttaacacaatcatcacagggtcctgaggtgacatacatcctcagtttacaaagatgatgggattaagagattaaagacaggcataggaaaccacaagagtattgattggggaagtgataaatgtccacgaaatcttcacaatttacgttcagagattgcagtaaagacaggcataagaaattataaaagtattaatttggggaactaataaatgcccatgaaatcttcacaatttatgttcttctgccatggcttcagccagtccctccattcaaggtccctgacttcctgcaacaaaaagaaagtacaaaattatgatgttatttataacacaactcttagcttaaacttgtactgacattttcctaaagattataaagtatattcataatagattattttgctgtcagcctcttgagatatgtttgtttttatgctaagtaaaatgtaacctcttgccacaactaagatcttttctctttattgatttttagtgtctaaaaagcacggcaagctcattacgttcttacgaacattcatgaagtctcgtccaacaaaacagaagctgaagcagcggggaatcttgaaagagagggtgtttggttgtgacctgggggaacaccttctaaattctggttttgaaggtaaaaataaaatgtgcaagcttatactctgagtttctgacctctccatattggtttgctataaccaattatggagtagatttagtcaaatgatacctgtttcatttcagttcaat

SEQ ID NO: 8637 - DNA, 2300 bp, Homo sapien
tttattttgaaataattgatctcagaggaagttgcaaaaatagtacagagagatcccctggattcatcactcaatttctcctagttggaacataactatatagtagtacattatcaaaaccaggaaacaacatggtcacaatacagttaactagatgcagaccttactccaaattcaccagctttggcagcactctttttcttaccatgtatttttatatggcattagggtacagctttttgggtttcagatgagaattatcatcattaatctcccacacacaggccaatgattgtggaatacagttattcctatcaatgtttatatgttaagtaatatataacatatattacttaaatatatatgtcaagtaataacatgtattacttaaatatatatgtcaagtaatataacatatattacttaaataatatgttatatataatatgataaaataatatatattaacatatatattacataacataaacatggatgtttataagttaagtaatatatggggcttacagattgttctaagtattcccaaatggcttttctacagtaaaaatatgtactttcttttttctcactctcttccctcatccctccttctcttctttctcttttttcttcctctctctcttttgtttttcccttgccctcccttgctgtctttagtactaaggaagaggttgggagggagagatgttattcatttaaaattaaagaaaagaagagtggctttgccttctccaataggagtaaattttaagagccttgtttcctattcagctaaattcaataatctgcagatgtcccattggtaaagatcaaaatgttttgttcctgccacatactggaattctctatgatctttcttattttaaaatcacataaatttattgttttttattgtggactaccatttatcaacaattctatgttcagagctatgttcaaagaggaaggaaagaataaattcaatcaacagcagaagattttggaatggtgcatgatgaatcctccctggatatctcatctcttgccagttactgttatgggaccttggcaaattgcttcatctctctgccttagtctcctcatctataagatgagataataatagaactgccttcattagattaggataaataatgtttttaaatacctagaattgtgtctggcacatagtaagtgctataacattattttgtaaattaaaaaatacctgagggtagaatttacattaatattagtaaaaagtcattggaatggaaaatatgtaaatattttccaattcatttgtttcttcaataaatacataattgggttaacacagttcagtattattatttagtagaagtattgaatctcagtatttatattgtatttatgcaaataactaataagaatctttaaagctttaaaaagtcacgaattgagattgattgtcagtttgataatagttgccaaagattttcacttttgctaatgaatgtctctggtagaggaaaagaagtaccttgggactccatgggtgaaggagagttacatatttaacatctgtgtagtgtatgaaggagaaggttgtacttgggaaaacttgtttaattctggatttcccattctgaagaaaccttttttatttttttccctaataattgcataagagattgtcttagaatttttcacacagagactgtgtaagttgatacttaaaaaaatgtgttagtagaataacaatcttagctcagtatcagcaaagatattaaaagatttgttttctcagcctatcctgttgttttagtgattcagccttttactggcagtacttcctacttgatcaattacttttcttattttaaaggagcctaaagtgctatcatttttattggatacactgtctcccacctacttagcaaacaactgaaaagcaattaacttttaaaaagagaaaagacataatttaatatcaatttcatactggtgttttctgagcaggaagtgctcacctgtgtggggttgatgggtggagctcttctggtgaagcctgttctgcaagtgtgagtttaggctggggcgtttctgtggtgttgcaaagcagtatgtgctgagagaggaggattaagctcctggaggcagagctctcccacacacttgctggcttgctgggctccactgactggactgaaaacagggccaagaaaactgctgctgcagggggtcctgaaaacagctggaacccggcagtgatgtgggacctaacttgaagttaacctgtggtggtgaggttggaa

SEQ ID NO: 8638 - DNA, 2300 bp, Homo sapien
ggatgattactatcctctgagagaaagtgaagctgtcacattcatgaaatggatttaaataaactaaaatcagagatgttgtaaacgaatataggatcatttaaattaatttagtaagagcaaacctgagtaactggactccatacagaatgtacccagctgaagagaaagtcagggagttgaatgatcaagccaagtcatttataagaatacaacccctggaagggacggaaagttaaaaagttgtgagagaacagttgggagtcatggagaataggtccagagaggtttctactgatgggagttacaggaggagagagtggatgcaaggaaataattaaaaattggtgtaagccactccccctaccagatctaaataaagtgatgttctgagattcagtgggttcattaagtgctaaaatataacggacactgcagcagggtctcaggagtgtcttaaaacacggatctctttgtaccatagaaaacctgaaagtccctttatctgcatttcccatttctgcttcatttcattttttttctgtttcatttttttctctcagattatcctaaaacatggccactaccaagaggtcccaggtttttatccccttttaagagagcagccagactgagctagaatctgtgtcacaattcctaattcctgggttagctcttgattggtccaactaatactggggcatattcctggaccaatcggctgaaccatggtataggatcacgtatgaacatggctgctcctgccacaggccatgtgcatggaagattacagtgggtcttggggaaaagggtttctgagtagtagggggaaatttaggcagaaaagccaaatatgtatctgctatagttatctttttgcatattcagtacaaaaatagaaagtgtcaaaattagaaaccatggaatagtatgatcgctgatgataaggggctagaaattgaagctctgcatgagacaggggctgacttgctatgtaagtgcccatagtgctactggtaagtttctgtgaagagtcctctgtaactattaaaatgcctaaagatctatagatttttttcttccagaaaccatccagttttccctgccagagagcatagtatctttactcagagttacactgatctttttcttttcagtcggtcactcagatgcttatggcttacctgtcacgcctttcagctatcgctggcaacaagatcaactgtgggcccgcccttacctggatggaggtatttcctaattcacttttcatgaaaaatgtatatttaaattatctacttaagaaatttgatattaacataattttgatgtctattgagcttcaggaatcaaagaaatgaagtatattctcagcatctgggaggatagatacgtgatacacgaaatattttttcatctcaaatctttctttgataatcttggaaactaatcttaatatattttatgaatctcgatgatacctgttattttggtgtttagtatactaatgtatatattcagcaaggtgtacatttttttagttgacttagtaattgaaaatatttttcagttattagcaagggacaactttttaaagggtcctttttaagagtaagtattgagtgaaacattattcagtaaatagattacatatttattcttaatgtgcatatgtagagttatattgttttctcctcccactggaaattgggaatgcaagatggaaagtggaaagaatatagaactatgggccaacctgcgttgagatcttggaaaaagtattgaatctcttgtaaattacatagcctctttcatctttagcatctcacctttaaatgatgataagtatttttttttggagttatgaggattaaattaaactgtatatgttataggcacagcacaatgactagcatatttttactacccagtaaatggtagtttttttttttaagactctttgggttattgtatctctaaattaaaatgaatttcttttatagatagtcaaagaagcatttgcaagtccagtgtctttatctcatagtacattttctttgtgatagattgataataagggaaatcaccttttggttcatgaggagtcatccatcaacactcctgctgtcggtgctgcccatgttatcaagaggtacactgctcgggcccctgacgaactgaccttagaggtaaatagttaaagtggttgtttgttatttggttcttgctaactttctggcctcatctttgactgttcttaaccatttccttaatttttaaaaaaatgaaaagcaccaggt

SEQ ID NO: 8639 - DNA, 2300 bp, Homo sapien
tattcataaagaaggaaataaagttttatgttccttctttttgatgagatactgcaaattgaggggacagtctcagacttggataaagtgttttacaatacatgtcaattatgaagattatttttccaatatattagtaaacaaatcttctagaagtcaatacataaaagtcattgtaatagagaaaatgaacaggattttggtagtaataggcaattcatacaaaaagaaatcttaataacaaatgaaaagatgctaagcttcactcataatcaagggaatgtaaattaaaagaagataccatttcaactctatctggttagcagtgctgtaaattctgatgatgccaagaattgcaaggatttgggggcagtgggaactcatatgctactgttgggtgaataaattggtgttaccactttggcaaatttgaaataaaatgatgcttgtacatcataacttggcagttcccaggaatgctttgggtagaaggtagtgatagaactgagaaaataaaggagtttgcttgagcaaagcatcaaagaaagagctaacatgacaggaagaacaaacagcacttacagaatcatgaaggcaaggaaaggaacattcagctcatgaatcgaatacatgcaaatcattcaatataactggaagccaagaaagggcatggagtaatagccagtaagatcagtctggaaatttagacagggcccagatgataaaagctgtgaaatgtggggatagtttgggtttaatcctgtagaccagtggccctcaattcaggctgatcgtcagaactaactggatccctttccagacttagtgaattagcatctcttagaatagggaccaggacactgttcttcaaaagtctcagtcacattgcttctctgcctttcagccaaggtcaagtgtagaagtcttgaccacatctattatttcattcttagaaccctctgaaagagggagctggtaatgactttttgtctatgtcgtggaggattacagtccaaagtgggattatgcaagtttatcatgttaatttttgagacactagtgattagaaatcagcaccctctcatgaggtgataccctctgtttctgctccagttgtctggggcagatggaggaactggtgtctctgaaggctttttctttcagaccctccagatttttatgagccaaaaggctctacataaaaattaaattacattgcaaaactatatgctatacagtcgggatttgctcatcattactcaccacaggagcttttgaaggacttgttgttgttgcggtgtgagctgataaactctgtattttgtagttgggggtgcaggggaggagttcaaaggcaaggcacattagcaatatttcaggtaagaaatgatgatggttcttactgaagcttgggctataggactgaacaagaagtgatagattcaagagaagattagaagatagtatctaataaatatcctttatgagtgtaattttaaaaaatgagcttgtgagattgggcaaagaaaggaaggcctgagaggcagggagagctgaggtttctagatgctgtatgaatatcaaatatttatagaggaagacttcagtagttttggttttttagtatatttccgatctcagtcacagaaaatgttggtagtaacaaatcaaaacctgattttatttttctttaatttcagttaatattctcctacctatggtttttttctttttggtagatttaaaatcacatgttattttaaccatttagcagttattgttctgaaagtgaggcagtggattttgaccagcagtaggaagagggatggtggagagttctatcttattttcaattattggccttttaatgtaatataacttattagagtgtttcacagttttagctattaactatcaagttaatagaaacttctcattagaaaatataaaatctcatgaataaaatcacattatagaatatggcctgattcataagtatttcccaatagaggtgaattatatgagtttcttttttctaccaatagggaaaaagttggattgttaaaagaagttatgaagattttcgggtacttgataaacatcttcatctgtgtatttatgaccgaagattttcccagctctcagaacttccccgttctgacaccctgaaggacagtccagaggtaagcatttagtacatttagtacagaggtaatcactatatatgagtttgcagaagtttttgtctgtatactaaacaaaagcttatactgaacacgcagggtgattcctgggactac

SEQ ID NO: 8640 - DNA, 2300 bp, Homo sapien
ttttaatttttaaaaattctgcttgaggtttatagaatttctttgaatctttagtttgatgatttcatcagttttgaaaacttttagcatttgttttcaaatattgcttttgtcacattctcttgttttaaaaaattatctcccttatctctgtcatcaatttagacatatttgagatctttttttttaaaccaagtctctcatcctttatactattttgtgtattttctgttcctttttttctctgtgttcttcaatgtggatattttctactaaactatcttctagttcactaaccctctctttagctatgtttattgttctactaaatgtatctggttagttcttaatttcagatactgtatttttcagttttaaaatgaacatttgattttatggcttccaattctctgttgaaattcatcatttctctcttattttttactttcattcaattgaacatataaatcataaatgtttttagcaatttgataaaaatttaactaaattcttcttatgtattcctcttctccccatactgtgttcagaaaagtaactgcttgtcatccatctaatctcagagaggcttgtgtttccatagtgtttaaactagttggttgccctgagacctcagttttctgttgtgtcctagaaaagttaagattttcagattatctatttttttttttattattactaggctaggggtgatgctctttacagctttctgcatcataggcagaaaatcacaaatgccattttaaagtctctttctgataatgctaagatctgaatgaaatgtgagtctttctggtttgactattttttttctcaattttcactagttcttgtttttttaagcatgcctcataatatttactggatactagataatgtgaacgaaagatttgcagagagtctggagaatgttttttcctccaaagacagttaatttttcttctcgtacttctgattctgtcaaggcttggtttggggctttgttagaatttttctattgctattttgtccatactcttaaggcatggcttttttagagtcacacataagagctcaggggtttttcagtgctcctccatcttggcagtgcttgcttgccagcccatctcctcaccattgatgggctgccaaaatgtctacttgcctctttacttggtttgttttgggtttcttggcatcctgtcctacatatttgtaagcttaggactcagttaataatttgaggtgaattttgctgtagatttctgggctctttctctttaggtcttttttgggggcattttgcatcctgaattcctccctactttggtaatcccagcctccaacctctgccttctcatcccactaagattacagttattatcttgggctctatttcccatgattgatttgaaaagttatcttatacagaaagaaggattaaatgtggaaattgcttgattgggctttccttatctcaaagcttgtagccctggatgtcccatctgtattggttgctttctgttgccttcagacaagctgttttatatgttttgcccaacattcatagttgttctcattgaaaatgcttatttgctgcactctgctccattgattggaaccagaaataccatatcttttctttattctgaaatgatactaatgcttagcacagttctgtaaatattgattcagagtaactaattgctgttgcaaatcttttcaaggttcaaattgtgttgaactgataaaaatcagtttttatataataaccatggaccataaaggttaactagctgtaaaccttattttatcttctggaataaaagcaggtgtttggtacattaggagagacctctgaaagccagagtagaaataaaggatcactgctattcagttaagctcttttagctaaacttcaaatctgacatgtagtttttctgctctttcaattgtgatcattggaaggctttcatagaattggaaattcttatcagaatctttcgtgttttgatctctaggaagatgaagtcctcagtacattctgaagaagatgattttgttccagagctacatagaaatgtacaccctcgagagcggcctgattgggaagaaactcttagcgcaatggtaaatcagttttatacaattgttcatatatacatatatatgtatatatagcacttatataaggaaaaggaactgaggacacattacacaaaaaattttgttgctttgttcatttattcaggaaatatttattgagtgaatactgtatacttggcactgtcgtagagtctgtg

SEQ ID NO: 8641 - DNA, 2300 bp, Homo sapien
aaacatcacatcactgcatgcagtgtcagagacatcggtaaatcctccgccaacaagtattttgaatatagcagaaaaacacagatgttttagaccttctgagatgcattaagttctggaaactggaagccataaaagacaaaatcgtgggaggggaattgctgggagcaccctgggaaagcagccaccctggagttgagtgacctctctttgatctctagctttcccaagtcactttcccatgcatttcctcaacactggtttcagttctttagatctaataaaagcctttggggttgggagcatcactgagtagagtgctgattcaggccaagcttggagggaggagtggagcattcaatgtgtttacagtaaagtgtgtgtgtgtgtgtgtgtgtgtgtgtgtgtgtgcgcgcttatgagtaatagcaacttctcaccactgtcacagccaccaatgggagatttagcttcctccaagtcacctcaattaaacatacgctctaaataaagcagcatgcttgctggagacagagcttcaaaaagtcccctagatctctttctccttccaaacattttgctgccctgaagcatgtcatatatagaaatgttatagttgcctctttgttcattcattctttcaaggatctccacattatattgtttgataagaagtggaattaatactttacacaaatgcttgcatttccgtgctattcctttcacttcctgatcatagtgcactctgactataaaatggattacgtgttgttcctcctaatgcttcagtatatagagcctcccatggtaggtgatatacttgggtgactctacaggttgcttcgcgacttccaaaagttttttctgataattttggaagtgctgcatgatttagaaatgctgattcacttcagtctttagacacattgaaaaaatatattatttcttcctcattttcaaaatattacacaaagaagtttggaaagtaataataatcactgttcacttgcaaaattcctttcttctaaaacatttttataataattaagtcattctatctttatgatacccaactaaagaggacagcgggcaagcccattttacagatgggaaaacagatgttaattgccttgtccaagactacatagtgagataagataaaaaatgaaagggaaacttgtcctcctaaaatttatgttctttctcaccatggtgattatttcagtttggattgagaagccaattcatataatttggctttttctgtgcctttaatttctacatattaaaacctaattgcaaggttagactgtgattttgtcctacgggcactaaattcctcatgtaatatgtacctttctctgctgaatcttgatattttcttagattttcagtatagtttgtcttgatttgacttgcagtgcactgcaaatgatataattttattgtggaatatatgaggctggagggctggggagaggtcagagctgaaagtacaggaaatttaaattacataatgttacactttgcaattgtttccacttgtactaagtataaagatagatccatggcaatacacaacagcaggtaagaagtgtgtataaagactttgcaccctgatagtaccatttatgtattcatttggcataaacatacccatttgtgaataaacaaagtccaggccctcatggtgcttacattttaggaacagagtccaataataaatattgattacacaacataatcatgtagtgataagtgctatgagaaaaaaaagaagcagagtaaggggacagagaaggcagaactattttatatagtagtaggaaggttaatttaaaagccaggaaggtggagtcttcctggcaggtctgagaaacctcaggagggaggtgggtgtggctgaggcagagtgaatggcaaaaggtaaaaaactgaactggtgagtcagggctgaaaggacttgaaaggctgggaaaggactttggattttattgcagtgtgattagaagcacagggccctggagtgttttgggcaagaacaaggacattatcttaccaatgctttacaataaattctctggtggctgtgtagaggctagaccgtggaggggaaaaagtggaagcagggtgatggttcgtctgtcccagtcacccaggagaaagatcacggggagggcagacatgggtgttcgtggttaagagagaaggatgcgattggcttccgtaccatttgaaggtaggctaaaatgaacgtggtgattgaaaggaagagatattttttgtcctgtgatgaggca

SEQ ID NO: 8642 - DNA, 2300 bp, Homo sapien
gtgaaacctggtctctactaaaaaatacaaaagttagccgggcgcggtgacaggcgcctgtaatcccagcttctcgggagactgaggcaggagaatcgcttgaacctggggggcagaggttgcaatgaggcgagatcacgccactgcactccagcctgggcgacagagtgaggctcggtctcaaaaaaaaaagaaaaaatctattttctctaacagcctaatgattagtcctctgggcgtgtccctccctcctagtttaatcaccggcccaggcgccctcatttacttgcttccgcggccaccagggccccctgggcaagcagctccgcagagagcccgccggcactcgcggacgcttctaggctgggagcggggaggaaatgtcaccggccccaaactcggccctagggaaggccatccgcgtctatacttctcagtgtccctgtcgtgcgttttccttccaaccccatgcacactcattccaacataaagtcgtggaaacgggcgtgcactgggctgttcccgccgaacaccgggcgcgactcaggctgccggaggcttcccgggcgcggaggctcggcggggtcccctttacgcagcaattccaatgaacaactaaagtccgtacagattttgattggaacagaccctaagactaagagcctggaaagaaaaaggcaaatcacccaataaacgcctgtcttcgcgactctctaacccggtcgtatcgcgagggatccggatattgaaagcccctttgccggaagactcgggcgctgggagaagcccgcatgggacaggctgccccagtgcccgccggctccctagaatcgtgcagctctgaccctttccaacgaggaaaaaatgtttttataaacaatgttttaaaaaaaaccgcacacttttttaaaaagtcagaatctcgctcttgtcgcccaggctggagtgcagtgacgagatcccggctcactgcagccgcgaactcctgggctcaagatttcctcctgcctaaacctctccaatagctgggactacaggtttcctcttgcctcaacctctccagtagctgggactacaggcgtgcaccaccatgcctgtttttaatttttcttttgtaaagacagggtctccctatattgaccaggctggtctcgaacctctgacctcaagctatcgtctcacgtcggcctcccaaatgttgggattacaggcttgagccaccgcgcccggcgataactcacacttttattagtttttcttttcttatctttttttttttctcagttttttatgagggtaacggacggggccagggtcatttatgatttgggatcttggggcagtcaagtttgcaacttcagctcaaaagtcttacgctcggagcgcgcaggctcagcgcgggctgcgagactgcgagtggagggcttgggaagccgcggtcttcgggaaaccgtccacgcggggaaggagaaaggcacggtgggtcctcgggggcactggctctgtggcccgaagtcccgggagcctagtgaggactagacttctttctagtaagagacctgaacgtgccctcccgctgggctgcggacactgggagccgggccggcgggtggcaggacaggcagtaaggtgctcatggggaacactgccccggggagctaccggcctgggccttggccgcgggctggggcggtgcgcgctccccgcaccgcgcgcacactcctgcacacacacctggagcgcgtcccgggggggagggggaggagagccaaaacgagcgtcttaaaatagagagccaggcagaggagcgcgagacaccagagcgggaggcagcgactgagagccgccgggcactaggcgcgcaggtcggcgccggagtggcacgggcgggcgggggcggggtgggcgcggacgcccctcagcacacactccgcacccggccctgcaggaagctcgcgctgattgacagctgcgttgtcccaaaaaggctcagcgaagatgctgatctgcgggtgggtctagacgcgcggcaggcgcgcccgctacccgctctcctccgcgcgccacccgagccccgccgcctccccagctgccgggagcggggcccaggccccgccgtcgcgccagccccgcggccccagcgggccgggcactcgcagccgcgctcgggccggcggacgctcgcgccggctcaccatgcactgccacgccgagctgaggctgagctcgcccggccagctcaaagcagccaggcggcgctacaagactttcatgatcgacgagatcctctccaaggagac

SEQ ID NO: 8643 - DNA, 2300 bp, Homo sapien
tccctccggagtgagtggaggccccgacggaatacatgactcacaacatattgactcctgaatgttttagaaatgaagcttgccttaattttcgacagccattaaattctcctcaaggcattttgtgaaaaaaggaggggtgttctggtggtggttatcaaaccataaccaccctcagccacacctggggcactcccagactgttggatgctagtcaggagacgaaacgaacgtttctgtagcacctatcatgtgctccagaacttttcagcctcctgcctgacttcttgcaacaatcctgcgaggcaggtggaatagctgctatttcaaagtgaggaaactgaagctcaaagtcccaattcccaaagggaggagctgaagaagagcgccagtctcaccccatctttccgtgtccttccagaaggaagaggccaccctggtagctctctatttccagaattctgcttctttcgtcttcctctcactctgactgctggggtgcttacacacaggggccagcaggaaacagagacaaaggggagaaggtgtaaacacgagcagggaggaaaacttggcacaagctggatgtgagaaggattggcgttgccggggacgccagggctggtaccaagaacagaggagacggtgaaatgtggccttgtcctttctccagttccagaagggccggtctgcctccattcctagagtccgttgattaactcaacagctgtttattaagcatctaatgtgtccccagtacttcaatgggcactgggaatacagcagccatcaaacaaagctccctcccccccggagcttacattctaggggagtttctatctagcggcttcaggcagtcctctggaggcttagaatgagggtgctccctgtggttcccctggacacgcacaagcgcagacacacatgcgctcacataagtgtgcactcacatgcacttgcccgcgcgcgcacacgcactgccccgtcttgccgccctttctctagccaagcacctgaagcagaggcgcagcgcggatgaccctgaacatgtgcgcgaggagcaggccaaccccgaggcagccaccagcgtctcaaggcccgcgcagtcggcggggcgcggggcgcagctgggcggtgtccctgggagggaaggaggctgcgcggagcccccggagccccagccccgggtagttacacctgcccgcgctcgctctcgggcacagcggggctcttcctccaggggcttgcggtggagcaggcggtgtcaacccctccaggctcccgctggcccacatccgccacccgcctttgcctcttagccccacagacccacacgggcctctcctcccaggcatggccacgctgactgattcctccctcctctactgatttctggggcccagcctggagggagaaaagtgggaaggtgtccacctgcgccagccttggtgtttgggtgagacacaggtggaaaacaattacagggctctttggaaacagcctcggccctggaactgtggcagaaacttggactcggtggcctgaaaccaggctgaggagcacagtcaggcagtgcggacctgtccctcggggctgattaattagacactccttccttccgaagccttttggttggctgtttgtttgtttccaaggctagcaaccgcctaccaccacttctcacacatgctttccctaaggcgaggctgcgcgcaggatggcgtgcactttcctcctccctctcaacttctcccatgctctctcaatctctggtagacaactccctaccaggccacctttctttctctgggccagttagcaccttcgagaagttctcctgtggccatgcccacctgcctgtcctctccaggagaaagagagagtggcagggcaggaggagggtccccacctccataggacagctggcttagctctgcagagcccctgtggctgggagggtgtgtgttagggccccatggggtcagggtacaggcaggctttccaggcaggtgggcctgcctcagtcccatcctgcaccccctgtggatcaacgtcaacagcaagagactcacacagggtctgcttctctctccttgtcaggtacaagagaactctgcatttgtcttctgcccacaacttcgttgaagaagtggagaggccaagcaactccaaggctgtttggaaggagagctgggctctgcctcctgggagagttggaggacatttcttctctgtggagtgtgaagggaggactgccctattccttgtctgctagtgcttgcccctgggagccagtgcat

SEQ ID NO: 8644 - DNA, 2300 bp, Homo sapien
gtctttccagatcgcccccagaggcttaatatcaaatgcaccaaatgatatacccgctttttaaatgtacccccacaaaaaagggaagcctgaaatctaagcccctctctcatgccttgcagtccccatctgggacctcaggtgaatgatgaggcactgcatgtggggttagaaagactttagtcttggcattgtgggaatgggagtaatgcctttttagagaattaaggtatcctggtgtcatgtgctggtgaggcccagtggccctgccacagaatgggcagtacctcctcacccactccttctggagatggcactggtggctcagttgcatattcaagcaactattgtcaggccaggatttgtgatgtatcccaggatccaattaaaattgttgttgttgctgttgttgttttggtctttgcacggacaatatagcaagtctggtaagtttctctgatcggcagcaagcagcctcggggagagagctacaattattgagcactgcgccttggtttttacgtacatcacccctcaccatgctcccagcagtcctgcagtgaagatgttgtacccgttttgaattttaggaaactgacgcgcagaaaatgcaagggacttgcctggagtcacacggctagaggggataaggccaaagattcaactccatgctctttctaacacaccaggctcccaataagcacttattacaagaatgaatgatccaaggcacaaggactgaagcagagaatgggtatgttttaagggagaagagggataaaagaaaggtcacggccaggtgcagtggctcacgcctgtaatcccagcactttgggaggccgaggcaggtagatcacaaggtcaggtgatcgagaccatcctggccaacatggtgaaaccccgtctctactaaaagtacaaaacaaaaattagctgggcgtgggggcgcatgcctgtagccccagctactcaggaggctgaggcaggagaatctcttgaacccaggaggcggaggttgcagtgagacgagatcacgccactgcactacacagcctggcaacagagcgagactccactgaaagaaagagagaaagaaagaaagagaaagaaagagggaagggaaggggaagagggaagggaagggggaggggaaagggaagggaaggggaaggaaaggggaaggggaaggggaagaggaaggggaaggggaagggaagagaaagaaagttcacagtgtaaggccaggcgcggtggctcacgcctgtaatcccagcactttcggaggccaaggcaggtggatcacgaggtcaggagatcgagaccatcctggctaacacggtgaaatcccgtctccactaaaaatataaaaaaattagccgggtgtggtggggggcgcctgtagtcccagcttctcgagaggctgaggcaggagaatggcgtgaacccgggaggcggagcttgcagtgagccgaggttgcgccactgcactccagcctgggcaacagagcaagactccgtctccaaaaaaaaaaaaaaaaaaaaaaaaaacttcacagcatggagagcaggcccacttgggacacagaatgggcatgtgtcaagggccctgggaggaggtgctggaaagggacagtggagaaaagggggggacagccgatcagtcccctgggccattctgcttgcctcctcactaagaatagtagcatctcccctcgctcccactgctttctgtggctctcaaaatgctttcgcatgcattttctcactacagcctcagaacaatctttaggagtagtgttatcttccccatttcacagatgagaaagctgagactcagggaggccacataactcgcccaagaacacatagccaattagtggcaggtatggggctccatttaagtatatgaccccgctctggttcagtattcttatccccaccccaaataaagagaatcacacgaccttattgtgataataaatagcaactgtagtcagagggagagaggcccagggaggaacaataatctaactaagacgcttgacattggaaactcctggagggcagggcagagatcatgcaggagatttaacagcacccagcacagctgcccacgcggaggtgcgtctatgctgagctgccacagcaaggctgcagtgcctggcccggagcttggtcacgctgacctccacggcaggaactgagagcagcatctactcccaatcctgcataagaggtcatagaaacaccctacagcccaggggggagccagtcccggccaggaggtggcgtcacagttc

SEQ ID NO: 8645 - DNA, 2300 bp, Homo sapien
gtcggatcccgtgtccttctgcactgctaatatctagctgtggccctgctttaaaacccaaatgcaaacatctcttccatgaagcccttcctgattgccagtgccctcaacagtggaataagctgccaggcatcttagagatctagacccgtggttctcaacccccacttccccaggcctcctgagaagcttttaataggtgcatcagccctggattcttaccggcaggactgagagggagccttaacgcttgtgttcttctaatagtgtgcacagggttgacgggaaacacacacacacacagtgcagaaccattccacgaagctgtgtatccggaattggttccctctgaagagttcctggtcccggtcctgccgcggaccttcacggcattatagttcttaaacatggtgtgtccggagtttgttccttcaaatgttcaggtgtgtccgaagttttttctttctagagagttcgtggtctatgcacgacttgatgagtgaggccgcggaccttcgcagggagtgttacagctcttaaaggtggcgcatccgcgttgttccttcctcccagcgggttcgtagtttcgccgacctcaggagtgaagccacagaccttcgcagggagtgttacacctcttaaaagtggtgcgtctggagttgtttgctcctccctgtgggttcgtggtgtcgctgacttcaggagtgaagccacagaccttcacagtgagtgttatggctcttaaaggtggcggctccagagttgtttcttgtggtggcttcctggtctcgctggtttacaggagtgaacctgcagaccttcactgtgagtgttaaagctcataaaggtagtgtggacctaaaaggtgagcaacagcaaaatttattgcaaagagcgaaacaacaaaaccccaacaccatcgaaggggacccaaacgcagctgccgctggctcggatggccagcttttattccctcattggccccgcccacatcctcctgattggtcctgcccacatcctcctgattggtccattttacagagcgctgattggtccattttacagagtgctgattggtccattttacagagtgctgattggtccgtttttacagagtgctgattgatgtgtttacaaacctttagctagacatagagcattgattggtgcatttacaatcctttggctagagagaaaagttctccaagtccccaccaattagctggacacagagcactgattggtgcatttttacagagtgctgattggtgtgtttacaaacctttagctagacacagagtgcagattgatgcttttacaatcctttagctagacagaaaagttctccaagtccccatccgacccagaagcccagcgggtttcacctctcagtagcttacagaagaggaccctgctgccacagcacaataccacaaagaaagtcatgctctcctcagcaggtagcccccttctccgggacaggaactttgtttccttcttagctctatcgccagcacctagaacagtgcccacctgtcagatctgttatcagatgggaacatggcagatttgttgaatgaatgaaggaatgaatgaactatgtgacactcaaacttagccaccaaacttaaactaaaaaaactgggttgtggtccctgatggaccgttggcaccttcttcctttgctggacggtgatccgtggctgtttctgcggtgtgttcgcagtggttgcctggcttggtaacaaacactcttcggagccacagcctgttctcagggtcctcgccgcctcccaggccctgcgatctctttgcatctcaggaggtccaggttggttgcagtcctcttgggtgactcaggaaccagcctctcctgaagcacacagcttagggagttcctgaggccagagacatctccacgggaaagtcaaaggcctggaggaagtgcggacctgacgacagatgccccgcacgctggccgggaccgggaagggcggtcaagggtggaaaggggctggcggctgccaggcctggcggagtggagcggggcggggcgcagcggggcggggcgggcctggagctgcacctgcttctgggcggacgcacttggcgcgcggcgcgggctgcagacggctgcgaggcgctgggcacaggtcagacgtccgtacccgcagggggctcgaacctggaggagggctcgaagggagagggggccccgccaaggagcggggctgtgatggagaggaggttccgactcgcaggggacctgcgggggaggggacgcggacagggaggggctc

SEQ ID NO: 8646 - DNA, 2300 bp, Homo sapien
tgggcggccaggcagagacactcctcacttcccagacggggtggcggccgggcagaggctgcaatctcggcactttgggaggccaaggcaggcagctgggaggtggaggttgtagccgagatcacgccactgcactccggcctgggcaccattgagcactgagtgaacgagactccgtctgcaatcccggcacctcgggaggccgaggctggcggatcactcgcggttaggagctggagaccagcccggccaacacagcgaaaccccgtctccaccaaaaaaatacgaaaacccgtcaggcgtggcggcgcgggcctgcaatcccaggcactcggcaggctgaggcaggagaatcaggcagggaggttgcagtgagccgagatggcagcagcacagtccagcttcggctcggcatgaaagggagaccgtggaaagagagggagagggagagggagagggcttatgaagttcttgatgatgggtgggaccctcatctgtcaatgtgtaagatgtgaaacagccctgacaatgtagctggtgctagagggacgggcctgtgtccagggttggaatatgctgtgcagaccaggaatgctttacattccggggtggtcttttctagatcactgtctcagtctgcttgtgctgctacaacaaaataccacagactgggtaacttataaagaacaaatttatttctcacagttctgaaggtttggaggtccaatatcaaggcactggtatgtggtgtctgttgaaggctgtagcctcacatggcagaaagggcaaaaaagggaagcaactccctccattcagccctttataagggtgcttaatcccatccacaagggaggaaccttcatggcttaatcagctcttaaaggccccacatctaatactatcacaccggcaacacctgaattttggaggggacccattcacaccatagcattccaatcctggccccccagaattcacgtacttctcacaaacaaaatacattcattccaccacaattgccctcaaaagccttaaatcattccaacatgaactttaaaatctaagtccagaatcttatctaagtcaggtgtgagagagactcattcactttgagataaatttcatcctgaggcaaatttctctccagctgtgagcctgtgaattcaaatgagttgcgtactttgattcaaatacaatggcgtgacaggcacaggacagatgtttctagtccaaaagggagaaacaggaaggaagaaaggagtaacaacaggtctcaagtgagtccaaaactcaacattagatcttaggcttgagaataatattatctgactccatatctcaccttctgaacacactggggtgggtgttgggcccccaaggctccaggtgataccacctccaaggcttccctaagtattggcctactgggggctctctgcagtggctccaccccggtgacaaatctctgctcgggccctgaggtcaaagaaatcctttccatcgaggtggaggcggccgtgctcccacagctcatacagtatgcatacctacagagtcagcaccacatggatgccaccaagatttataacttgcgccctctggagcagtggcccaacctgcacctggtcctgcttgagccacagctagggtgacggaggaatgctctgctggaaatgtggggagcagagacctgaggtggccctaggcagtgatctctgagaccccgcaggcgcctgggcccttcccctgaaactgttctgccgcaaggctctaaccctctgggcctctaatgagcaaggcagccccaaatgcctttggggtcattctccgaaatggctttggagtcattttccgaaatgactttggggtcattttcccgttctcttgataactagcacctggcttccttctacacatactaacctgcttatcagtcctgtggccatacccgtggttttctctcctacacacacgtttttctctttttcatggctaggctgagaatttttcagatattgacctttagctttccttttgatggtaaattctgccttcaaattatttctcttttctcacgtttttttttttgttgatgttgttgttgtttttgagatggagttttgcttttgtcacccaggctggagtgcaatggcgcgatctcggctcactgcaacctccctctcccgggttcaagcgattctcctgcctcagtctcccgagtagctgggactacaggctcctgccaccgcgcccggctaatttttttatgtttagtagagacagggtttcaccatgtttgt

SEQ ID NO: 8647 - DNA, 2300 bp, Homo sapien
gccttcgtggtctagtgaagaggttcagaacgcccgaagatctggaaatccttggcttccggggtccaactccctggcagctgcctggttttggtattttgagattctgttcagaatagtggcagtgcaaaggttgtcagtggactagattaactttagctagacacgcaccgtcactgaagaaacttgtgagcaagttgtatagagacctcctaagaggcaggtaggacactgactttgcagttgatagtctgttctatgccagttctgttaagaaggttttattctgagcatcaggttgcttctgcaatttttttttggtgctattttgaagttttgttaaactcacatgctatgtgctgtctcacccgcttcacttatttaggcataggcatgatgaggatgtcatttcaccatgtgctgaagggtgatgagggggcacagttgcttggggaccacccacgtgacttgactcaacgcttaagtttctgctatatctttacatggatctgaaatctcttcaagggagcttgaaataatttagtggaacatgcttcattttacatatagttattctagaactgttctttatcattggagaattttggaaaagaaaagtacctgtattacgtaattcacactgtcactcatctagagattattcattgcaggattccagaattggaaataacgggagggaggacctggtccagcttcccttcctcaaataaggaaattgacacctggcgtggtaagatttgtggaatgtggtgtttgtggaatgtggaatatggaattctggtgttttgactgttaacatccttttttcttttcattttagtatgctttttagcccactttgtaggaataggagctggaaaggatggatttagtaaatgttggtagagtgattgagtttaagctccctgtggtcctgttagcattgtgcagtcctgtgctatcaacttgacccctaatcccagccatcagtctgaaaatgttgtggtatgtagttttctgaaggtgatcagcagtgttctgttattacacgaaggagaaaagtagcattaatttacatgattatacggatcaaatggaccaactaaaggcagattggccattgactttactggtggttatggtcaggtgtgtggaacctcaggaatttatatggactaataaagtcatatcagtaaggttcgtttttattatttaaatgttgcgaggttatacaagaggtattgtgtgtagcattaagcacatgggtttgcaggcaggtagacctgagtttcagtactgcctctggggttgggcaagttactgacctactctgattttcagttttaattccgatgtaataacccatgaccttactttgcacagttgtaggaattaaatgagatatgtgaaaggcctggcttttaataggccctcataaagtgactgttagcatttgcattttactagtgtatgttgattttcagcaaattttcttttgtgaaagaacaacaaacaatattctttctctttttcctttcctttttttttttttttgagacagggtctctgttgcccaggctggagtgcagtagcgtgatcacggcttattgtaccctctgcatctcgtgttcaagcgatcctcccacctcagccttctgagtagctgggactacaggcgtgcgccaccacgcctggctgatttttttttttttttttttttgtagagaaggggttttgccatgttcgctaggctggtctcaaactcatggattcaaggggactgcccgcctggacctcccaaagtactgagattgtaggtgtgagttactgcacccagccaacaacaaagaattaattgctaaaaaacagttgttacagaaattacattgtgggagagtgattattggtctgggaagtgtaaattatagattgtgatctgtttatcatttattctcagtctcattttactcatctgtaaaatgaaggcatatgaaatttatgaatttaggagttactgtaggagcattctgagaaaagagctcttccaggtaagacttgaaaattccagtgggaatgctgtggtgaaagggagggaggagagctgtttagctgtaattagggtgcaaggataaggtgtaagaactggctggaggttgaatgttttcctggaggagtgttagcatcaactagatccctggaatttctgcctttctgtctcaagatgcatgtctttgtccagagtacctgtggagaagaaacaatggattccttagaccatatgctgacagatcctctggaac

SEQ ID NO: 8648 - DNA, 2300 bp, Homo sapien
gcagcttcgatctccctggctcaagcgattctcccacctcagtctcctgagtagctgggactacaggcacgtgccaccacacctggctaattttttgtatttattttagtagagatggggtttcaccatattgcccaggctggtctccaattcctgggctcaagtgatccacccatctcagcctctcaaaggggaagatcctgggcattgggactgaggtgtttttgatacgttcatgcaaagatgcctggagtgggtggttggatttctgggttgtttgattcataattgcttgattcataattgccaaaacctggaaacaatgaagatatctttcagtaagcgaatagataaaactgtgatatatcgacacaatggaatattattcagcactaaaaagaaataggagctatcaagccatgaaaagacatggaggaaacttcaatgcctgttactacgggaaggaagccaatctgaaacggctacatactatgtaattccaactagatgacactctggaaaaaggcaaaactatggagacaaaaagatcagcggttgccaggggtagaggagagggagagatgaatatgcagagcacagatgatttttaagacagtgaaattactctgcattatactgtgatggtgggtaatgatgtatcaatgtaggttcatcagttcttttgtttgagatggagtctcgctctgtctcgctctgtcgacaggctggagtgcaatggctcaatctcggctcactgcaacctccgcctccccggttcaagcaattctcctgcctcagctcccgagtagctgggactacaggtgcccgccaccacgaccggcgaatttttgtatttttagtagagacgcggtttcaccatgttggccaggatggtctcgatctcctgatctcgggatccgcccgcctcggcctcccaaagtgttgggattacaggcgtgagccaccaggccgggccgggttcatcagttctaagaaatgtaccactctggtagaggatgttgataaagggaaggcgatgcatgtggggaggtggggcggggagtatttggaaaatatctttctgctcaattttgttaactttaaaccactttaaaaaaacaaagtctatcaaaaattatagtttacattgtttttactctttttctctttctggtcttgtcacaatctcaaggtaagggaaatatcggtgacaactatagagtgatattccactgccatttatactcgatagtttctaattcaagagcctctcaacagtgtaacaggaacttagagcatatgtggagccagtagaggaacagagatcgggttgtttggaaactactctcttccaggaagggaagaacattagctcggccggccggcttctctggtcccatccacacacagaactgaggatggtctctgcgccactgctgggagtacctggaataagtagtgtgaagccgtactaagcaaaacccagtgaataacaggaaaggggccttcatatctaagaagaggaaaatgatggagtttaactttaaaatgtgatccttcgatgtgtttacattctttctggacatcgagggcccggggacgggaaggaggaatgaaggaactcggaagcacaggctgaggtcgcgttctactcatgtcctcaactgtaaaatgggcactaatagtgcatagctcacagggctgcagcacaaagacggtgggtagaaagtgcttagcatagggcctggggcagggtatgctctctgcaaacgtcagctaatagacgtgccttcgctcacgggctatggaactttgattcgcggtcaggcaaagacaggcactgtctggggcctctggaagctcctaaatcaggtgagacgcgcaagcaggctggaacctgcatccccaggcccagccgcgcgcaggcaccctcgccgaccctccgctctcccgagccgctccaggacccgcccgctgtggccccgccccggcaccctccaggccccgccccgcgctgccccgccccttccgccgcgcaggcccagagcgtgcgcgcacccagactccttgcgggagcgagtgcgtctgggagcccgcggccggagaagggctgcgggttagggggccggcgcccgcggttcaggtgagggcgggcaaggggcggcgaaagggttgaagtgtctcctgggagtggagggagcgggagcgggcggctgggtccgcgaggtcgctgcccgtgtgggcgtggggagcgggagcggggcgtggggagcggtgcgacgcgtgaggctgggggttag

SEQ ID NO: 8649 - DNA, 2300 bp, Homo sapien
ttcctgtttcttagcagttgtttgctagtattcttctttctatcttaacttggttaaatggaaactcactaataagatggagattgcaatttttttttttttttttgagacggagtcttgctctgtcgcccaggctggagtgcagtggcgcgatctcggctcactgcaagctccgccttccgggttcacgccattctcctgcctcagcctcccgagtagctgggactacaggcgcccgccaccacgcccggctaatttctttttgtatttttagtagagacggggtttcaccgtggtctcgatctcctgacctcgtgatctgcccgccttggcctcccaaagtgctgggattacaggcgtgagccaccgcgcccggccgagattgcaattttagtgcctgaaggcgttatatgaattattctggggggctacggtagttttctagggttgccgtagtaaaataccacagactgggaggctcaaacaacagacatttagtttctcactgttccggaagctggaagtttgagatcatggcgttggcagggttggtttcctctgaggcctctctccttggcttgcagaaagccaccttctcactgtcctcacagggtctttcctcggtgcttgcatgtgtccacgtcctaatcgccccttcttatttatttataatgtttgtattttattttatttattttttgagatggagcctcgctctgttgccaggctgaagtgcagtggtgcaatctcagctcactgcaccccctgcctccaggttcaagcgattctcctgcctcagcctcccgagtagctgggactacaggtgcctgccatcacgcccagctaatttttgtgtttttagtagagaggaggtttcaccatgttagccaggatggtcttgatctcttgacctcgtgatccacccacctcagccttccaaagtgctgggattacaggcatgagccaccgcatctggctaatttttgtattttttatggatacagggtcttgccatgttgcccaggttgatcttgaactcctgagctcaagtgatcttcctgccttgggctctcaaagtgctaggattacaggcatgagccacctctcctggcccatcttcccttcttataaggaccagtcctgttggattagggcccaccctaatgacctcattttaacttaattacccctttaaaagtcctgtctccaaatgcagtcacagtctgaggtactgggtgttagaacttcaacatggattttgagaaagacacagttcagcctataacaggggcttgctttctttatttaaaataattttgactggaatgcaaagagaattatgtaggcttaatgtaatctgctgtgtgccagtaatgtttgcaagaaaaccactttgtagttttgaaacaggtctgacctgtagactctggttaaagaatagctccctgtatggtgaagtatgtttatagtcatctctttacagctgacccttttgtttctgcccagccctctctactacttgctttgtggataaccactccagagaactaggaaagggcagtgggaaggggtgaatatttgggatgtgttttttgacaagtcatctgctgtcatggggagattttctttgtgttctcaaaatctcctagcaagaatattactttgtaaagagaaatgcctatccctgggctgcctattataaatgaatgcaatgaaaccccaaaaggaggcaaattgtaatgagctagagagtattttgcttgcattttctggcatatttatagcatttttatcatgttttgtgaaatattaactaaagctatgcaattagatgaacttttagattttgccagctaattttcctacagttgaggcttcagaaagtatcttttccctttgacatttggcaagtcataggtctaggatttttgcagatacaaaggaaagagccaggatgtatagttaattttagaagcaatattttgcgtattgtgacattataaaatgtgtctcatattgaaggttttgttttgtttttggtgtggcttttttttcgtgcaggtttctcttgataaaggggacaggaaagaaagggatttacatgaagacctatggtttgagttgtctgatgagacgctttgtaactggatgatgtttgtacggccagcccagaatcacctggagcagaacctggtggcttaccagtatggccaccatgtgtattatacaaccataaaaaatgtggagcccaagcaggaactgaaggtacagtgctgcctgacccgtgctgctatttgcta

SEQ ID NO: 8650 - DNA, 2300 bp, Homo sapien
ctgacctcaggtgatctgcgcaccttggcctcccaaagtgctgggattacaggcatgagccaccatgcccagccacacccagcctctttttagagtttgataagttcttcgattaagatgcacagcagaaaaaggatgtttctgtgagtactgcaaagacttcctctagatgcctgaagggattggtgttatttcccaaaaggccaaatatatttcaacaaattaatcttcattgaacacctactttatgctcagcgatcttttaaatttgaggaggaagtatatgatatcatcatggtccttaaagaacttaggataataatgattaatactaagcagttactaaatgctatacactctgctactggccttatatacatattgtttcacttaatacaacaacctgaggcatgtattactgtgtccattttacagacaaagaaactgaggttcagagaagtgtagtaacttgctaaggggtggggcaaggattttactctaaatgcctgactccaaagcccatagtctatttccctgaggtgcagttggagaggcaagatggactcatgtgaaaacgcatactcatcaccaaaatagatggtgtttggcaatggatgcaaagctgtggggatagttaatgtgtgagatgtctggatctgaagtctaaagatcttggcagatgggaagaacagataaaagcagtgaaatgaaatttactggagataaatgcaaaatcccccatttaagtaaaaatcagctcttgaagtcctgatgaggggaaaaatggtttaatagcactctatgaggggaaaagaggacttagatattttagttatctgcaagttcaggatgggtctgcagtagagcaacgtggccaacgtaaacactaatgcaccctgatgttgtattaataaaaatatggaatccactgcgaaataaatgaagacaacaagatgattagggagctgggagtttggtcatgtgagaaatgactgaatgaattagggttttttggccttcagatatttgattcttgtggcggaagggttacacttattctagctacctccagaggaaagtcctgggccctaaccaaagcgtggaagatctgggctccacagaaattgtcatagaactatttcagaatgattcaggctgcctggtgaggtcatgaaatgtggaagcagatgctgagtgctgttgtggagtgggattctatggctccaagggctgcaggagttcagagcagaggagactcagggagggctggaggcatcaaaggcggttcactgggaaactggaatgtggtaggatttagaaggtggctgaggaaagagtattttaggtgaggaaaacaacatatgagaagataaagggagtggcatttttaaaaacttgctttatttattgaataggacatggcttgagtatgaccttgtgctaattgggcaggaggagcaagattgcataaagggattctaggccagtgtataatcccataacacttagattggaggcaggagaactttttaaggtaccatttttattttctgccaggatatttgataagatagcattaacctaatacatgacccaaactgtgtcttatttgcaggagactgacttcagcatgatgaaacaaacaggcacctcatctctttcattcttacttaaaaacctcagcctgcctgagctgtttaaaaggagagctgtgagctatggaactttgttaaccatgtgttgcacgacgtgtttagttttaaaagacaagtggttgaggataggtcaactcatttaccccctccagtgtggtatggctactctggaaaggcaagagggacccccaccccaggtttagttcagatgtggaaactgatgatacctcacatgtgcacacatcgaaacggtctgttgcttacctatttgaagtcttgggagacagggcaggcctctcaagcagtgtgaaacggctgaatgagccaggaagagaccaggttttattaagttttaggggtggggtcaggacgcaggtggtcagggccttgccagtgttgactctcccactgctgccaaaggagggagcacctgagccttcttagcagccctcccaggtgtgggacagaaggggcagagggagggcagaggcttaaaggctgtgagcagtcagatcaaaaatgaagccagctcttcctcacagccggtagatggaagtcatttttccagggcctggaaggagttggtaggaagactagatttcagccagcccttgcgccctgtttgtgccagcaggcaccagcgaa

SEQ ID NO: 8651 - DNA, 2300 bp, Homo sapien
gctttttctaaaatatatactcaattacattgacatacaatatatgattaatatgtggtggagcatgctacaaaatattagaaaaactaaaaatgaattctttgaaaaagcaaaacaattttgccttgcaaaacgaggaacagcatagcagagtgggagcttacggggtagaaggcacaagacatttgtcttgatccaaaacaaacaaaaatgtaatcctttcactaaacgtccctgttcactttaaaatggttcattctgtgtcaacttcacctcaatttattgtaaaagtaaacctaaaggccgagcgcgggggcccatgcctgcaatcccagcacttagggatgctgcggcggtaggattgcttgagctcagcagttcgtaaccatcctgggcaaaatgatgaaaccccgtttctacaaaaagtagaaaaattagccaggcgtggtggtgcacgcctgtagtcccagctactagggaggctgaagcaggaggatcccttgagcccgggaggtcgagtcggcagtgagccaagatcgcgccactgcactctagcctgggcaaccagagaccctgtctcctaaataaacctagcaaagttcctttctaaataccccatattgaataaacactgtttaaacgctgctttgcccccaaccaatcctaattttaaaaaaaaatcttgttttctctattctagaacaacaaataagtactgctcatcaaagtggaagctattgtgatgctggaatggtaggaagatacaaaaaaaatacaatgtaataatacaccttcttgccttacagcgatggaggagtgatagaaacaaagagaacaggtcagaaaaagaggccacaaaacagtcatgagtgattctgctgtttttaataaaggttaagtactgctaagtttagagaatttggggtgacgagacaggcaaggtttcaacaggcaaagcagcagaattagggcacagggcagagctgggtgggtctcatcacacatctaatcctcgatgacagcacaaagccacctctccttgtgcttaagtgtacacgcacattgattgaaaatgcactaaaatccaactcatccaccaagcaaggctaaaggcgcgcacacaaattcaacagcgctgcgttcgcgtggctggagggcagacggggaatattccattttacttagtagagtatcaacacctagctgcagggttaaacctgcttaacaaaagctggcgaggggctggagaggtgcacaccatcagccctctcccgagcgccgaccggcctcgccctgcctctgcgctgcaccctgggtgcaggcggactggggcagggccgcgaccccggcctcggcctccgcctccgcccggccagccccgacgcggtgccacgggacagacccgcaggggccaccccacacccctgcgggccggccccccgccccggtcccggacgctagcttgggaaggcaggccgggggcccagccatcgatggcaagtgggcggcgcggcctccgcagacaaagctgggcgccccatcgaacaggaccctccgccccacgcgcccgcaaccggccagccccggagccctgcccgcactgccacccccagcccggcgcccggcccccagcccccggtgctcggctcccggccggcggagacctgcccgccgcgcccggagcgcccgcgcaaccgccgccgccggagcgcgcaggccgcccaaccgccgtcccggcccaaccaacgcgggcaggggaggagaggtgcgcgcggccggcggagcgtgcgagccactcgggggtcgcagggggaggctgcgcgcggcgaaggcaggggcgacgagacgccgaggccggcgctgaacgcggcgccaggagggcctgctggagggggccttgccctcttccccttggaaggtgcagatggtttgaccccccaccccgagtgaggtgcctcgtcccagccccggctggactgtaccatcgggcggtgccgccgggatttctcccccccaccaccaccatcaattccccccccacccgggtccgcggtcggttggccccggccgggctctgagacgcggaaagagctgggcgccattttgggtgggactaagcaaagacgaaacaccctcccagtctatggggtagtctggaccctggcttatctggttcccttaatcctttaggtacttacacgacgttgggtgaggggagctggaagatcagcgggtccccgatcctctctccctaggggtgatagaaatcaaccccccccgccacctccaggtggttcttc

SEQ ID NO: 8652 - DNA, 2300 bp, Homo sapien
taggcaactgatttccatgtctgtgttgccagagtagggctactagtgtctctcactagctatgttaaggtcggcctcatctaagtccagtgccacctgtacagtggtttaaggaagaacaagacacggcctagatgtgaagttgtttacaaagcagttaactgtctgaagtttcttcttgttgttgttttgtttttttaaagacagagacttgctctatcacccaggttgtagtgcagtggcacgatcacagctcactgcagccttgacttcctgggctcaagtaaccctcctgcacagcctgccggtaactggaaccacagatgtgtactgccatgcctggctaatctttttgttttttgtacagagtctcactatgttgcccaggctggtctcgaacgcctgtgctcaagcgatccacccgcctcggcctcccaaaattctgggattacaggcgtgagccaccgcaccctgtcacgaagtttaaaaaaaaaaaaaagctctcttttctttccacgttgtttccagctatttaaagaaacaaaatggtagactagacgcagtggctcacatctgtaatcccagcaatttggaaggccaaggcgggagaatcacttgacgttagagtttgagaccagcctggccaacatggggaaaccccatctctactgaaaatacaaaaattagccgggcgtggtggtgcatgcctgtaatctcagctactagagaggctgaggcaggagaatcgcttgaacccgggaggcagaggttgcaatgagcccagatctcaccactgcactccagcctgggcaacagagcgagactccgtatcaaaaaacaaaacaacaaaacaaaacaaaaaacagtaaagagaatactattgagttaattttacagtttttcacgctgtgggtgttttctattctcgtcttttgcttagctgtcctgtctccctctttttctcaggcaatagtttaggatttttgtaagttatattgtcagtacttctcatttaagttccagacagtgtgctaagcaaagcactttactcggtaaagtaagagctcacttaatcttcaaaataacgtagcaaggtagatatcacgaacatagcaaggtagatatcaccgaagggaaaaccgctccccgaaggtccgaaggtccaaggtctctctgccatctagctgccctgcgtattgcctgccagtgggtagttggagctgggtatctctccaaagctgggctcttggctgccctttgtgaaggcaattttaagggacagcaggatgtggaagcctgcggttaaggagtgagctgagtcactgggtaaccagtgttgaataatgtttctcaatgtctgaaatgacactcacttcctttccagattggtagaggagaaaaaagaggcgcagtgaaagcgctctcaaggtgcggtgggtcagggtgataggcggcgcccggccgctccctgggggtcctgagggcgagaccccggcaggctcccgactccgggagccgggcgggagttcggttttcgccggcgctccacggccaggccacttcggaggcaatctgtggcggggcgggcggacgcgagggccgcctcacccccgcgcgtcttccgggacaccgggccctcgggcgcgcgggaggcgggcttagcacgggcgcaggctgccctcggcgcccgagacacccaggcacagctggaagcttcctccccgttagcacgcgggccgcagcgggggcttgaccccaatgcgaagagtcgggttttctgattggctgagagtagaaacgcaggcgagcgccgcctgagacccgctctgcgattgggttttacacgaacagcagagcacgaaataaagaggccttcagtcattgggccattatgtgaatctccttttggcttctctgcagactgaataagcgtctcaggatcttcgtcatgactcctaaatctgggcctgtcagttcgccccagcgtttctcgtctctaggcacggcatggggcttacagagtttaaccaatcatataacgtcgagatcaggttgccaggcagattatgctaataagaccccgccttttatgctgctcccactctgcggcgggaagaaccacctggaggtggcggggggggttgatttctatcacccctagggagagaggatcggggacccgctgatcttccagctcccctcacccaacgtcgtgtaagtacctaaaggattaagggaaccagataagccagggtccagactaccccatagactgggagggtgtttcgtctttgcttagt

SEQ ID NO: 8653 - DNA, 2300 bp, Homo sapien
gaaataagctatcggcaaggctgtattccctcagaagtctctgggaaggaattctttcttgcctcttcctaaattcctgtgttcgccagcaatccttggaattccttgacttgcagtttcatcacttcactttctgcttctgccttcttcacctgcccgtcttgcctgaactgtattcatttccagatctccctctccctacaaggacaacaatcattgtatatagggtccacccttatcaagtataaactcatcttaacttattacatctacaaaggccctattcctgaagaaggttgcgttcacaggtatgaggagggggagggggattagaccttgaatatctttttagggggataaaattcaaccctctacaatatcctacttatgataatcaactgaagcattcctataaaaaaatagatgataaaaagaaaaatagagccaagcatggtggctcacatctgtaatctcagcactgtggtaggctgaggcgggaggatcacttgagtacaggagttcgagaccaacctgggcaacatagcgagggtaacaaacctcgtctctatttgttgttgttgttttttttgaaggaggtgacagctaggcgcggtggctcacgcctgtaatcccagcactttgggaggccgaggagggcagatcacgaggtcaggagattgagaccatcctggctaacacggggaaaccccgtctctactaaaaatacaaacaaattagccgggcgcagtggtgggcacctgtagtcccagctactcaggaagctgaggcaggagaatggcatgaacccgggaggcggagcttgcagtgagcagagatggtgccagtgcactccagcctgggccacagagcgagactctgtctcaaaaaaaaaaaaaaaaaaaaaagaggtgacaacgatgccccatatattatttaacactgccttgaggctgaacacaatggctcatgcctgtaatcccaacactttgggaggctaaggtaggaagattgattgagacccaagcattcaagaccagcctgggcaatgtagctgagaggtgacagcgtgctggcagtcctcagagccctcgctcactctcggggcctcctctgcctgggctcccactttggcggcacttgaggagcccttcagcccgccgctgcactctgggagcccctttctgggctggccaaggccggagcccgctccctcagcttgcggggaggtgtggagggagaggcgcaggcgggaacccaggctgcgtgcggcgcttgcgggccagcgcgagttccgggtgggcgtgggctgggcggaccccgcgctcggagcagccggccggccctaccagccctgggcagtgaggggcttagcgcccgggccggcagctgctgtgctcaatttctcgccgggccttagctgccttcccgcggggcagggctggggacctgcagcccgccatgcctgagactccccccactccgtgggctcccgtgcggcccgagcttccccgacgagagccgccccctgctccacgcgcccagtcccatcgatcaccgaagggctgaggagtgagggcgcagggtgcacagccccggtgcgggatccactgggtgaagccagctgggctcctgagtctggtggggacgtggagaacctttatgtgtagctaagggattgtaaatacaccagtcggcactctgtatctagctcaaggtttgtaaacacacaagtcaacaccctgtgtctagctcagggtttgtgagtgcaccaatcgacactctgtatctagctactctggtggggacttggagaacctttgcgtcgacactctgtatctagctaatctggtggggacgtggagaacctttgtgtctagctcagggattgtaaacgcaccaatcagcaccctgtcaaaacagaccactgggctctaccaatcagcaggacgtgggtggggccagataagagaataaaagcaggctgcccgagccagcggtggcaacccgctcgggtcgccttccacaccgtgggagctttgttctttctctctttgcaataaattttgctgctgctcactctttgggtccagactgcctgaagagctgtaacactcaccgtgaaagtctgcagtttttctcctgaagccagcgagaccacgaaccaaccgggaggaacgaacaactccagacacaccgccttaagagctgtaacactcaccgcgaaagtctgcagcttcgctcctgagccagcaaaactacgaacccaccagaaggaagaaaccgcgaacacatccgaacat

SEQ ID NO: 8654 - DNA, 2300 bp, Homo sapien
ctttaccctcctaccccttacatttaagtcacttcatgcttttcactattgtacattcattttaagttcaatcacacaaagcggtgcagtgagacaggttttaatattcacatttgacagagaagaaaagagagtcccaagcgatggaggaacttgccggtgatcatgcggctgtgtcagtcagctccggctgctgcaacaaaataacataggctggggggcttcaacaacagggatttatttttcacagttcttgaagcctgggaagtccaagctcaaggtgccactttggcccctcagtgatggacctcttcctggtttgcagatggcggccttcttgctgtgttcgcacatggaggagggaggtgagggctgaggttgggggtaggggacagagagtgtgagagaaaagcaagctctttggtgtctctcctaataaaggcactcatcccatcatgacctgctacctccatgacctcatccaaatccgattacctcccaaaggccccatttacaaataaccatcacactggggttcagcgcttcggcacacacattaggggtggggacaaaattcggtccatagcaagagccaaattcatgccagttccagaactagtatcagcacccaagataactgggttcaataacactgggcaaacatttatcgaggactgcactgtgaggggcactgcggcatgacagacccaagtcttgtcagtgacctgagagaggtatggaataactagggagcgagtgccacagtgggaaacatccctctgagcaatcagaagcgatatttcagccgactgagccgaggaacagtgaaaacgcttccaacaggcagatgttggggagaggacattgcaggcgcagaagagtgttaggaagggctgtgaaatggaaaggtgtcgtcttggaggaatcgggcagagccagtttacccacagggaactgggcatgtaggggagagtggtgcagaataaggctggaaaatcccgagttcttacaggcgcactcgtctactccgcggacagtctcttcctttctattgtcagcgtcctgggggtagggttgtgttatgcatttagttgaacctgaagggactagtccaggtctctcagaaggcagtacctaactcacaggcgactgaaaggaaacaaggccagcggagccctggcggtggcgaggctgtgccaattgctaaatggggcagcaggacgtttttctctactgaagtggcaatgccgcggagcaggaaggcagagtagcaggtctcccgctagtgcgtctcaaccgaagaagcggcgtgatctcttcctaaaacacacgaggaagggggcctgggctgtgaggccggcgtggttcttgcacccctggtctctatccctgcctgggcaactgctgggaaggaagggtcggcaagaggcctaaagaccggaggccaagggtgcggagcgcggccggactcagaggcgaggacccggcggagaggcctgggcggagcagggcgggagaggcgcgccctgagtagggctcgggggaggacgatggctgcctcctgcggtcctccccctgcctcgggggacggcccttggcagaccgtcccggactcctaattcatcctgtttttaataaaaccatttccagaatcaaaaagagggcggtacccaaaggagtctgaagaatgcccagcaggggcaggggagcggggcgtgcccgtatcgggaggctgaaggctgacggaccagcgcagcagggacagataaccgcgccggggggcggaggccagagccagccccgcgcccacagggttgcggccccagacccgccgcgcgcacgcccccgcgcctggcggccacagggtccggagcgggggcggggccatccgcggccgggggcggggccgggcggggggcgcgcggttggaccgggcgggaggagcaggctcttccatctcctgattgggtctggaccgcaagggggcggggtcttgaggggttctgcgggccggcattgggagccgcagaaggagggcgtggtaatatgaagtcagttccggttggtgtaaaacccccggggcggcggcgaactggctttagatgcttctgggtcgcggtgtgctaagcgaggagtccgagtgtgtgagcttgagagccgcgcgctagagcgacccggcgagggatggcggccaccgggaccgcggccgccgcagccacgggcaggctcctgcttctgctgctggtggggctcacggcgcctgccttggcgctggccggctacatcgaggtggggaccgg

SEQ ID NO: 8655 - DNA, 2300 bp, Homo sapien
ctgcactgtgaggggcactgcggcatgacagacccaagtcttgtcagtgacctgagagaggtatggaataactagggagcgagtgccacagtgggaaacatccctctgagcaatcagaagcgatatttcagccgactgagccgaggaacagtgaaaacgcttccaacaggcagatgttggggagaggacattgcaggcgcagaagagtgttaggaagggctgtgaaatggaaaggtgtcgtcttggaggaatcgggcagagccagtttacccacagggaactgggcatgtaggggagagtggtgcagaataaggctggaaaatcccgagttcttacaggcgcactcgtctactccgcggacagtctcttcctttctattgtcagcgtcctgggggtagggttgtgttatgcatttagttgaacctgaagggactagtccaggtctctcagaaggcagtacctaactcacaggcgactgaaaggaaacaaggccagcggagccctggcggtggcgaggctgtgccaattgctaaatggggcagcaggacgtttttctctactgaagtggcaatgccgcggagcaggaaggcagagtagcaggtctcccgctagtgcgtctcaaccgaagaagcggcgtgatctcttcctaaaacacacgaggaagggggcctgggctgtgaggccggcgtggttcttgcacccctggtctctatccctgcctgggcaactgctgggaaggaagggtcggcaagaggcctaaagaccggaggccaagggtgcggagcgcggccggactcagaggcgaggacccggcggagaggcctgggcggagcagggcgggagaggcgcgccctgagtagggctcgggggaggacgatggctgcctcctgcggtcctccccctgcctcgggggacggcccttggcagaccgtcccggactcctaattcatcctgtttttaataaaaccatttccagaatcaaaaagagggcggtacccaaaggagtctgaagaatgcccagcaggggcaggggagcggggcgtgcccgtatcgggaggctgaaggctgacggaccagcgcagcagggacagataaccgcgccggggggcggaggccagagccagccccgcgcccacagggttgcggccccagacccgccgcgcgcacgcccccgcgcctggcggccacagggtccggagcgggggcggggccatccgcggccgggggcggggccgggcggggggcgcgcggttggaccgggcgggaggagcaggctcttccatctcctgattgggtctggaccgcaagggggcggggtcttgaggggttctgcgggccggcattgggagccgcagaaggagggcgtggtaatatgaagtcagttccggttggtgtaaaacccccggggcggcggcgaactggctttagatgcttctgggtcgcggtgtgctaagcgaggagtccgagtgtgtgagcttgagagccgcgcgctagagcgacccggcgagggatggcggccaccgggaccgcggccgccgcagccacgggcaggctcctgcttctgctgctggtggggctcacggcgcctgccttggcgctggccggctacatcgaggtggggaccgggcgaacgccggagagtcgtctccttcgcccgccggaggagcgcggactgcgggcgggcagcggggtccgcggcagggcgggccggcggtgcggcgccgggggtccggctctgcggcgggtctggcgcgccctcccccgcccgtccctgcttggcgcagtgcttagcgctggaggtcgggctgcctcagccgccgcagaggccaaatgaaaggcgtcggggctgctgggggcggccgtccgcctcggccgacccagcccccaacccgcccgcggcgccgccacctcctccggggacccagtgcccccgggcgcccgccccgccctcccccgggacaatgccagggcgctcctctcccgccggagtccgcggctgggctttctccaggggcggccccgcgcggaccccgtacgctccctcgcgcggcaccggggcctcggctccgggcctcccacctgcgagcggcgggcttcgcctttgttgccaggtggacgcggccccggccttcgcgcgcggcagggatgctgcgagccccgggggagctcccgcgccaggccgcccgctgctccctctgccgcctggggccgggtcgcggacgcgcattttttaagtggcgctgtttgcctgcgtccgtagaccgaggaaacccgctctgggtgcgttgaccgctttcgtg

SEQ ID NO: 8656 - DNA, 2300 bp, Homo sapien
tcttatcaaggataccctccagtgatttgctgtggctcatactgctggtttgtttatgggatatttcaggcagggtgtttttaaggaggaatactttttgttcacattatagagaaattctaagatagaaattttaaaagaagccattttcttttttaatctccttttgtgctattttattttgttttttattgttttcctttctgctagacactcagccggagttgtaccacccaatgaaaaaaggttggtttgtccaagatgttccctttaagaccttcattcctctccactccctagtgtgtccgaagcttcatgttctgtttcatgccatcacctggctttccccacctcattccttctgacacggctgtgagtggggtcagagcagccccacctccatgttgctgacaagctgacctgactccagcactctgaggccagtttccatggtgttggttacctcgtggtcatgctaagctttccctctgggatgtcagagaatgcacagcaaccaaaatagatttcatgacccttttaatctgggtagatttttagaagtatatccaacttaggttggttgtgaactgctgtctccgtataaatatgccttatttacagtcaggtggagagtcgttctcttttccctctttttctctgcaattcccatttacatcttttctttttggctctcctcgccctttgtctgtgccagttgtctcatgtcccctgagttgtatattcctcagaacatcggaagccaatggatcaaacagctggagacaacccagctcactgtactgagtctccagttttcaaaaagagttaacgttccgtaaagcactatgtggaatgctttgcattcttgtccccatcttagtccactgaacgtccctgtaggatgagtagtgtttttagctctattttctagattagacaattgaagaagtttctgagatgacgtgacttgctctaagaagtggaggaaccaggatttgaacccagttctctgttccccaagcccatgtgatttcattacctgagttgtcggtgtcacgggatcccccaggtgggtgggtggcccagtcattgtgaatcatttcaacatttcttgttcataatgtgttgtatgagcccacccttggctttggcagacttcctgttgatgggccaaacggtgttgcccggctaagaaggtggtgttctggtttacgccacaggttattctcagaacacaaaagtgtgatttcaatcttctgaaaatgacttcgtgtagatgctttattttattctacttggatatgcctgttcgtggggatgactgtgccgacattcctttcaacagcacaactgagatgtttatagagaaagatgagttttctagaagtttaactggcttttgcttttgtactgaactgttatgagttgggacaatttaaacattaactttggtgtcttgaagtcacttgtttatgttaagaaacgtgggggctataccaccaaaaatctattataacagtctggactggtggtaggttttttttttttttttttttttttgagatggggtcttgctgttgcccaggctggagtgcagtggtgcggtcttggctcactgcagcctcctcctctggggctcaagcagtcctcctacctcagcctcccaagtaggtgggaccacaggtgcatgccaccaccctcggctaaatttttttttttttttttttttttaacgtagagacagggttttgccatgttgcccaggctggtctcgaactcctggactcaagtgatcctcccaccttggcctcccaaaatgctgggattataggcatgagccactgtatccagtgacagtagacctttagtttgctcagtgccacattgctttttgaataattcctgcctgtgtgacctttaaaattctgggagagagaaacatatatatggaaggagctcagaattacagttgattgggcttggtcataagcatccttgctgaggcaatacccttccagatccctctttctcaaatagttggagtgcagtattgctatttcatgggcactttgagacaaaagctagctctgatttaactagaatctagtcgtgcaagtctttaaagttgaagctttagaaaaattgcatcatttttggctgcattgcatgagctagcctgcatgttcagcagctgtggaagctgttacaagttgctatgtgttaagaacaagtctagttgtgaggcagaagctctgctgtggttgtgccttgtgccattacctgcctttgacaagcccagg

SEQ ID NO: 8657 - DNA, 2300 bp, Homo sapien
tctgtgccagttgtctcatgtcccctgagttgtatattcctcagaacatcggaagccaatggatcaaacagctggagacaacccagctcactgtactgagtctccagttttcaaaaagagttaacgttccgtaaagcactatgtggaatgctttgcattcttgtccccatcttagtccactgaacgtccctgtaggatgagtagtgtttttagctctattttctagattagacaattgaagaagtttctgagatgacgtgacttgctctaagaagtggaggaaccaggatttgaacccagttctctgttccccaagcccatgtgatttcattacctgagttgtcggtgtcacgggatcccccaggtgggtgggtggcccagtcattgtgaatcatttcaacatttcttgttcataatgtgttgtatgagcccacccttggctttggcagacttcctgttgatgggccaaacggtgttgcccggctaagaaggtggtgttctggtttacgccacaggttattctcagaacacaaaagtgtgatttcaatcttctgaaaatgacttcgtgtagatgctttattttattctacttggatatgcctgttcgtggggatgactgtgccgacattcctttcaacagcacaactgagatgtttatagagaaagatgagttttctagaagtttaactggcttttgcttttgtactgaactgttatgagttgggacaatttaaacattaactttggtgtcttgaagtcacttgtttatgttaagaaacgtgggggctataccaccaaaaatctattataacagtctggactggtggtaggttttttttttttttttttttttttgagatggggtcttgctgttgcccaggctggagtgcagtggtgcggtcttggctcactgcagcctcctcctctggggctcaagcagtcctcctacctcagcctcccaagtaggtgggaccacaggtgcatgccaccaccctcggctaaatttttttttttttttttttttttaacgtagagacagggttttgccatgttgcccaggctggtctcgaactcctggactcaagtgatcctcccaccttggcctcccaaaatgctgggattataggcatgagccactgtatccagtgacagtagacctttagtttgctcagtgccacattgctttttgaataattcctgcctgtgtgacctttaaaattctgggagagagaaacatatatatggaaggagctcagaattacagttgattgggcttggtcataagcatccttgctgaggcaatacccttccagatccctctttctcaaatagttggagtgcagtattgctatttcatgggcactttgagacaaaagctagctctgatttaactagaatctagtcgtgcaagtctttaaagttgaagctttagaaaaattgcatcatttttggctgcattgcatgagctagcctgcatgttcagcagctgtggaagctgttacaagttgctatgtgttaagaacaagtctagttgtgaggcagaagctctgctgtggttgtgccttgtgccattacctgcctttgacaagcccagggacagcagtgctttgcatgtcctcatgttgaagtctcacttgcaggtagttaccttagaatgccagatacgctgtcgggttgatccagttataaaaggctcatatcacagacgtttatattgaactgtatgttattatgaataaggaattcttatgatagctagaaatcacatgctttggaactaaaaatagaggacttcctctcacgttccctccctgggcctgtgctgcgtcgtcgtgctgcgtatttggatactatccttcggagcgccacactcgagtgatgttgctcaggcagtgtctgaccttggtgagaggagagttgctgttcttgctgctctgtttagagaaaggtgccttccatgctgatattagaatgcttcctataggtggaatgcacgcttcctgtttatcttctaatagccacttaggatatgagcatctaggatctcggcacagagggattcagcgtggtgggagatgcgggaagaaatccgtaatgacagactgttgtcattactgttggaacctccccaggaccaactgaaacttgaagggaaaataagagtttaggttggggagggtatttgaggcagaatgaattccctgtgggctaacctactatgtccaaggcaaacgtgcaggttattgtgaggatgggtgctgtggcagccgggtgtgggtagtaggtgctcagtaatttct

SEQ ID NO: 8658 - DNA, 2300 bp, Homo sapien
cccaaagtgctggaagccaacgtgccagccttttagaaatattttctgtttagctttggaatgctttatgtgatggaaggcagcagattcattcttctttcaattaaattgacccaatatattgtgttagtcattgtgctaggctttgagggtgcaaaggcagttaagacacagacagaaaatgcaacgaaatggtggtgagctccatgagagaggtacaaacagagctagttctggttgagagggaaggaaactcctggggaggaggtagcatatcagtcaggaagcgtgaggtttgcagcaataacaaacaaccctcagctctcggtggcttaacatcccaaaagctgactgactcctcattcatgctacatatccagtgtgtgtcattgtagccacttagggtcacaggtcacagagttaaacctctcagaagagagcagggcattgtgcagtgcctccttatgctgctatgtacaagtggtgtgtcctctcattggacattttcttggttaccgctagccatactgccatacctaacttcagagaagagagagtaacaccctggcctgtgcccagaaggcagagagctaaaaacattcaatgaacaacactaaaaaaccccatcggtgtcttcgacccaatatgcggaaggagtatgaaggagaagagcttccaggggatgaaaagctttatgaaagctgccaagatcagaacgcctggctggagagaggggctccaaacaggaatgcttggaggcacggtgttaagggaggacagggcagagtgtgaagctgggctaaggaggttggatttgatccgggagacacggaaagtcataaaggagctgtggtttcagatttacctgactgctttgtgtaggagagatcagagggtggcagcccagaggcaggagatctttcttaaccaggcaaagggctctgaggactcgaatagcggtcttctaatgcgcaggaatggaagggctatgcttgtcagcagagtcttgatcagatttggaactaattggatatgagatgtaagcagggtggagaatcaaagatgattccaggatttgagcctgggagaatgctgccattagaattagagaaaacagtggaaaatgggcaagtcagggaaggaagatggggcttgttgatctcaaagcagggatttttattttgttcactcctgtttccctgtacccaggacagtgcttagcgcctagtgtgtgcttggtaatgttcattggctacagaatacagtagaacataaatggagacgtccccaggcgaccgctaaggcagaactggcactccttggtggtgtctgtgctgggagggaggtcttcctgtctgaagtcgtaagatgagacgtgctgccaagagaaaaagcttagagaagaaagggatgaaactgaagggagaactttgggaatcatgacatttaggactagaaaggaggaccggaatccagggaaagggggcatttgaggaagcatcagatgctgcaagtgggcgaggggcgttgggatggctcagagggcatctggtggcacagctcatgtcactgggcctccccagggtagccgggcgcaggccagcaagcgcctcccgcctggagaacaggaggctgcgtagccgacggggagcctgggccaggggcggttctggtttctgtttggttttggggggttcataaatgcgatttagtcctgtagcaaagtgagcaaggtgaaggggagagaccggaggcgcatgagggaggagggaaaagatggttggcatcaaggaggtggataaagggctgccctcccggggcagggcccctggagggccggaggggtggtgaacgccgtcgtggtgatggtgagggccttagcgaccaccacccgagtgaggccccctcaccttcaggcccagagccgaggggaggagcctcccccagggccggcgggggcgggcaggtgagccgggcaggtgcgcaggcgagcgcggcgggctgggcgggccgaggccacaccctgaaactacctgcgtgggccgggccggagtgtgagagcggagctgcagccggagaaagaggaagagggagagagagcgcgccagggcgagggcaccgccgccggtcgggcgcgctgggcctgcccggaatcccgccgcctgcgccccgcgccccgcgccctgcgggccatgggagccggccgccggcagggacgacgcctgtgagacccgcgagcggcctcggggaccatggggagcgatcgggcccgcaagggcggagggggcccgaaggacttc

SEQ ID NO: 8659 - DNA, 2300 bp, Homo sapien
agggaaatgagctcggcggacgtttcctgattaataatgggctaaaattcaggccaagaacaacctagaaccatctgccgccacagcttcgtaaccaggacttcttttccatctctctaatttattaattgtacaacaaagaagtacatgttcccagtgggagaaggaaatcggcaagcaaaaggaagactaaagtcactcgtcatcttactgtctagaaataaccactgttaattctttttctttgagatggaatctcgctctgtcgcccaggctggagtgcagtggcaagatctcggctcaccgcaacctccgcctcctgggttcatgcgattctcctgcttcatcctctcgagcagctgggattacaggcatgcgccacaacactcagctaattttttttgtatttttagtagagatggggttttaccatgttggtcaggctggtctcgaactcctgacctcaggcaatctgcctgccttggcctcccaaagtactgggattacaggcgtgagccacagcacccggccaaatttttgatgtctattttcccagccttttttgctgtgtgtgtgttaagaaataggattatcccgtgcattcagtctcattacctgctttaacaaatgaagtatattatgatggtctttccaaatcagtcaccctctctctcagggtttttataaggttgcattgtttagaaggaggggacacaatcaggatgacatggttgtgagcagtgtggactctggagcttgaatgcctgagtttaaattctaagcctgccacttattaaccatgagatgttgggcaagttactgaacatctctgtgtctcagtttcctcacctctgagataggggtaatagtatctacttcatagagctgttaggaagattatgagttaatagatttaaaagcaccgagaaccatgccaggcatgtttttttttttgagtctccttgtcacccaggctggagtgcagtggcgcaatcatagctcactgtaaccttgaactcctgaggctcaagcagttctctggccttgccccggagtagctgggactgcaggcaagcgccaccatgcccagctagtttttttgattatggagatgaggcgttacccaggctggtctgaaactcctggcctcaagcaattctcctgccttgacctcccaacaggctgggattataggcccgaccttggcatgttcttaataaatgttgattgttactactgctgttgttctgattgagcccacagtttatttaataaatcctctgttgtgggcatgtattgtgtctagggtgttgctctttttttttttttctgacagtctcgctgtgtcgcccaggctggagtgcggtggtgcgatctcggctcactgcaacctccgcctcccgggttccggtgattctcctgcctcagcctctggagtagctgggattacaggcgtgcaccgtgatgcccagctaatttttgtatctttagtagagatgggatttcaccatgttggccaggccggtctcgaactcctgacctcaggtgattcacccgccttggcctcccaaagtgctgggtttataggcgtgagccactgcgcccggctgggtgttgctctttgattgtgacaaaggtgaactgtttatcactagcgccttccatcagtgattgtgacaaaggtgaactgtttatcactagcgccttccatcagtgattgtgacaaaggtgaactgtttatcactagcgccttccatcagtgattgtgacaaaggtgaactgtttatcactagcgccttccatcagtgattgtgtgggggagggacttacttgaatgaaggtctttttgactccattcttggcctctgtggatgggaccagagttaggggtggggtcctcaggcacctctgcctgagagcctggtttgggtgtgtgagaagcttgggttctgtctgctcttcctaatgcccgccctctgcccccacaggttgtgtggcacctaccctccctcctacaacctgaccttccactcctcccagaacgtcctgctcatcacactgataaccaacactgagcggcggcatcccggctttgaggccaccttcttccagctgcctaggatgagcagtaaggaagggcagggcagggcgggactgccctcgggccacagagaaggggaaggccttagtgggggtgacctgagcttaggaggccacaggctagaccctgtggttggcgagctggcctaggtcagcagcagaggctgaagcttgagccaaaggcatctggccgaccgcct

SEQ ID NO: 8660 - DNA, 2300 bp, Homo sapien
gaggcagctccaggcctcaggctgcagagccctcgtccgcctgctcggccgggcaggttcctgatcctcttgctttctcccaccttccctctcaggctgtggaggccgcttacgtaaagcccaggggacattcaacagcccctactacccaggccactacccacccaacattgactgcacatggaacattgaggtaggagctatggggcgtgtgaacgtgtgtgtgtgtgagcatgtatgtgcacgtgtgtgtgtctccctgtgcagatgtgtgtggatgtgtgtgcatgtgtttgcatatgtgtgcatgtgtgtgtgtgtgtgtgtgtgtgcgtatgtgtgtgtgtgagacagaggtggatggcaaatgaggaagacagaagaaaaggaagaggagatcctttatcaaccccaaagaggcagccagatgtcgtgactcacacctgtaatctcagcactttgggagaccaaggcaggaggatcacttgaggccaggaattcaagaccagcctgtgtaacatagtgagacctcatctctacaaaacactacaaaaattagccaggcaggtgatacatgcctgtagtcccagctactcaggaggccgaggtgggaggatcacttaaacccaggagtttaaggctacagtaaactatgacagtgccatcgcactccagcctgggcaacagtgagaccctgtctcaaaaaacaacaaaaacaaataaacaaaccccaaagagaccatgtgtcttagggcccagggtggggtcaggtcttcctgcagtgtcaggcagacccagactcttatcttagctccttgtcaggtgatggaacgacctgggcagttgctgaagctccctgggcctcagcttgcccctaggtgaagtgagggtgatagtgcctgggtctcagaggcgccgtcaggaagaaatcaaagaaggtgtgtgagacaagagagtcgcctgtccgtgccgctcacgccatcccagccagagctgcctccctttcctttctttaaaaatgccaggagggccgggcgcagtggctcacgcctgtaatcccagaactttgggaggccaaggcaggtggatcacgaggtcaggagttcgagaccagcctgggcaacattgtgaaaccctgtctctactaaaaatacaaaaattagccgggtgtgatggcgggcacctgtaatcccagctgctcgggagactgaggcaggaaagtagcttgaacccgggagtcggaggttgtggtgagctgagatcttgccactgtactccagtctgggtgacagagtgagactttgtctcaaaaaaaaaaaaaaagaaaagaggctgggtgtggtggctcgtgcctgtaatcccagcactttgggaggccgaggcgggcagatcacctgaggtcaggagtttgagaccagcctgaccaacatggtgaaaccccatctctactaaaaatacaaaaaaaattatctgggtgttgtggcttgtgactgtaatcccagctgctcaggaggatgaggcagaagaatggcgtgaacccgggaggcggaggttgcggtgagctgagatcttgccactgcactccagcctgggcgacagagcaagactccatctcaaaaaacaaacaaacaaacaaacaaacaaacaaacacgctgggagaactttgcaacctgtcttggtgatggaaggcataccatctctccctggtccatgccgctgcctccctttgacgtcctcaggttcagggaggagggaggggaactgcacattcccagcagcctctcttccctcaggtgcccaacaaccagcatgtgaaggtgcgcttcaaattcttctacctgctggagcccggcgtgcctgcgggcacctgccccaaggactacgtggagatcaacggggagaagtgagtccccgggggtatgggggctgccgggcccatgctgcagggggaggggtcccaccagacccccagccccccggctcccagctgtccctcctcaccttgtgccccgccccccctccagatactgcggagagaggtcccagttcgtcgtcaccagcaacagcaacaagatcacagttcgcttccactcagatcagtcctacaccgacaccggcttcttagctgaatacctctcctacgactccagtgaccgtgagtgaacattgttgggaggagggctggcgggggcctgcaccgcatgttctgtctaccctgcatctcgttagcatcgtgctttgctgattctaaaatgctggagaatgtaagagcatctcacccctcccgtagctttgggag

SEQ ID NO: 8661 - DNA, 2300 bp, Homo sapien
tatactgttgggagatagtaggcatacgtcttggccttgattgttgtttaaatcagacttatgtgcccttcagagttttttcagttgtaacatattttccatagatttgaggtaaaggatcagcatgccttgaagcccctttccctgcaggggagtaagcagggaagtagaatggggtttgcaactcacaacaaactgattactctcagcaaaaatccttttcatatctactctttgaacacggaagatgactgaaggtggatgtaactcaaggttgaaaatagttttccactaccccttgtataaggtgcccttgtgcctcacttgagaacgtagtacattatctgttgtttggggcctattcaagatggaaatggtttcattttaatactccgatgcacatgtcttccaaatatgctgtttaatttcttgccttcacacctttgttcatgcagatggtccctggattataactaattcacttgctctgaaagcatgtttcttccctcagccacatgatcccaaagtaagcactctcgaaggccatgctttaaaagcagaagctagtctcctgggatgcaataaatgaacaaaacgctttatatatagccctcccattttctttctttcatctcatttttgtgagacctaaatcagcaaatatgttacatgatggtttgcgtagaccagtccctggctgtctagtgtctcattgtggtcagttgacttcaggaagggtatgtggagcactcagtttacattcgaacttctgttactaattatggtcaagataattatttcagtagctttacctggctgctttggaacagagatttatgccttatccttttgtgaagtctgacatggaacagtctcaaattgatcattttgtcttctcaagttagaatagtctgtgacttatatttttttagacggggtcttactctgtcaccaagggtggagtgcagtggtgcagtctcggctcactgcaacctccacctcccaggctcaagtgatccttccacatcagcgtcccgaatagctgggactacaggcccatgccaccacacccgcctaatttttatgtgtttttttgtagagacagggttttgccatgttggccaggctggtcttggactcctgagctcaagcaatccgcctgccttggcctcccaaagtgctgggattacagacgtgagccaccacacctggcaacctttttaaattcatcttgaaatctttttttttttctttccacttcctttttttctttttcccatctttcttttcctctatacatttacctgcataaaacattaacagggatgattatgtaatggattgttcagtgtttacactggcattgcctgctgcatgctcacatttagaaacaggaatgataatacgcctactgatagagatatgatgacaatcaactaactattaaatgtgaagcatttcaaatactgtctggcacatagaagacactctataattgtcattatttacaaactgttgcagccctgcagctcattaaaacgctggttcacaggccgggcatggtggctcacacctgtaatcccagcactttgggaggcctaggcaggcctatcacctgaggtcaggagttcaagaccagcctggccaacatggtgaaaccccatctctacaaaaatacaaaacttagccaggcatgagggcgggtgcctgtaatcccagctactcgggaggctgaggcaggagaattgcttgaacccgggaggcagaggttgcagtgagccaagaccaccccgctgcactccagcctgggcaacagagcaagactctgtctcaaaaacaaaacaaaacaaaaaaaaacattggttcacagacttcactgattggacagtttggaaggcagataaggagaatatatttctatacagtccctaccttgaagtttctctgtcactaccatctttcagctttttaatttagtacagtggccacatgaaaatgatctaaatcacattttaaaccactaaaatatcaattaatgctttattttatgtattttttaggacatttctgatttatttgcatccttgaagagcatctgtagaagaggaagtaaaagatgggtgtgaaaacatttactcatagctcctcttcccacagccaggaaatgcttggaaagctaaatatgctgcgaaatgatggacatttttgtgatatcactattcgtgtccaggacaaaatcttccgggcacataaggtggtactagcagcttgcagtgatttctttcgcaccaaacttgtag

SEQ ID NO: 8662 - DNA, 2300 bp, Homo sapien
gcatcacctattaaatattcttgccaaaggaagttttactttaagctaattaagccttcctttacacctaacttccagttaataggaaattcagggagaaagaggaataaacgaaatgacattaggagggcacaaatccagaatgtgggtatattttacaagacaactggtttggtcaattacgtgtcagaaaaaaagaagggagggaatattcatcctatttaatttcccctgcaaaaagaagaggggatggatactcttcattttacaaaatgactaaagacttaatcaccaaatgcaatcaatgcatgaatcttgactgactacaactgggggcagaaccctcaaagacactttggaacaactgaggaattttgaagatggagttgttaattttgataggcattaataatgatactggggttagtaggagaatgtccctatttttaggaaacacatgccgaaatatttgaggattacagtgtttgcagcttactttcaaataattacacacatacagagaaagacaggaaacaatatggcaaaaatgctaatcactgagttggttattcattgcattgattagcatttttattcattgcatgaataaccgatcacaattgtatagaacgaacctctatacgactaaaatttttcataacaaagttaataaaattgtacttctattgagaagtacggtagaaagtacacgaaagtacatctatactggaattatatttgggttgaaatctaaactatcttactagttgtgtgccctaaggcaagttgtaattcttcgtatcactaagtttgtcacttctataaaattcaagtaataatatctgcatcattaggttgttctgagaattaaataattacaaatgcaaaaatgccaagcagtactgcacaaaatgaataatctggttttcataattaatcagtacattactaataatcctaaaatacaaaactaaaggactacgttcattatattcacattctatgataaggggaaactacattaggtaaaattattattaatccactgacagtccaagtgaagtaatgggggaaatgaagatttatacagtattttttaaacccaagaattccaactgaacacctagagaaaaggaaatcaaaatcgtgcagcttgcttccggtatcagccgatctccaaataaagcattaagaaaataagtggaagttatggagaatttcttcctgacttcaagagattatctacttacacgctgaaaaagaaattaagtttttgtcttcatttttgtaagttccaaaaaaaagcacacaattacggggttttattgtaaattctgcttggattcatagaactcacatggacgcaatttccttttaatcagttctaacgtacctgtcatttctcgaggtaacccctttttctgattaggccagcaataaaacgactagatgcagagtgatcctcaggaaggaaaggaaaagaggtgtgtgtgtgtgtgtatgtgtgtgtgtgtttgtgtgtgtgtatatatatatatatatatttttttaaagaagtgccatctttttctttctgtaccagagaaaaagcagaaggggaaaggaggaaaaaaaacaggtctgagcctcccgggttcgaccaggtgagaggtggcaacactccggccgctccgggttagggtgttgggcaaatgggcgtgcaaaggacgggcagctccctggaaggtcggggtaactgctccgggaccgcggggcccaaggccggtctcctcccagaaggattaaatgccaccgaggggatcccgtggggtgtctcccggcgcggactaggctgacagacccggctctccgctcccttcggcgccaggtgggggccacgcggtgtcagccacgggcagcgtgcaggggccgtcccccgcgcgaccggagcccgccctcccctccccgttacctgcgggcggcggcgccgggcccggaggcctgctgctcctcctccttctcccgccaggctggggcggcgaggcggcggcggcggcggcccggggggagggggcggagcgcggctcgctgcctctctcctcccccgggaggctcaggggcccctatctcgggccgccgcgcctaggcccgtgagcagcctgtggtggggcatggcggcacagccaccggcgtgcccgcgagtgggagtgcgaggaggcggggagggaagcacccccagcgctcggaggggccagaggggaggagcgagggggcccgggagccgcgcgctggcgaccgttggggacggttggccgagggca

SEQ ID NO: 8663 - DNA, 2300 bp, Homo sapien
acaaaagaccctgaaaagctagggcaattctgagcaaaaataacaaagctagaggcattcctctacctgacttcaagttgtactacaaaggaaagcaaatttttgtgtcagtgtagtagttgaggagctgccaccacagcccctggagaagcacttagaaaagacttgcctcatggtcttttattgactatcctgttaaaggcactaggagaggtagataggatttgactacttcatttccaccctgattcttgtccagttgcttaccacctacatacattctcacacattcctcaccagggccccagctcatgccctttcctgagccctgctctgtggccgccagtcctctcccaggtaagcattccgccttctttcccttcccctcttcaaaacttagtgcaaaagtttctgggcctagttcgcatctttctgatttttctcatctctgaaatgggaataataagaatgatagtgggaataataatagaaacctgtgataaaacctgtgaattacagttgccgtaaggattagataacattatacatgcttgaaaacttgttggaaactgcgaaggactataaaaacagaagttgtttttattgcctttattcctaaagaagattgcaagtgtcagggtgttcaggtgcttggctgcttgtctctcagagtgaattaatgtgagatgttgccaagtgtttcaaaaggaaaatccactctacttcagcgggacgtccacccaccttgcacaaaaccctctggaaagaagtctttcggtttgcaaactggaggcgtgggaaaacagaaagcgcccaaggagcacctgcccgcaccccgcccgcccccaggcacctggggcgctgccgcctgcagtcccgggaacccctatgacctccgggggcggtgtggagagcgctcgcccgcctggccaggggaagccaagacttagggccctaggagttaactaggttgattgattttgcagttgaccaagaacttcaaaaccccccgggcggtaccggttacttcggggaggcccgcacacttcctccgggaaggccaggaagtaagtgatggtgcagtaaaaatgacagattcacggttgtggaagaagtagggtatatttttggagcagctctagctgtccctgtgttggaagaacgagagggacctgggagtccgtttctccactcatctcaagaaccgcacgtcctgccaggtcaccgaggcaagtgctagaacggaagagagcaagcactgcgaggaggcccgaggagccacgcaatccagacacccgccgcatgtcgcagtccgcccaggacgggggcgcgggctcacctgtctgcggggcggcccttggcaggcctgtttccatgggtgaacaatgggcaccttaccaactaacctccctcgccgaagaggggctgaagtgtttctatttcgacctccctacaaaaactacccgagaaaataggagttatgtttttagttcgaagaaaaaaataatgctataaatgtgactcctgcggagaaatgcttctcaggtgtgagaggggaactgggtaagaggacggcttagaggaaggacaaatgggacagggcttatggggcatgtgaatgtaaatcggcacatgtgcgcacatatgcaaaaatacagtgtcaagactcacggcctttctgggtcacgcaggctccaccgtctaaggagacggagtcaccaacagtacaagtcccgacggccaagagggcccattttctgcgcttgcgcaatcatcacgtttccttccccgccccgagccccgcccccgagcgcgctccgccccgcccccttctcctccccttccccagccaggccgccggcgcagagcattgtgggacacaaacaaagtgcccccaaacaggctggagtgagcggagcggcaacggcggcggcgccggccgcacgcgcgcggcggcggctccctcccaacctccccctcccctcccctcagtccccttccccttccccaccccgccccgctgggaacacgcgagccgtcgccgcgctccccaaacaaccgcctgccctcggccaaccgtccccaacggtcgccagcgcgcggctcccgggccccctcgctcctcccctctggcccctccgagcgctgggggtgcttccctccccgcctcctcgcactcccactcgcgggcacgccggtggctgtgccgccatgccccaccacaggctgctcacgggcctaggcgcggcggcccgagataggggcccctgagcctcccgggggaggagagaggcagcgag

SEQ ID NO: 8664 - DNA, 2300 bp, Homo sapien
agtttgaggctgcagtgaaccatgatcatgccactgcactctagcctgggcaacagagggagaccctgtctccaaaaaaaaaaaaaaaaaagaaaagaaacttcgggccaggctgcaacataggacttctaggtaaaatcactcatcttttaacaaacaaaccaaagcatatttatccacacggtgaggagcccgtgaaggctatcccctcggtcagtgggttgacactgccgtggctccagacattagggagctgctttggggctgcctcagggctggtgcaggtgcagattggtgagcggggtggagacaggaaggtgagcacacaacagatggagccactgtcaattccgtcatgaacacagagacacgcggaataaattccatcaagaattgagtgaaaagtattcatagcctgcccgtgcttgaactgaatgcataattacaggttgggagaatgagagcagttgtgggaattccgtattcaaagaggaggagaggagacagattcagagctgcctctggccaggcagaaaaaaacttggcccaggagagagtaaactcacaagaaaaaccaaggcagtgccagtgagggtttttaaatgattcacttctttgccctgctctgaatacatccaaactgtgaggctgatcgcatttctcttactgtgactcatggagccatcactatgaaacagcatccactgggtttcacagcccggtccccgccagcgctgaatcgccagggtggcccaagcactcctcagtgcatgtcttttgcactgagccttgggagcccgcctgcaccaggtaagctctgtactcttgtcctaagcctgagctggtgcaggattcatggactgatcctcagccacctcccattcaccctgttcattctcatcacatgttattgaggggagagcagagggatctgccaccaatcccagagcacagccgagctaagtgcagggagaggttgacgtgaaatgatcatggaatgatgtgtggcctctatttttaagaagtcagatcagaaaatacatatttatagaatcaggccaggtgctgtaatcccagcactttgggaggccgaggcgggtggatcacctgaggtcaggagttcgagaccagcctcaccaacatggtgaaaccctgtctctactaaaaatacaacaattagccaagtgtggtggcaggtgcctataatcccagctactccagaggccaagacaggagaatcacttgaacccaggaggcggcagttgcagtgagccaagatcataccactgcactctggcctgggcgacagagcaagactttcaagaaagaaagaaagtgagaaagaaagagagaaagagaggtagaaagaaagtgagaaagacagaaagaatatatacatagaatcatatcttttgtaaaataaaagcattgcatttttatgatgatatattcagagcaaaagtatgaaaaatattggtgaaaatcatgttaatggttttatctgggtagtggtgttttaaagaagtgttaatttcttttttacacttttctgcatttttttatttgtcgtatgagcaactattacttttataacttttaaaaaattattttcattttgaatactctatgaacctttgggcatacagcattccaaagggcaaagctttgttctcataggtcagttgtaaaatgggaagcagggccaggcatggtggctcacacttgtaatcccagtactttgggaggccgaggcaggttgatcacttgaggtcaggagttcaagaccagcatggccaacatggtgaaaccccatctctactaaaaatacaaaaattagccaggcgtggaggtgtgcacctgtaatcccagttattcgggaggccgaggcacaggaatcatttgaacccaggaggcggaggttgcagtgagccgagatcacgcctttgaactccagccttggcaacagagcaaaactctgtcaaaaaaaaaggaagcaattctgtttctttcccaagcattgtcctatcaccagaaccagtggctggtagactatggcaacacctcgcagggatgtttcctttagaccagagttcctctgccttggcactagggacacttaggactggataattgttaccgtggggcctgtgcattgctggatgtggagcagcatcactggcctctacccactagatgtggtcacgtacaccctccacagctgtagccaccagagtatctccagacattgccaaatgtcccctggagggcagaattcgccccaacggagaaccactgcatta

SEQ ID NO: 8665 - DNA, 2300 bp, Homo sapien
ggaggccaaggtgggagaatcacctgacgtcaggagttcaagaccagcctgaccaacatggtgaaaccctgtctctactaaaaaaaaaaaaaaacatcagccgggcatggtggcaggagcctgtaatcccagctgcttgggaggctgaggcaagagaatcacttgaaccctggaggcggtttcagtgagctgagatctcgccattgcactccagcctgggtaacaagagcgaaacgccatctcaaaaaattaaaaactaaaataaaaatgaagcagcaacttccagagccttcacaaccaaaggctccatggacactcaagactttccttggttcagttaaatctcccacttctagcccttagcattcgggcgggagaaagggaaactgggcacgctcctcactcccactcctcccagatgcttacactcgagaaagaaggaaaacccacaggacctaactgctactgaaaatcaggagttagctggcacagtagctcacacctataatcccagcactttgggaggttgaggcaggcggatcacctgaggtcaggagttggagaccagcctggccaaaatggtgaaaccccatctctactgaaagtacaaaagttagccaggtgtggtggtgcctgcctgcagtctcagctacttgggaggctgaggcaggagaatctcttgaacctgagagggagaagttgctgtaagccaagatcgcaccattgcactccagcctgggtgacaaagtgagactgtgtctcaaaaagagaaaatcaggagttgtactctgggaaacagcaaataaggggcttcaaggaggtaaaaaccagtcattgaactgttacaatagccctgaggcaacacagagttgtattcattgcttgcccaggtcagactgtcccaagcactgtacaggatgtcccaagcactgtacactgtgctaggacgaagtgttttgcttgttttgagaaaagggttgaagagaccattctttccattgtccttcctctagaagtgtttccccaaaacattctagactcgttattcctatcctataaattatgcaggaaaggaggttctgcaccatgctaggttgggaagttcatcctttcatctaattcacagctgtccctctgtgtttctgagaaagcaaagagaggggggatacttagagggaatttggcagcactttcccctgggcaagagcctcctctttggaggtaacaagccctgagagtctcagatgcatgctgaaccaccacactgcaggaaggggtcagatgggctgaaaagaatcagcgatgacctcgactgtcaacatccccagcataagcacagagctgggtacctgggggcaggtgaattggcaaaggatttaaaggccctgatcccagcggttcctaatgcatcacccacattgacaactcagagaaaggcacagttggtggatgagtctagagtttgtaggtagagaacagggccctccacccaatccagacctgtgtcattgagactgggatgggatgcagttttgtggtcttgagaccatgtcatccctctcttcctgaatactacccccttccctagggggcagtggtgacatgggacagaataaattcacctcatacacatttgttcctggggctgtggcaacgcagtgaaagggcctgccaccttacttgaagtcccgggcaactagcagtatccagaagagaagacctttttcagggactggaggtctgtttccctcttggggaaatgctaacttccaacctcagtgctggtaacttaccactgtgctggcctctgccccacctgccctctaacaggacagtgagagtccctcttagggttaaccaggtgggttgttttttgttttgtttttgttttccccatcttcagtttggagtgaaagttaggaaggctgtgcagtagtgatgagaggagggcatgattttagcatgaccttttcctcctctccctttatgctttacaatgaaaagctcaggaaccttctccccacacagtcggatctccggaggcatctgcagggatcccaacagtgtcgggctctgcagtcggactctgcagggatccgaacagggtcgctgagaccagtgcacgagcctcttcggaagatgcatcctggactcttggccgcagaggagaaagcggttggggtctcccagggactctttctaaagggtcagtccagcatggtaggggttaacgtgggtccacgcgtagagggaaaggaaagaagttgtagttgacacttcaggggggcgggtggcggacg

SEQ ID NO: 8666 - DNA, 2300 bp, Homo sapien
atcttctccagctgatactcactcggcctcctatgccagtccccagtccagggtttggtcaagggtcaaatgagataatttcatggaggaagcctggcccgatttttctactgtttgctggaagacagcctcttcctcttgtaactgcagccccagaacctgatctccacatccctgccaggcaggtagctgtgtacaagggctcatcttcctgcccccaaccccagctctgatttgcttattcaggtggtgtaaatacttctaccaggacctatttcaagccattgtgatgtccctgactggggagatgcagggcagcacaccatttaatatttccctcacatttccaccccattctgcactcttttctgggagttgctgtctcagagggttggcggttctggtggctcaagaccataagtaattatcaaatacttaggaagcgacgggttttgagtatttattaccttttaaaaatgtactttgtggctaggcatggtggctcacgcctgtagtccccgcaccgggaggccgaggtgggtggattgcttgagctcaggagttcaagaccagcctgggcaacacggcgaaacccagtctctaccaaaaatacacacacacacacacacacacacacacacacacacacacacacacaaattggcctagcgtggtgtcgtgtgtctgtggtcgcagttactcaggagaccaaggtaggaggtaggaaaccaaggtaggaggatcacccgaggtcggtagttcgagaccagcctgaccaacatggagaaaccctgtctttactaaaaatacaaaattagctgggcgtggtggtgcatgcctgtaattccagctacttgggaggctgagacaggagaatggcttgaacccggaaggcggagtttgcggtgagctgagatcgcgtcattgcactccagcctgggcaacaagagcaaaactccgtctcaaaaaaaaaaaaatatatatatatatgtgtgtgtgtgtgtgtgtgtgtgtatgtatatatatatatgtatgtgtatatatatgtatgtgtgtgtgtgtgcatatatatatatacactttgtttaattgtaagtgtgtttagtttaatttttaataatgtccgtgattaacagctggctggcaagattcctgagaactgaagagtttgccccagcccatccagcacaccatgggcccagggcagaccttggggctaggcggtcttgggttccagagggctcccatgcccctgtcctattgctcttctggcaataggacatttacgcgggggggggggtggttcttgattctgggtcttttaggggactctgtgattaagaaacagcagggatgttgcaacagcagggatgaggtgggcctggggacgggtcagtgaagggtcttcattcctagctgctgacctgatctgccctgagataaaagactaagacccagagagtgaacgctgtccgcgggggcagaagcgagtgaggcgtcgggacagtggggcataaccaagagcaaaacgcaaactgagacttcagcgccggtttctcgggccagcccacgcctcctgcctcagctcaatgccactccctccccgccaagtggctctccgctctggaggcgggaccgagttctccggtggcccctggaggctccggcagcgagctctgggaggctgggaggggagtgaggggaggggcgctgactgggccgtccaaagaggagggggcctttaataggctcgcccagcgcctggcttgctgcgctgcgagtggctgcggttgcgagaagccgcccggcaccttccgctagttctcggctgcaaatcttcgtccttgcacttgacagcgattgtacttaagctcccagggcgcgctttgcttggaaaggcacaggtaggaagcgcgggctgccgggtgcacgctcgccgccctgggaggagtctccctcccttggctctcctttctgggaactgccggctgtcccgtagcgttggcggttccagagtgcgggctgcacggagaccgcggcagcggccggagagcccggcccagccccttcccacagcgcggcggtgcgctgcccggcgccatgcttctgctgggcatcctaaccctggctttcgccgggcgaaccgctggaggctctgagccagagcgggaggtagtcgttcccatccgactggacccggacattaacggccgccgctactactggcggggtcccgaggactccggggatcagggactcatttttcagatcacagcatttcaggaggacttttacctaca

SEQ ID NO: 8667 - DNA, 2300 bp, Homo sapien
ggcttatgtaggtccttctgctcgagaacctctttcctaattatgtttcctgctcattcttcttcatgtctcagtgcactcatcactccatctgataagccttctctgaggctccgggactcagatgcctcgctttgtgctactgtgtgtttctgtcactctctaggttttcccaacattttggggcagatgatgctttttggttgggtctgttctgcgccttgtaagttgtttagaagctggtctccccaagatgccactagcacccttcccccagttgcaacactcaaaaatgtcttcagatattatcaatgtccccttaaggaacaagatagccctggttgagaatgaccgctgtagatgacagatgttcattgaatgactgaaggaccttagttctgggattgctgcagaactgatcagcaacaaagcagcatataaattcaggaaagtgctcacgtcctttttagaacagtatctccatcctgtaaaatatatttcagtggatttttattttggctcagtgctaataatctaggaagctgtttttactgcctacaggagaagagagttagtggtattttatataacttactctgtctccccttcacctccatttgccatctgccaaaatctttggccctcagagtgggaaaaatacactctaccagccaactgagatctaccaagtgcatcatggccaagtaaatattgaactccctgctcctgacgtttttgtgagaattggtttatataaggggcagagctgtggagtgaggagggatgggtttgaagtgcaattagactagcatcccttcctatttaacagtctttctgtaccccatgaaagtaaactcaccaaacttctaggtgggaaccactttccatgtctctgctatctatgggaactttacttatttgtttaataaatatttttgggcacctaatatgtgtcagacactggcttaaatactggtcaatatgcatatgttcacgtgatttgccaaaaaatcagtttcatttatacggttcttggccccaccttgagctccatgctgggctgaatcctccctgtcatccagtttatggctcccacaatttgagaaaaggttgggaggtgattcagagacaaagaagtggttaaaaggctggctgtgtctgttgaggaattacagagaacacccactggggctgtcttctgagggagaatcagcatgaggtgcatgtctcatctagaaaaagggtctcatacagattttcagagcttggttctccaagtccacgcggcatagagaagtgtcaggcgtgagggaaacaggtgagacgtggcagagcacttcctgacatacctgctgtctcccaccgagtgaggggtggttcccggacccaccctgtgaccgggcactggctgccttgccatgtgtgtgctggcaccttgggcttcagggcctggggaattgtcatggcaaatccctacctgataaaactgctggggggaaaacaggctttgatgcacattcccaggactcactgctgaggattgtgattttttcctgtgagctgttggcagaagcaggctctatgactaacctcagaagggcaagggagctttctgttaactgatcgcctgcagaggatcagagaggaattcctgctggactccctgctctggtccaccctggcctcgttttccatctctggatccttccagccgtgcaaacatacacagtgttgccatggcgactctgggacagacacatgcatgagagaaaagcgtgaggcaaaatctctcctctgatgatttgctgggagggaaggaggccttgaacaggtttcaaaagcaccttgtttcaccccctgattttcacatgagagcggctaccccagccataaacacagtggcctcttttcttctgctttgcttgctgaggcgactgcagctctgggagacctgaagaggctccaggatgaaagagcctcccacccttaaacccacccatagaatgggttgccagtcatcaggtggggacaccattggatggtggatgatcagggctgtccctggttattaaactcattatgctttcaccaggacccctcacttgtccttgtgagtttctgacatggtcctcctctgtctcttcctcgccagcttggctgccacccctcgggctggggtcactggggcatggcccaccagcggcctctccattctggcccagctccagccgtcctgtgagctcaggtggactcagctttccaggtcatcttggagggatctggtcatgaccacatcactc

SEQ ID NO: 8668 - DNA, 2300 bp, Homo sapien
gactaaatcaagctatttaaaatatgtcttatctcacatatgattttttgtggtgagaacacttaaaatatactctgagcaattttcaaatatacaatatgttgttaactgtaatcaccatgttatacaatagatctttgaacttcttcctcctaactgaaattttgtgtcctttgaccaacatctccccaatcctccaacccttcagcctgttagccactattttattcagtgtttctatgaattcagctctttagagttcacatgtaagtgagaccatgtggtatttgtctttctgtgcctggcttacatcacttcaggttacactatatatgtttaaatctttcactgtgtgtggttcccataagaatgcaagccccatgagggccaggaccttgctttattcacagctcaccctacagctctgcctttagcagtgtgaggaatatcgtaggtgctcactgtttgtggaatgagtggataggtgaatgaatgagcaaatgaatatttttctgtaaagcaaggaccactctgtgtgataatgtgacatgcagcccaccatgggatgatgtaaggcttcttttcacagaaccgaagagcgtttgaactataaaggtccttgaaagtaggtcaccgtcccaattgtacagagtaggaaactgagtcccagagagggaaaacagatggaaatgaacacttggaaagttaatatctttgatttttaatacttcttcctagagcgtagtccgatgtaacagttcatctggcgagattctgagttaccaattttttatgggttttgcgttagaataattttataataatcaaaagtaaatgagaacaaggccaatagcataaaatttcactccttcacactcctaagtgtttttcgaggcactgcggaaaaggaagcatctatcgtggttggtccagcatcccttcagtagcttagatctgcagaaatactgttggaacatcgtttctttattcttcccatcctttgtgtgttaggccaaaccctgaggactgtctgccttggaatagagaggaaatccaagcatatgtgcaaagttgagctgcactttcagccccaggtcttcaatgggccttctccacaggcacctgtgaaatgccagcagggtcgttgcatgtagagggatcccactcagtgcacccctgggaatggctcagccgcactgtgggtgtaagcattaatcacacaacagccattctacatattccttttttattctccagagagtgccaggaaaagtcctgcccagtcaaaagtcttctcttgcagctgggtgttgagggtgattgcccctctctctccttgtaagattatgtttgacagcagtgaaaaccaacagtttaacagcagtaatctcttggcaggacagattgatatgagccttgtcccaaaacaaagtaatcctttcagggaagtgtatttcaagttgagctcacgttcccaagatgctgagattcttatgtagctgacaccggagctgaggctgagccccagccagggatatccaacgattgccagtaacaccacggaactgagtgaagattcaggggctgagtgtgttcctgagtgcttcaaaccgggggacctggaaaccagaggactcctggggaaaggctgtcaactccagcctgctcttcctaaatggccttgttagtagtgacttcagccctggcggtgaggcatgtgggtcagaataacattccctttcttttcccttcacctcttttttctccacggttccttttcataacttctttatttgctgcctagaggagctttctggacattttgtctccagggagcgtgacatgtcacctgtttctcacctcatatgcctctgatcttctacaccaaggtagctataaaggcttgctttctaggctgggtttccctgcacaggcccactgaaccactcaaacctcagaggtggaagtgcccagcgggcctcatggtcagctggggataacggagtcattttcgcagcccaacttctgaaattccacaagagggcgcccaaggtctcccaagtccggccacgcccggtggccttgaggccggaaggtggcgctgttgctttagccatcaagaaaggcaaggctggggacgccgcatccccgggtgcggagggcgatgcctaggggcgatgctgtgcctgtggcggccaaacagtgccacccactccgggaaacaaagccaagcgccggacgctaggtatgggagagaagagccaccctgacccaagggagggctctaggtgaggagccag

SEQ ID NO: 8669 - DNA, 2300 bp, Homo sapien
tgaagcggtgggggaaatttgggcacccgcagaccttggcagacacactatgctattttcagacttgcggagcctttgcactgcctccctgtcatcctcacctgtctctggtctgaaagtccattttaactctgctttcttggaggcagaaacaagcatgtgacaggatgcagagaattactcctggctttgatgtctcttcaacagcttgatgaaacctggtttttccacctgtcttcacttctccaagccttacctgcaagcgcttccgtgaaagcccccagcacaccatctctgggatgtggaagcttaggaggggagaattaaaaaaacaaaacgaaggtaacagtaatcaagatccaaacttagaaaacatttcttgaagtgacattatctgctccttttaacccaatccctttgtcaccagtcagtgtttgtttaggaagtgtaagctaattttaatattaaagtgttgtagtgattaagaaggtaagtttgtgaataatgtatgaatcatccacacttttgtcttttttcccaccttatgttccatgttactgctgcaccctgttataagcaaagaagagttggctgtgattacttccagaaactttgattaacccatgagagtaaagatgtagctagataaacacagaactccctgattgcagacaaaaggactcaaatgtcgacagaagcaatggcttgtttatactgtgttgaactggatttggtgacttgtgagcataggtaatcagcccttttgcccgtgcccctgggtgaagaatcatcctgctcctgtaactatcaaaaagattaaccatgaacgttgatatgaaatactgcttttcataccttgacaccaagaagaatagaccttattaagggaggaaaaacacttttggagtttacctcctttacacatcctgcttgcatggaatccaaattcagtgagctgacggcaggccagttccttgccactttatgcagttgtgtttaaagtttaccctctgttatctataaatgcaagtggctttttcaagaatagtgagggcagctttcattaaggactcatgcatctctaggagaatcacatgggcttagttggcagtagagcattttcttggggacagaatgtattatagatggtttaggcaggaggttagacgagaaacttccaaaaaaatctagggattttttattctgcccaaaccagcatgttccttcctgctttcatttttttgttcatgtccttccttccacgtggtagattaccttctcttctccagctgggcaagtaggctacctctgcccataaggaccaattcaagttccattttcaagaagcactgtctgattgcaccagccaaaactcttcccactttcttttcagttatttacactgcctctctagtcaatgtgcatgtatatgaagtcctcagtaagagactataattcttcaagggcaacgaacatatcttttatcttttttagtcctattatgtccttatgccccccccccaactatatgtatatacctagtgcatgataggtacaaaataaatattaaagtttacttaattaaagattatgtttatttaagaggcaaaatttgtgaataagtctggatcttgatactgttactttcattttgttgattcctttctcccaaccttccacatcccagagacagggtgctggtgacttttatggaaaggcttgaagggtgaagatatgtggagaaaccaccgtaaacctctttgagattaaccacttattccagtggagggcactggctagtctgtaccagacctgccccagacagctttgtacatcttgcgtgtgggtgggaacccaaaaagtttccttttcagtggatctgtttaggtgaggtaaagaaatccattactcaaatgtttcatcagaggctaccccctgttcaggtgtgcaccctgcacccatgtgggtttgcggatggcatataacacttgcagcagcagagctcgttgccacacatccaagggaagtaagtgtgcatatgtggatgcggcgggaatacctgcggtctttctgctgaagagcagggttatacacctccttttagcaatctggagaggactgaggcaagagcttgtattgaaacacaagcaagctccacgtatggttttggacatggaagaaagagtactgttggggtggaatgacctaagtttttaataggattaggatttctgtggatttttcccaagtgatagaagttttcttcatctagcagggagcctcacccaattgcttctcta

SEQ ID NO: 8670 - DNA, 2300 bp, Homo sapien
cactatgcctttaatgttttgagaaatagggaaaaggaaagaaggaaggacgtctccagatggtgagtggtgtggccaagtctccccaccccacatacacacaccagggcacatcagtcctgactctcacctcctcccagtgattaatctgtttggagaccagggtctgcccagacccccaggcaggagctcacacccgtccaaatgacaagtgcacgggcatgtccatcaaacccgcttcagaatcaggaaggcactcttggctaccttgatgctccagaccatctggtcaggtggcatagcgcccacttgcaaggtcacttccttactgccctgaacactccagattatgctgccaagtaaactttctctttgaactgccacaggaagtcttcagcaccgtcggtagtcccttcatcattcacatttctgttttagctcccaactaggtggcagggacttttctccagagcattgttgccattttctaagtgctcctgaggacattagaatggtctgggaaggtagaggggcagagcccacttctcgggttccttttctgcgggaaggcaggcagcagtgaaaaggtatggaccgtgaaaccgtggattcacattctgccatctcacgggagtgcccagtctgcttagtggacactgatcctaaatcaaaccatttgctttagaagtgatgaatcgtaaactacgggtcacatctaaatgatggcttctttcgtattcaaaggaagtctctgccccaacagcagcaatggacgagacaggaagctgcaacgcacttcttgttggcagagttttgggttgggatttgtttgaagattcctttaaacatctagggagtagtccatgatgatgaaagactgctcacagcacagagaaggtggacgaagggcaaccatgagcagctctgtgcaaacgatgcgaatcctatgcctaaatggaaaggagacccaccctgcgggcacagctcctagggcccaaggtggacatggaagctggcttcacgcaaaactgacactaacacttttgacacctggtcagtgcttccggtattttgtcttcctataggttcctgtgtagacaagtgaagtctaatttgctaaaaccaaaaacaatccaacatagagcatattccaaagcaaatatattacaggattatctgaaaggacacctctatctctgctttccttttctatgtttttggggaggataaggcgagaagagatagagggaaatagaaaccctcatccttgaagactcagcagaaaggcaccttttctgtgagcttctccttaaccattgcaacccacagtgatctctccttcccctgaattcctataagattttgtattttactatatcgcacgctgactggcattactagatagccaatcgcgttcaaagcgctggcatccccagttagcaggaggtcctggaggacaaggtctgcttctattcgtccacgctgcctctcacattgaagacagcagatgctcaaaatatttgattgtttgtgtaatgccaccagcaaataaccctcaatcacaaatttgattttgtgatacagtatatgaaatgtacaacataaatctatctctgtatcgtttcatgccttatattctgcaattcctgacaacaaatgagggtctttgtgctggggacgcggggtaccggctctaggggaaaccggataaatgttaagacacatcaggccaatgaaacttcgcctccatgaaattaaaataaaccggattattgacagcgtgcctaagcagtaaaggacaggcttcatttaataaccagaactaggacgcgttttaaagcgcctggaagtctgggtcttagcggtgattgctgcggcggctgtttcgtggcacttcggaaatctgcgccagctcttggcgagcacgcgccccgtgcgcgctcaggctcacgctcaggctcagagactacctcgcgcagggccgtcagggcggctcctcgccagcagagggcgccgggcagcgccgctcctcggggcgcgcgcggacgctctcccagcatgcctcgctcccgtcgacgtcgacccggaagctgtcgccggcggccggccggcggtcagccttcacacaggcccggctgcggagcgcagtcgcccaggtttacggcggcagagggccgaggctcccggagaggaccgcgatgagtccacttcaggtcggggctgagtgtgggcgcgcggttcccggcggcgtgtgacccagtcttcgccggccgctgcccgctgcgtgtgtaagtgtccgt

SEQ ID NO: 8671 - DNA, 2300 bp, Homo sapien
ttagttgtgcagaactatgagaaggatcttgaggtccccagatcttgaggtcccagggccccttcctctcaaggtcacaagatcccacattccaggcagtgttgtccctattcatacacaacacaaggtaaacttgtgggaggccaaggctggaaggactgcttgaggcaaggagtttgaaaccagcctgagcaacatagtgagacttcatctctactatgttgtagaaaattaaaaaaaaaaaaaaaatagctgggcatagtgggtaaggcaggagggttccttgagcccaggagttcaaagttgcggtgagctgtgattgcaccactgcactccaacctgggtgacggggcaagagtctgtcaaaaacaaaaacaaaaaagaaagaaaaaagaaaaaagccaaggtaaatcgtacgtcttagacatgtgcaaaatggcagtgatgttttcatttcacctctgtacactaaaatacaaacagacaatgagtacttttcttctatgcagtttgaaaatacatgaacatttttatggggttacaaggaagtataataattagcggtggagttctagaagaatatttttaaaatgtgtgtcaaggcatagtaggggtatgaatgtgtcagaattagctaaggaaggttctgtgagaaactacattttctttttcttttcttttttttttttttttttcttgagacaggggctggctctgtcacccagactggattgtagtggcgccatcttggcttactgtgatctccgcctcccaggctcaagcaattctcctgcctcagccacccaagtggctggaaccacgggtgcgcaccaccaaacccagatatttttaaggaattttttagtagagatagggtttcaccatgttgcccaggctggtctcgaattcctgagctcaggctactggccttccttggcctcccaaagttgtgggattacaggcgtgagccacagtgcccagccaggagctacattttctagattttttgttcacatcctctaacttgcttctcataaggggaagccaaagattagaataaacttccaggccctagaattagacctcttaagaaatcatttatgtccattagattatttctgttcggtttttattctttcctatcaccaaggaggttaatgtcttcaactgtctgaggaactacacaaagtttacactcagaaagcccctccgcatgtctaccctgaatctttctcgctgcagtttaaatcacagatgcttctatgattgctttagtggatgtggattgaccaagtcatggggaataaactcctgctttgttttcttttgaagaaggttctccatcttcagactatagagcttcttctcaaataccaggtactttgtacctttccattgtatcatatacacatggatgaatttaggaaattgacttctaaaaagtgaatgaaaaagaggagtaacatagatgttctgaaacagaagtgacaggaggagaaaatagaaagttatttactattttcaaagcaactaagtagaaaggttgatgaaagagagaaaaaaaagctgtcactgaatgatatttccattggaggggaaaataggtaccaacaaatgaaaattgcctcatctttacaagtttcactgagcatgaaaatgtccctttaaaatttcccataagccatggctggctatgggatttttccagtgcaaagggaatctgagttcaggaggccagggaatgccagggggaaagggattttctgatactcagaagactcagagactgtcagtttaaaaaatgaaagtaatatagaaggggcaaagtggcatttatcattctatctctccaggctcctgtctctttaatcagctagcctgatttgcccagtaaatgattcctgagagtgtgtgtgcgtgtgtgtgtgtgtgtgtgcccgcgcgcgtgtgttgtagctctgtcaatccttggattagaaccaatgattgcagcttgtaggagggctgtccagggccagattgtacaatgtgtctcagtgccagagtatgagtggagataattacggagaagtcatactctctcacaccctcggctttcttgttgtgtccttcagcaaaacagtggatttaaatctccttgcacaagcttgagagcaacacaatctatcaggaaagaaagaaagaaaaaaaccgaacctgacaaaaaagaagaaaaagaagaagaaaaaaaatcatgaaaaccatccagccaaaaatgcacaattctatctcttgggcaatcttcacggggctggctgctc

SEQ ID NO: 8672 - DNA, 2300 bp, Homo sapien
gcctcgtattttggattgttttgggaatcactgtgcttacatccctagaggatctgggtgtaggtcagacatactacagggctcaagcctaagcaaccagggaaattagcaccgactctcacgtgggacaaagacttgacaaagagccaggctgcacacctcctcacccagaggctctttcttccttccctccctccctggttttcaggaaatcctgcattgatatagacaatggtgtgctctgaatgtctctgctacctggagacacttaggctcttgaactaactcactagtggaagtaggggggattgtgagaagtagagggagctgataaatgtgggtgctaaaatagggggtacatttgggtcagctgggaatttgaggaaaggataggttagggttctgtgtcaccaaaggcagcataaggtttcacagaagttcatagaagaaaacctcaagatgtcgccacatttctgagatgtcagcagctaagagaagaaaagattgcttagttacagaagttttacccatgggagcgtctggaaaatggcacttaacattgtcactgtcttcatgtatcaagcacctagaagttcacagtgcagttctgaagacatgctcatttctctcttcttgtctcttcaggtgctacatggtgtgttggaaggctagtgacctgttaggcacttggaaaaatttatgcagcttcaaggctcatctcaaaagctaactctgaggccttcttgaccttccgagctgtgccgggtctctccatcccctgtgggctcattagaacttggatattcctttaatgcaaacaacacatggaaatagaatggacaatcattcccatttagttgtcagctgttcaaggtcaatacttatgctctgttgatctctctaaccctctagatctggtgcctggcatgctgtagctaccagtaaatgaggcaacagtcttctggaagctgcacttctattacacatatactgatgttcaccaagaagaacacaccaaaaagataaatttagttaacattgagcctgtgtataaagagacacactggataaaggatataaatttagatgttatagcatggaggaagtaggggagagaggaaatgacgctaattgagcaactagtttttacctggtacaacacaaagtcttaaatatgttatctaattcagccatcatcacaacccctgcaggtaggtatttaactccttagatggctattgtattcttttctctacaggccctattttagatgatagactctgatggtgaacaagagaagcagagatctcattgcttgtttatacacaatctagcaactattctacagttcagacaggacacgtgaattgactggctttacatagctcccaaaaattcacacacgaattgactggctttacatagctcacaaaattgactgactttacatagctcacaaaatcgactaggtttacatagctcatttaagtctggcctgtgtggctgtaaggtctactctctttatgtattgtaggtaacatatattccagaagtaacccaggaaactctgaaattttcattttgcaaccaagaagggcatccaggaaaagctagcaattctggagcgttctgggacctccaaatagtctttggtgatgtttaacagcctccgtaatttcatcagttagtgctgggttcgggatgaggcattacatggcggaaggcgagggatggttctctgtcactttaagtcctaaattattttcaggtgtttgtttcgaggcaggacggggaggcagcctgccatttagtggaaagggtggacatggcctcctttagacctctcatcagagttactgtttcgagtaatgaagaagcacggggattgatttgatgcctaatgaataatcagctgccatcaataattgtaatcactaatctggtgcaattagaggcaattataataaatgcaatttcctctcgtgccactaacgaactacagaagtatgaattgactcaagggggctggcagtgatttatgtgattgtgagatcatgaatcccattatcttgggaaagactcttaaaggggcagggtcctattctgatgtcaccgcttcctaatgagaagctagaaaatgcaattctagaggtaatgagcacagaggctactgtatttctctcacaactggctttagataagggccttgtgcagattcagctgggctgccatgcaaaggcctgttcctttaagttctgtttactgtagtgatacacctttaagtcttgaagaatgaagat

SEQ ID NO: 8673 - DNA, 2300 bp, Homo sapien
agagcacggttctccctaaggcttggtgggtacccatccgtggctgcaggaagcagttccgcgggttctgcctctggtgcccagcagaagcgcggaggatatgggctccaggagttcaaagtcagccacacacgaggatgtgccaagtgatcctagtccctttgtttagcttctctgagtaacaatcatccctttattctgtctgtcattaaaggatggcaacagatgtaaaagagtggcttttaaatgttgccagaaaaaggaaatattaaaatctaaaaaaaaaaaaaaaaaaaaaaaaaacaatggaagagagcagtggcccccttctgactcacggcattctataatctcttgactttggggataatgaactacatctcaaatctacttggtttattttactaaaattatcaaattaacatataggaagaagacacgggaaccgcaacgtatggcgcgtgttcatttggtacctggcactggggatagacagctggagagagggggaatttaatttcctggggcccatacgcctctgagtgattggcaggctaattttgctctccactaggcttggtattgaaaggaagtgaagatgcagaaagctgccaaaaactgttccttgtattggcaaaaattctagacctcattagaaaaatcaagaactagattcagaaatttggaaggctatgatgagaggggatttttcaagtaatgataattattaaatattgtcagagcatccttttataggtacttggtctctggttaagcttatgcagtattacactaccatgcttctgtcccatgttgagaggtccagagaacttaataaattgcccaagggcacacagcaaattggtaacagatgcaggcctcaaactgggttcttctaaatctgggcccagctctttgtcacctccctgtgctggctgcactggagccctgtccagagaggcctagcagtcaagaatttggttgctctgcacagctagaggggagcgagcccagggtggtccaaagactttcctttcctgtcaccttctgctcttttgggatagaattttcatcccaaagcagttaagtgcacaaatactgtagtcagatagacacaagctctaattcaagcttcaaggtcatgtgaccttgggcaaattatctcatcgctttaagcctggattttcttgtttgtaagaagaggatgataaaaccagtatcatagaattactttgaaaataagaaatctctgtgtgtgtgtgtgtattgtttagtaagacgtctgacacttggtaagccttagctaaaaaagaaaaaaaaggtaacaaaaacatccttgtccaaagagagagtgggaaccccagcattcctcacagccggctttgccagggctgccaagggcgtgacttgctgttgaagaccacagagttctttgtttccatctctgctagaagcggtgcacacagtccccctcgcactcactgctgctccctcaaagctagagaaccagagctgagaagcagaaaccctctcagtggcctggcccgtgctgcagacagacagagcggtcaaggaaggcctcaggaccagaggcagagagaggaatggagtgagagagatcaatgctggacccaagatgattaacgtgccaacctggggcactggcgctagggagatggtcagatcgatggattccaagcaaatgaagagcctggcgcattcggcagccaagctgtgaagttaaacacagcgacggggccaggcgtttggtgagcgatgagggtgatgaaacaggacacatatatcttgggaaacaacactgagaggccagatctggttctgaaaaatgtctttgctccttgtcacctttcaaaggcaaaatcacagctctgtgagtatgcatgtaggaatatgaatgtgtgtgtgagcacgtgccagtgtttgtgtgttgggggaggggtgcctgtaaacactacacctttgtcctcttattccaccagggcccagtagtgctggggaatgtgttgtttattaggtaggtgcaaatagaatttcattcccatggttctgagaatcatagcatattaaaactattcaaatatatcccatgtacttatatgctctgtggaacatgttcttgtaaaattaacatatactctattacctccttattaatgggaaattctgagggactgccttcatccatcacaataagctgggcccctcagcgttccccgccccaagctgacaaggcaagttctgaggtccacagggagccaggagggaaggccgtctctttt

SEQ ID NO: 8674 - DNA, 2300 bp, Homo sapien
tcacagctttagtatatcatcatatttatcttaacgtggtgaagtttttcaatttcctgtttccacaattgcccgttggaaaatggagacacaatagaatcttccaagaatggactagtgctaaagtaggttaattttcctcctttcctttcaaaaatacaaacaaagatcttctgctccccgcagatgtaattgtttattcctgatagtaaagtcatttgttgcagccataagttgacgattgatagttttggtgttatatatcaaatgatccccagtggccaaaagtagcagatgagtttccctgagaatttaatatcagaaaagtcaccggaggagaggagggaacaattggcccaatgatgagttaatgcaaagtattttgagatattcactgtaaagtcgcttcactcttgctggctaagcacgtcctagtcaactatgacaatggaaaggcaagccgtcttagtctttctttgttacccaggagtgtggtttccacttctccaaagcctacttctgtcctatctctatagttagtgtgagggagatttgattggtgaaatgtttgtgtcctctccaacgtggtatctacatgtaagtgattggtactgctcgaaggttgccagaatgagtattgtaccgaagcccttatggttatatgactcagttataatggttcagtctctttgataccggatggctttttggaagaccatttttctgttatttaacagttgttaacaacaacaacaacaaaaagcttcctggttgtgtttgatagagtctaggggaaaaacaaagccactgttgcctcctctccatccccaaggagaatgtgggtcagggctggaggccggctctgggaatccctgagaagggagcattattaatgtcaccaccactgtgcctgctgagctgctctgtgcttcccccttgcacaagaaccaggcccagccagggaaaggaaacgcaggccattccctcagagccgaagttaagggagaaataataatacaggcacaggaggaccagcagcagccagagaggagaagtgacagggaccgaggcaaatccagtctctccccgggtttcaagaatttgagaaacacacctcttaaagatgaaatcagctgtgcgagagtgtgaggcccaggaaacctgggagtctgctgtataaatacagcaagtggctcacactcatccacccaagtgagcacttttgcaggcccagcatcttttaatggcgacaaaacaagaataaagaatgtaagtgggtgtctgaacttgaccaacattttgatgatgcgatttttccagtttcgcacactaagaggcttctgtgattttggatttgttttatatatggcagatctctagaatggtagtgttgagtctctggggttttgagcagctttgtggggggctgctgggcgggtgctgtactactgaataactatgaggttcttctaaaacatcctccgaacactctgagtttactctgaatgctaatgggattaatctgatcattttaaaggtgcatgtatgcatgctgcagggtgttcctttcccagttaattagtttgtgacccttattaagatgtctcaagtctgaggctgattaaggctgcatggtaactttgtcttttttcctaatttggaagcgcgtaaatggttaaactcctggcctgggctgggctggtgcacagcctgggcccggcgcggcgggggttaaggtgggcgcccgcgccccgcgccccgcgccctcccgccgggatgagagcgcagtccgcgccgccagcccgcccgctcgctccgaggcggcaccgggagaaagtggcggtcagggatggagctgctgccatgacaaccccggcggtcggggcccgcgcgcgtcggggctgctcccgggaggaaggcggcgcggaggccgggggcggccgctgagcttggcgtccgcgcggctccggtgcgggctgcgccgcgccttccccagcgagctaccgagcttggggccgccgcggtccgctcccgccgcccggcctctccctcctcggccaccgccgcagcccctgccccgccgagccccgccggacagcggcggccgcagcgcgcatttgggctccgaggaagttgaccgaggcggctgccgcaggatcccgggcccggatcgcacgaagcccgcgcggccgtctcctccgcgcgccacccctgcgcctcccgcgagctccacttcccatctgctattgtttccgattgttttccggtggcgagcccggctccgaaacttacaaagtgtt

SEQ ID NO: 8675 - DNA, 2300 bp, Homo sapien
cttatggttatatgactcagttataatggttcagtctctttgataccggatggctttttggaagaccatttttctgttatttaacagttgttaacaacaacaacaacaaaaagcttcctggttgtgtttgatagagtctaggggaaaaacaaagccactgttgcctcctctccatccccaaggagaatgtgggtcagggctggaggccggctctgggaatccctgagaagggagcattattaatgtcaccaccactgtgcctgctgagctgctctgtgcttcccccttgcacaagaaccaggcccagccagggaaaggaaacgcaggccattccctcagagccgaagttaagggagaaataataatacaggcacaggaggaccagcagcagccagagaggagaagtgacagggaccgaggcaaatccagtctctccccgggtttcaagaatttgagaaacacacctcttaaagatgaaatcagctgtgcgagagtgtgaggcccaggaaacctgggagtctgctgtataaatacagcaagtggctcacactcatccacccaagtgagcacttttgcaggcccagcatcttttaatggcgacaaaacaagaataaagaatgtaagtgggtgtctgaacttgaccaacattttgatgatgcgatttttccagtttcgcacactaagaggcttctgtgattttggatttgttttatatatggcagatctctagaatggtagtgttgagtctctggggttttgagcagctttgtggggggctgctgggcgggtgctgtactactgaataactatgaggttcttctaaaacatcctccgaacactctgagtttactctgaatgctaatgggattaatctgatcattttaaaggtgcatgtatgcatgctgcagggtgttcctttcccagttaattagtttgtgacccttattaagatgtctcaagtctgaggctgattaaggctgcatggtaactttgtcttttttcctaatttggaagcgcgtaaatggttaaactcctggcctgggctgggctggtgcacagcctgggcccggcgcggcgggggttaaggtgggcgcccgcgccccgcgccccgcgccctcccgccgggatgagagcgcagtccgcgccgccagcccgcccgctcgctccgaggcggcaccgggagaaagtggcggtcagggatggagctgctgccatgacaaccccggcggtcggggcccgcgcgcgtcggggctgctcccgggaggaaggcggcgcggaggccgggggcggccgctgagcttggcgtccgcgcggctccggtgcgggctgcgccgcgccttccccagcgagctaccgagcttggggccgccgcggtccgctcccgccgcccggcctctccctcctcggccaccgccgcagcccctgccccgccgagccccgccggacagcggcggccgcagcgcgcatttgggctccgaggaagttgaccgaggcggctgccgcaggatcccgggcccggatcgcacgaagcccgcgcggccgtctcctccgcgcgccacccctgcgcctcccgcgagctccacttcccatctgctattgtttccgattgttttccggtggcgagcccggctccgaaacttacaaagtgttggatgtcccccgttcgaactgagggactgcagaccgcctctgggtagctggatgaagcccaccccgtccccttctggtaccaaagtgcttactcctctccaaagtgccgtgtctgaactgccgctgggaagaagcggctcctgagacgcgcccacacctttcacctgccgcgcgcttccccctcctcggccaccttcccggcggaagcagcgaggagggagccccctttggccgtcctccgtggaaccggttttccgaggctggcaaaagccgaggctggatttgggggaggaatattagactcggaggagtctgcgcgcttttctcctccccgcgcctcccggtcgccgcgggttcaccgctcagtccccgcgctcgctccgcaccccacccacttcctgtgctcgcccggggggcgtgtgccgtgcggctgccggagttcggggaagttgtggctgtcgagaatgggggtctgtgggtacctgttcctgccctggaagtgcctcgtggtcgtgtctctcaggctgctgttccttgtacccacaggagtgcccgtgcgcagcggagatgccaccttccccaaagctatggacaacgtgacggtccggcagggggagagcgccaccctcaggtagggagctgacattgtt

SEQ ID NO: 8676 - DNA, 2300 bp, Homo sapien
cagtgctgtggaatccccaggaaggagaggtcacatcctcttcaggttcatctggacagccttattaaaggggtggtaattctctcaggccttgaacaattttaatagatgtggataggcacagagaagagtgtaagcactgaagtcagcaacaagggcatggggataaggagatagctcagtgcagcacagataagtacagcacacgcttattaatgatgagcatttcaattgggtggatgcaggacatacatggaaggtaacactggagaaggagagaaggggaagaaggctaagatatctttataaactcccttttcatgaaggaaaagatccaacacaactaggaatgagtgagtaatggttcaagtagaggcaagaccagcattaaaatttgcaaacccatctgattttagtgtgagggccccactctgacctcgcaacaagcaataaagtcatcgtgcagcttccctgggctctccggcaggcccgatcacattgtaagccaggtggatggtgtgctttagaattgcacagcatggtggctctgaggaatagttattcaaggaaagaatataacatgaagaaacagaagagtgctggatggaggggacacttaacttgccaagaactaagaagtcaaaaccagcatcaggagggttgaaagaatatctgccaatgacccaactctgaggttggtatggacacgttgcacacaggttgggaaggtggttcccttgaataaccattatcactcaattctgtaaatatttgttgagctcttagcgtggatacagatataagtaacacattgttcaggtcatcagaaagctcatggcctagtgggtgatgctaagcacataaccatagcatagtgaaataactgtctagaattggagtgtgggagctcagtaaatgacatctttactccatccacttgaatgttaaaacacataagacagataagtagacacatggaaccaaatatcacatgtttactagtggtaaagctgagactggagaattaggctcagatgtgcagcaacaatgaggttctacgactggaccccggaaagaaacgcacacacatgcaatggctggatgttccacaggccctatccagtccttgtgggtgctgcttctgaaaataagcacatggaggagcacaacataatataagcttcagaaggttccaaaatagaagaccaaaggaagtagacatcctgtctccaactttacctattagaatgaaccccttctctccctagggggagtcatttagtggagaaagaaggtgggggagagagagagagagatgttatggctaactgaggcttaatttgattccccaccaggtgtgtagaatgtgctctgggcacatggatgaagaagcagcagtcaatttgagatgtccaaaagggcagagaagtatagagggtagggaaagtttcaacaaagaaagtggcatttgctttgggccttaaggatggctgcgcgtgcactttgataggctgaggctggtgaattgcttgagctcaggagtttgagaccagtctgggcacatggcaaaaccttgtctctacaagaataaacataaacattaacaaggaatggcggcacatgcctgcagtcccagctacttggactgaggtgggattgtttgagcatgggaggtcaaggcttcagtgagccatatttgcaccactgcactccagcctgggtgacaaagtgaaaccctgtctcaaaataaaaatgaaaacgagaatggctgggagttgcccaggaaggataaaaggaacaatatgaacccaaatactttatgcccagacagggcatgatggagaacaagggagtcagcagaggtgggatcactggggatggccatggaaaggtgggctgatgcttgattctgcatggcctcatgcctagaaggagtcaggctatgaccaggtggccatggggagccactggagctgtttagacagagatgtgatatgatcagaattgcattctttcaagacatcgctgaatgcagtgtggaggatggctcgtggatatgtgttggaggtgggtgggggtgagtggatacaggaagagggtggaggctaggagaacagctattccagtgttgcagtagaatttattcccattcggactccctgactttgtgtttaaataggaggaaatcaaagctaaattaaaggtaagacttttttatgtttaaggtaattcctctaatttcttatcgttaacttactgtagtccatatattttactctctggactgttctgccaactac

SEQ ID NO: 8677 - DNA, 2300 bp, Homo sapien
ctaggatagtcacacaatgacaaaatctcctaaagacagttctcagattgtatccccctccataagcagcatatgactatatatgtttcactatagctgatataattagtgataagtattctcccttctaggtaagatgctctaattaaaaattttagacctacacatatatgtgggctaacccttttagaatggggaatggggcagtatttatttgtgctccttctctcagaactgaaagcaagtagtatgcctttgtatccttcagcaactaaagtaataaacgataagagcttaatgcttatttttgaattaaatttcattttgccaattgtgcagagcccagtctaatttaacaaaaggctctgagagaaaatacagtagagcagatgcacatagcaaccattaaattagaatacaacggggaggcttctgccaggggagcggagagggcctcccgaggggcccaagggaagcggagctctggggtttagagcagaaagagacaaatccgagaccaaagaaagggggaggctggcttccaaaagcaccccagtcacctcccagcaccactgcggcgccgcttcctgtgaggggttttaggaggatcagtcctactactttttaggatctggtgtgtttttcccagcccttgctttttaccacgataaggtgtaggacagggacaatgttgcatgctgtgttttaaggagaaattgagatttgccactttggggacaggcgtccagtggaggggcacgggcgtttccgaggtgggtcctcggaggtgggtgcactccacctctgcgcgggcccaggacagcgcgccgtcagggctggacttggctgggcggggagccgttcgcagcgcgatggacacgcacaccggtgccccatctggcgtgggcagggtagttcagctctccagggcggggtttgtcaacttctgcgctggcatcggcgagggaaggtgccagtgtcagttttcagtttgctgctttccccagaactccctctcccgccctcccctctccctccccgctccccccaccccgcccctctgtaggggaagccgctgcgaggggcgccgcgttctctccgctggcgcgggtgtcgggacggagcgaagtgggcgcggtgcgggctcatccccgcaggcatccccagcccggtgggcgcggcggaggttaaggtgggcgcccgcccgtcgggatgagcgcgcagtccgcgccgcccgccagcccgctcgctccgaggcggcaccgggagaaagtggcggtcagggatggagctgctgccatgacaaccccggcggtccgggcccgcgcgcgtcggggctgctcccgggaggaaggcggcgcggaggccgggggcggccgctgagcgtggcgtccgcgcgtccccgcgtctcgtgccgcgtccccggaggaggcgggggccgccgtccgcccagctccccgtgcgcccggagcctgcgccgggcggcgctcccccggctggccgcgagtcgccgaccgggctgcagaggacggccaccgaccggacgaccctggctgcgccggctgcgcgtccccgccttggaactttttgccgccttggggttccagatgcgagacctggggctgggggacacgtacatctgtccatgtgtgtgatctaataaaccatttcctcctctccttgaagccgcagctttttatgacagctcctgtatgtcagagacacttgccttcttctttgggttataaacttttgatgccagagctctgcagaacgtgcccaactgaatcttaaagtagcgtctcgaagagagaggcagagaaagcgcaatctgtgaccttcatccccgcaccttgcttcttcctctcccctcctggccgcctccctcctccccaggggagcgtcaagaaagctctttttggatgcaggagggggcatctggttctgctaggctggaaagctgaggcaggatctgaggaagaattctcagactccggagagcccggactcctctcttctccttccccctgctcctggcgaactctgccccttccctcctccccgcaccgcttcccgagcccgctggtgcgcggggcgggggaccaggactgtgcggctgccggagtcctgggaagttgtggctgtcgagaatgggggtctgtgggtacctgttcctgccctggaagtgcctcgtggtcgtgtctctcaggctgctgttccttgtacccacaggagtgcccgtgcgcagcggagatgccaccttccccaaagctatggacaacgtgacggtccggcagggg

SEQ ID NO: 8678 - DNA, 2300 bp, Homo sapien
acccttcatccctcctttccctacagatgagatcttctgagccctgcttgtagatttaatgcgtcaccgcacccaagactgcctgagcggcatccttggagaccccactgcccactcttgctgccagttcagcttccatctcctgttccagctggggtttagggctgcctcagcaaccctgtcattgatcccaatcctgatcactggacccaagcatcgttcccgcccctgagcctctgccttgccaagctgtactccacagcagcctccctaggaatggctttctgccttgctccagcactgctgcatgcagccagccggcagctgcagcgctggggactgatctgaggtacctctgcaagacaccactgtctgtaaagacagccgcatcctccttgtgcctgtccagtgcctcccatggccgggggccagcatggggctttggggtcatggagttttcccgttgtattccagtcattgtctcagcacgtgctgtgagttctaccggtcagtccagagaccagccttcgcagtgtaagtttagttcctattctgtcccttcctatctctttctaggggctccagtctataagagttacccagagtggtacaggctccgagtgagaacagacacatgtcatacaacggcggagagaagcaaccagagggctggtcccctgggccacggctagccctcagggatgccttttccagcctcctgtctccttcttaaacccaacagactagacagcctcccatggggtcagaaaggaggaaagccacgttgtgctcttagaaaaggtcccagggagccacatttcgtgggctctgcagtggtgtgcctgcacttcagactgtgaagcggctgccttcgaacctatttttataggatgtgaatgatgactttgggtcctattaatctgccgcaaggttttattcagtctcatggtcagaaaaggtcatttacagagctgttggttttttttttcggagggagttttgctcttgtcacccaggctggagtgcaatggcttgatcttggctcactacaacctccgcctcccagattcaggccattctcctgcctcagcctcctgagtagctgggattacaggtgcccgccaccatgtcctggtaatttttgtatttttagtagagacgaagtttcaccatgttagccaggctggtcttgaactcctgacctcaggtgatccacccaccttggcctcccaaagtgctgggattacaggggtgagccactgagcccagccccggttggtgattattaataccagctagatcttcaaagccattcctgaattgagaacgatttcatgggtgtttttgtgaaacgggctagctgtcagccgggattgatcacttgactgtgtcagttgcagacagggctggaagatatggctttaattttctttctttctttctttctttaaccacaaaacaaaacacaaaactgtttcctcaagccccttgtattggggcctattgcaggtgaagggggctgaccaaaggaaggaggtggcgctgatccagaggaggctgagtgaggggtggagcggagcccagccgagggagggaaggagaggaacgccggcccactagccgaccccagcgcaacccagcgcggttcccagacgctgccgggtaactgatgccgccggcacagcttctgttctcacttgtggagctttgtctcccctcgctgggcagcccctggtaccgcaacccgcctggccgccttcccggctgaggcccccgggcagagctcctccgcagggagcattcccgtggacaaacacccctttccctggtagctgtggcaacagttgatctgtggcagcggaccaggaggagggtcaaatgggagaagggacggccagctggtcctaccagagactgtcgctggcgtcctcaggggccgctgcagggccaccttgtgtgcttgccctttccccacggtagactgccccgggagggggactgtgctgcctgaattcttgtccgggtgggactggcctcggtgaaggatccgggaatgggacttccgggccgggccggaggggaagtgtcaggaagagctcaggctttagcgagcctggagggaagggaaggctgaggtctcctctgcctccgcagccacacggcccggcgcggggcgggccggcagtaaacctaagaaggctttattcatttcctggaaacgtttcctggaagcctggcatgtgctaacgatacaacattgaacaatacaaaggtccctgacacggagcttacgttgcgtc

SEQ ID NO: 8679 - DNA, 2300 bp, Homo sapien
tttcgctttcacattggactaacgagaaccaaagggagtgaaagtgtgaggatttttcacattgcttccctacctgcagcaacaccacagaaattataataaccagccctggcagggcatattcctccaaggactgcctaagttctttgcatcaatttttacctagcctttgggaggagataagaaacaaggaatgtaatttcccatctttgtagctggccagggagaccagtttgcagacactgccaagactcatgctgagtcaggaaacaggcccacattgcacccaacattctgctttgtgttcagatgctgggctgctactggagaagtggctaatggggtgctaaatgggatcagaggttgctccccctgaagcaagttatctgtggatgtttgtgagtgtggtggaagaagggccagaacgtacaagctaaaagaaaaggaaaagaaaataactagtctttgacttctgtaaaactcctcaagtagaaacagatgggatttgtgactaaattgagctattattagatgctaaattggaaccactcttaactgtgccacccttctccaaagcactgctttactcgaaaggccctgattatgcctctgtggcttttggcaaaggtaaactgaatgagtaaacatgtcaaattttaattgtctgtctttacactagctgttgaaagtggtgccatcttcaaagagccaaaagtacatgcagatccgatgctgggaccatttttccattccatttacacagtggagtcattgaagaaccatttctgccctcagtctcccttgatgagctgaggatggttgtaggagatggcggttggagcagggggaagagtaacatgcagccatgtctttagcgacctgaagagcctgactcctgcattccggctgggtgtggtggctcacgcctgtaatcccagcactttgggaggctgaggcaggtggatcatgaggtcaggagatggagaccatcctagccaacatggtgaaaccctctctgtattagaaataaaaaagttagctgggtgtcgtggtacatgcctgtaatcctagctacttgggaagcttaggcaggagaatcacttgaaccagggagtcagaggttgcattgaaccgagacaccgcaccactgcactccagcctggtgacaaagtgagactccatctccaaaaaaaaagaaagtgcattcgatgattggatggggagaagacatgaggggtgagtgaagggggaacgctcgggttgtcccgctgggtgtccacctccctgctcctctgtgccttctattggtgcctcctgagtgttaggcatcaaagtgtggctgggtggtatcttggacagaatcatagttttacactcatctcttaaataggtagctcttacatgtgaatgctctgaggactaagtaatctcaatactaagttgctgtggaagccaaatattacaaacaagagagcaaaatgtgttgctgctaatgctaagaagtagagacctgggtattctttttttttgagattaattcctcagtgtgacatttctgcatccttccacccctttggcttccgccttcttctccccatcatgaagggatggttttggagatcaagggaagaggaagaaaactgctgtcttccttcccaatttcaagccccagctcagtataattccagcctttgttttgacactttttatcatgttcccagacacattgagctctgttcttccccatagggaaggggtgaagagttcagctttagttcgggccatacttcccttctttttcctgatcccctgaaaagaattgctgacactcgcagctgaaggcactaagtcatgcagcctcacgtcggtgacccactcacctcccatgccttcaataaacctggcaggcggggctcacgggatcatcagactctcacagcaggatttgtattcgtgacctgatttacacttttccctgcctcctgccagtaatttgtacggtgaaacatttgttgagaaggaaaagaggaaggaggtggtaacatatttctctggccattagcctgtgtgctttagggaacagccttctctaactaaaaggtaaaatgaaaggaagagaaaacgtggggtgtggaagacattgccagtagcctgcaatatctttccttccttccttgctaagaggagccattgtttggggcagcaggtgccccatcccaaggaccaaccatgttccctaatttccagcatcctttgcagctgtggatggccatgtggcctatttttttgccattgggttg

SEQ ID NO: 8680 - DNA, 2300 bp, Homo sapien
cctgtacacttcacccagattaatttccataaattaactccctctcattcacagcgctcccctgctcaaaaagaaattaactgtttttcccagcagggggaaatttctaaatcactggtctaggactcaaggtctttctctcttggtctcccatctcctcccctaactcccccctgcagggtttctacctgtgtctgctctcttcccctccatgagatgtctatctcatttctgtggcctatctggtctctcccacaatttcaagccagttgtattctccagcgtattcagccactggtaataattctggatttctgcaggattccagcattgcctgaaggattcacatatcaatttgcttgtgaacgacatgtttgcagtgatgaggtctacaaaatttgactctaacagtgtgtacgtgtcctattatttttatgtacattcgcaaagtcacaatgctaacttttggctgatctcctgacttatattgtatgccctttatagacgagaacaaatcatattcttcatattctcatccctgaaaaaatgactatgttaagtaggtacttcataagtgtcagcggatgatacaatcatcatctgttttctcttttactgctgaagttttctgacttgttcataaggaggggagtaatcaattgttttacttctttaaaagtaaacatgatttattttatagaaagagaggcgctcagtcaggcccaaagaacttgttggcaattggctgctttataaaaactgtgtggattttgcaggacagacctgggtttttatcttaactcattagctgtgtggcaagtcactgaatcgctgtcaacctcagttgaaaattcaggggtcataatgcctacaaggaaggacgctggtgaggattaactaaagtgatagaggtgaatacctgcccatagtaggtcacttgggaaaactttgggaattgcagcaaaggaggaagggagaaagacctcctgtggagtgtccctcacagacctcaaggtgtggacacgtggagctgggaaggaatccaagccacttgaggtcttcggagagcacctgggacagaaatcgtctgctgagtcccttctctaatacttggtgctattttgatcacagaccctccaagttcagggtatagttcagtggcagcaccactcagccagcaaggtgtgctgcttacaagcacgtgttagggagggcaagcaggccgttttagagcaggggaaagttctgaggtttcttacacccagagatactgccatcctgtgtaaactgccggtgtaaactgccattccagaggaagggacagactggaccctgaaaaggagaagcagaaaaaaaaaaaacagaaggaagccacaggtatccttctgtggccttctccttgtgaagatttccgatgacttcagcaagtttccgcctccttgagatctaatctgaatctgtccctgcctatgctgtaatcatagcaattgtttgagcttctatagcatcttgccttggtagagtttcagaatgctctgattgtggggaactggccaattctccctgcatcattggtttaaaaccgtaacatgcccatctccttactgggaaaaccaactgcttccaaatgctgttaatggccgaatggaggggtagggtgcagatttaaatgtctgagctctccccgtgggtagcagttcctgctccatccctgcctggagactaggaagaaggaagaatgataaggaactggcatgggcattagtcacatttctgccaagcaacctttctttcttggtgtgccctgagccctgctggcagtgccaggccctctccactgcccaccaaggagctcgtgtgtgttcacgtgtccacgtgagccccacatcaacatactcacacagatagcaacacgcagggctgtgctccggtgagggggtgagtgaggggccggcttcgactccccttggagtcaagccttccaagcaggaaagtctccttccgtcgctcaggagagtggagccaatgcgtgccttggaggactgctctgagccctgtgcagattggtgctgatgattcttaccagttgtgtgcaagaaaagaaatcagagacgctgcctgcctgctcccatctctcgcgcgctctctctctcttctgctctctccctccctttgcaaacattggatttaaacctgctcagaattcagcacagaggaaggcagcagcggtagcagcagcagaagcagtagcaagcccggcagctgagagcaccgcagcgtcgagatgtaccatcctgcct

SEQ ID NO: 8681 - DNA, 2300 bp, Homo sapien
gtcctgtctggcttggatacatcttcttcccaggagccagttggcttggattcgtctgatttcccaaagcagagatgattggcccaatttggcccagtgaatgtcccctctcttcctatctgcctctgagagccatgatacttcagagtgctcaaaatctcattgcaaaagcagcgtagtgcaaactcacagcaaaaggaagatccaggccatgagcaacagaccctctcctggccggctccctgagctccccgccaggctcttctcctgaaaggacacgggtagtctcccggcttcaaaggatttaggatgtctgccagaatggaattgtcccagctctgtgcaaaatgctgctagttgaaaactcctattttgaaaatgctgatgaaattttcattttattgtttgttttaattatcgtcctcttattgccttgcagcaatgttctctcccccttgcaggaatgttagtgcaaacacagctgcatcctcgggctcctgcagaaggggcctagaaggagtgaaacagactgcaggcaggaaatgagtttgatccgagctgtctgtgtgggcccggggtttgggagtgtctccatggtgagaatgcaccagcaacaggagtaggcccccctgtgggacattgtcactgaccagtgctcttggggcctccctgtcccttctcagagatgactgtccttgatggggaggtagagatgtgttttcagtcttctttttgggagatggaagatttatttaggaaatcagaagttgcagctgagtaggaatccatagttgatagtcactgaagcacacttcggaaatgactgggttgctttaaaggatatctgtgtttacacctgaggcattgtgtattgttcatgaggatgttgtgtcacttaccagtcaggatcagcaaatacggctttctgggtcttgtacctgtgtaggtcctagtgatgcactgcctcacctgcgcagggcaggcttttcagatcttctgcctatcacagggacgttgtggagaatacagcagctctcccaaaacacaaatgtcattgataataacaattacgagcctaaaaacctataaaccaaaagaagtattattccactcctacccctatttccatcccagagaaccaaggtgctaagaagttaagtgctacgtttaacgtcacaaaatagcagagtctggagtaaaactcatgactggcttcaaggctcatgtttcgtttctctcacacaggcctgagtcaaccaaaaagcacaacagaactcaacacaacaaaacactttgttgctgcttgaaggctgcagatagcgttctaaccctgcaccgtgggaggtgtttcatcatccggtttttcaattccccttggattcactctttttagatgcctagactgtgacagtgtgaggtgagagacctcacttaagggtgtacaaatcctctgaatatgttgatacttattttgatgtaatgggatttggtgggagctttgctagggaaatcctgggttagcgtgtactgacggcagtcagggagtttatgtgacagctggaaaagatattgcttaaccatcaatatgaagaaggattaggacaacaccttggattttgtcgtgggtggctgccctgcggaattagggttcaacattcaaccttatgttcattaggtcagtctcctgtccttctgcctctcctactcccagtgccccacccattctcctactgctcgggaagacacaattacacacgtactgttatattttcagagcacataggactgtgtactgaaggctttcgtctgcctgtctttatggatcctttgaaatttcattgtctcattagaggatcgaattcagtgaatgttttacaattaggtttttatggataagagatgggagaagtaccagtatcacagtatccagttgcaaatatcatttattaatctgagaaggcagagggatttagggctttctgagtcaaacactgaaaagctgaacattttcagtctttaaaagctcaggaactgggcccacaggccagcaggatcacttccttgccgtgtaaattcatgttttagctgaaggtccttctcagtgcaggaagaggcctttgtcaaaagcaggctcagtatggcagctgtcccaggcctggccccatttccttccctccccactcctcctttctcgtggtggctttctcgctctttttcttggtgtggggctggggcctctcgggacttatcaggtgcacccattcactgggcttcactgtatgagatggggctcagctgga

SEQ ID NO: 8682 - DNA, 2300 bp, Homo sapien
ctagattggctaaatttaaaggagcgacaatactaagtgttggaaaaaacgtggagtaactgtcactttcatacattgcttatgggcagtagattaatacaacccctttgcagtactgtttggtgtatatgaatgctacacatatctaaagtctatgacctagcaactctaatccttggtatatactcagaagatttagtgcttatgtcaaccaaaagataggtacagtataaaaattttcatagcagcatgattttaaacagcatcaaatcaaatataatacaaatgtcctactaaaaatgttttctatcttgatctgggcagtggttaaacaagtaagtgtgtgtgtgtgtgtgtgtgtgtgtgtatgtgtgtgtgtgtaaaaatttttctccgctgtatgcatatttgtacattttactgtatgcattttataacattgtaatcaaaaagcaaatagatttatgtatgagcttcattttgacaacataagcacaggatatgtcgtcgagaaactaatgaaaattttacttctgaagtgagttagaacaaggttgaaggtatggggaagagatggaacgtccttgaatgtatctgttcatgttttgatttctgaatcacattaatattttaaatattcaaaaataaaattacatcaataaggatgaaaacataaattttaggggatagctgtagaaacagagatgttgacaggtaatttcatctgctattttacaatttccagtcttccttggaattaggtaggggccataggactagttctagatcaaaagctctaagtaggagcctctgagctgaaaggtggaacactgacctgattcctctctgtgctctcttccctgctttggcagtcatggaggtcgtgtcctctgaatgtggacctgtgagtctccacatggcacacaattgctctgaaattacccaacttgcacgagagcttttgagagtgagaaataaacattttgatttggaggttggtttgttgcctcagtcctcagcagagcctagccgattctgactatgtcagggatgatataaaattgaggcgaattgttgagagggaagacgtgtagtggctgtatcaggggaattggagaaagtgataaaaggttttctataatcctgagaagaataaacgtgggaaaatttttggaatattagagttagaagaaagctagggacacaactctatccctttcagtataagacaaagaaactcagaccagagggactaatgattaggtcaagagcacatgacaagttgttgcgggacaggttgttactggtggagggtgttcaggttcttggcgtcttaaacaaagaaatggacaaaacacacaaacgaaggaaagaatgaagtaacaaaggcagagatttaacgaaaataaaagtacactccacaggatgggagcagactggttacagaattttctggggtttaaataccctctaggggtttcccattggttacttggtatataccctatgtaaatgaagtagtggctcatgatcagtctgattggttgcggaaagtgaccaatcagaggctgaagtgaagttataaagttatatctctatgcaaatgaagacctggcccacaaccagcctgattgtgggaggggagcaatcagagatactttcagtttttcatctgccatgcagaaaaggagagggttgcaaagggcgtagcctctggtctttttgttacttgggcacggaaagttggggttttccttttgatttagttctaggaagtcagtgtaaatcggccttaggtttcctggctccagaccccatcctcctgcctggaggtgagctcccaaattagtgctttcccaagaaaagaattcaagggtcagccaatggtgttagacagcaatcttttattcaatggttctgctccttgaagcagggtaactcataggagtgcacccagagcctgaaatgcaggggctcttggcaacggcatttatactcacatacatcattttcaaagggaggccattgtcacatcaccatgggtcagccaatcaggtggacacctcccttcaatgaccttcctgtcccataggagttctcaggcagcttcaatggaaggagggagccaagaagggggcctggtatacattcaaagatgataattacgacatggattgtgtatattcttgctcggaaaggtgtagggcttcccttcctaccaataaccagttcggtaagcagcttggtggtagtcacatggaataatttttcatatatcttctccccctgtgggaccctgc

SEQ ID NO: 8683 - DNA, 2300 bp, Homo sapien
tgttgtcttctgcggtgtagaagacagtagtagtagttagggtttcggacgagagctggtgaaaagctaccggctttggagccctggctgggagagctagattggacagttttaaccccgtggctcaaatgctcagctcctgtcactggtccttggttgtcaccattcccatcacactagatggggacgtgaatggctgcctgggcctgcctttctttcgggtcttgaagaagtgtgctccaccaatcctacctctctgtggcactggatttcctggatttattttgcgaactagggcaggttctccctcgccaccccgtatacacaccagttagcttcccttcccttttcctttccccacttctgtatggctccagggatcgtgaacatgtgcgtggtttacgatggggaggtggtgggaggggcagggaatctcggagggcagggggttgggctggggaggtgacttgcattttcggccttagaaatgctgcgggcatgcacgtgtggggttttcatataagccatgggaggggcgagtgcccagccctcctcacgctggtggtagaacccagggctttggcctccttttggcatagtggtctatgaagctgtatttctggtggagggatgagcctcctcacggtcatcttgcagttcttgaaagggtagttgtcagccactctatcaatgaggttttatatggcctcccatgaacaacgagaggtgtgccatggccgacggtgtcctggcagggctggagaagggattgtctcatgtgtccttctgcaggcaccaggttgtccccctggtctctaacccccagccagctgtctagtccagtgtttcttttctggattcaggaagtaagtggggtgtgtgtgtgtgtgtgtggggtgtgtgtgtgtatgtggtgtgtgtggtatatgtgtgtggtgtgcatgtctgtgtgtggtgtgcatgtctggtgtgtgtgtgtgttgtgtgtggtgtgtgtatctgtgtgtggtgtgtctgggtggtgtgtgtggtgtggtgtgtgtattgtgtgtggtatgtgttgtgcgtattgtgtggtgtgttgtgtgtggtgtgtctattgtgtggttgtgtatgtgtgtggggtgtgtgtggtatggtgtgtgtgtatctgtggtgtgcgtgtatgtgtgatgtgtctggtgtgtgtgtgtgtgatgcagtgtgtgtggtgtgttgagtgtggtttggtgtgtgtatgttgcgtgtggtgtatgcttgtggtgtgtctggtgtgtttggtgtgtgtgtgtttggtgtgtgtggtgtgtctggtgtgtttggtgtggtacatggactgtgtgtggtgtgtgtgtgtgctatgtgttttgtgtattgtatgtggtgtgttattgtgtgtggtatgtgtgtattgtgtgtgggtgtggtgtgtggtatggtgtgtgtatgtctggtgtgtgtgtgtgtgtgatgtgtctggtgtgcatgtgtgtgatgcggtgtgcatgtgtgtgatgtgtgtgtgtgttgtgtggtttggtgtgtgttgtgtgtggtgtgttgtgtgtgtgttgtgtgtgtgtgtggtgcgtgtgtggtgcgtgtgtggtgcgtgtgtggtgtgtgtgtgtttgtgtgtgtggtgtggtgtgtctgttgtgtgtggtgtgtgtgagagagatttgtacagacatgctgatttgcctgcgtagtgtcaggcccaggagaccctcctttgtttggctcttttgctagacaacttctgtttgggtaggagggtcaaattagtaatgcaccatctttaatgtattttttatggagactgtacataaaattatataaatctacagaattggttctattttaaggagagaggggaatgtatgtgggaggcaaggatcagatgcaatcgtggagactgggagcttcgggcgagtggcactcgggtgtggggagcgggagggcaagagatgagtgccgggcaagatgggcaggggcccgtgccctctgcacacatatataaatataaagaacacctagataaagtctatatatctctatatctatatgaagtcatagtttgctttatttttgtacctgtgcttagagatgttttgagcagtgctaccttcccaggcagtctgggatactagctcatgccttgacgccacctccttccctgctcttcctttggtattctctctgttcagagttgcttgggtctttctgatggaaatgtgtatatatgaaaagtttgtaaaataacaaaacaaataacccacctgcaggaaggacaagtg

SEQ ID NO: 8684 - DNA, 2300 bp, Homo sapien
gtgtgtttttgcgtgcgatgacgcgtgcgaggacgtgcgaggtgtgtttttgcgtgcgatgacgcgtgcgaggacgtgcgaggtgtatgtttatgtgatgatgcgtgcggggacgtgcaaggtgtatgtttctgtatatgatgacacgtgcgaggacatgcgaggtgtatgtttttgcatgtgatgacgcgtgcgatgacgtgcaaggtgtatgtttctgtatgtgatgacgcatgcgaggacatgcgaggtgtgtgtttttgcatgtgatgacgcgtgcgaggatgtgcaaggtgtatgtttctgtatgtgatgacgcgtgcgaggacgtgcgaggtgtgtgtttgtgcgtgtgatgacgcgtgcgaggacatgcaaggtgtatgtttctgcatgcgatgacgcgtgcgaggacgggcgaggtgtgtgtttctgtgtgcgatgacgcgtgcaaggacgtgcgaggtgcgtgtttttgcatgtgatgacgtgtgctcctgcattcattcagtggccaccctccgtgcgcccctgctgcgcttgcactgagctgcaggctttggagatgagagatgaaagtggtctagctgtggccttgctcttaagaagtgttttggtatcggcctgcaggtctgtgtatgtgtgaacaccactcatttgtttgtttcattctttcgttcattcaacaaatgtttgctgagcccttggctactacatccaggaactatgctaaaagctgggcatgtggtgacctacgcaaaagggggctgctcttaaggagccaccatcctaataaaggggacaggtaagaaacaggtaaacacacagagagagacagacttgtaagtgatatgtgctttgaagaaaatgaaacagcaccagggaatagagaatgctggaagtgccatctgagatgggatgggctgcccaggtaaggcagcattttagcaaagacttgcataacccaaaggagtgagctccaggtatgtagtcctaagcaggtagagccacacatgcaaagggcctgaggtcagaagttcttggtgcatttgaggaagacaaaggcagccagtgtggttggagtgcgctgggagggagaggaggctggtgccacaggcaggacaagatcctatagcgctctgactagttctcagggcagggctgtgtggggaggagggaccctcccaaagcttcccgtgaatgcctcagtggctcctgaagagctgatagagatggcggtggtactggcaactggtgcattttacaagctcctttttacatgtttattcctcacatcatttctggagggtaggggagttaggtatttaggtaagacccagagaggctgagtaacttgtcaagcctaccagaagtggcaggctagtgcttgaacttgggttctgagcttcaggtaccttgagatgagctcagcttgacctgcgccagcctagtgccgtgggcctccgggctggagttcagaactgggggcctccttgccatttcagaagactctggaactgatagtccaaggggttaagattgaccggattgcttctacaagcagctcaggcaaatgggactgagtctgtgaaaagccgattacccaaacaggatggagttttaatcaaatctccaatgcaggggggaagatgacctgacatgatcagaggaaaatgaagaagggagtggccttcgggtgggctgtccaccttcatccatggaagccagagagggaggaagctggatgattttctcagcagaatctgggaaaatgaggttccgcgtagccttggcctgcatctgtgttaagtcttggtagggctccgacggcaagtgtcctggaaacgcgggggcctggctgagctgggtttcaagaagtaggagctcctgtgtgtcatggatcatcataaagggaaagactgaaggatggtagcaaagcctgaggagctgggagcaggcagtgtttgtaagggccaccctagagtagatgctcagttaacatcggtgacctgggaataagctacaatacagaatttggacccagccagcctgagtttggatgcaggtctccctgccagtgatgttggtaggcagaaagtttttcccatccccaccttccttcctttgtccttgcattccgcagagccgcagcgagggtgatgtgtggggcaggtactgttgttgcagggcagcgatgtggctgatggcgtgtccttcatctttgtggtctcctttgcagcccctcccacctttacagaaacacccccccagtacatcgaggccaaggagggtggtagtat

SEQ ID NO: 8685 - DNA, 2300 bp, Homo sapien
ctctcttcctttagtcttgacgcctaaatactccacatctgctccataaataataacttctctagagctctttataatttacgaagggcttgcacctgtagtttctcatttaatcttctcaaccatcctgcgggacagggttattattgctccttctttacagataagaacctgaagctcagggagatttagtgaggggcccaaagcctcacagctggacccagctgaactaagctggacttaaccgagctctttcggcttctatatgaaattagagggagaaactgcttctccccactgagttctctcctcccctaacgtgtcacatcccctgcacctggtgttctgggaagctcacatctcaagctctctcctggactccttatactgcacagagcccagagctccagacacaacaagagggggttccacagaagaaggggaataaaagagataaaagagagccaagggcacctgctgctcactcccgacctggggaccaggcaaagtggcccaggccaacgttagagtcctctgtggtggggtcaagggtttaaaacacatagtgtggtttcaagggtttcttagggttgattttttttttcctagacaaatacaaagaaaaatgaagaaaaaattaggacaatgtcccaggagcctcaagtaaaaactaggaagcagctggtggtggaggaaaagccacgccagggagatagaaatggagtctccaggccggctgaggcgtgtgtttaatggaggccggctgtgcaggtagaggacggaagtgtcgggagccctccctgcagaagaggtgtgtcgaccccacagctgccaacgtgtcccagaatgaggcccctcgtgagtctgcaagggctggaaagcaagcctgccccaggtatgcgtggggcgggggctgagcctccagcgcccccagtgttcataaggaagaggtgcgtgggagctccctgggggctcaggccagggtcaggagctgtggagaactgcgaccaccctgctcctggctacctcgagcccacgctggctcatttggcagtgagaagacaaatgccaggtggggcttaggaggaggacggtggggagcatagagaggtcggtggatgagaaagacgggaggggactggggcagaggaaagggctgggcccccaggatgaaggggaaaggcaggcaggtgatctgcaggtgggaaggagagagaagatgggagcagagaagaaaccatgaggccagataacagggcagagaaaggagacggagaagccacaggggctcggggagtgacgtgacatgtgggtcacctgtgagggcaagcaccccagtcctctcttcctaaaggctggtggaaacagggggtagaaggtgccggatgcctgccactcatgccctctcctgccttcccccgtctccctcatctctgtaccctcccctgggggctgagcccaggttctgctctgcttctgagtcctcttgtccctcagttgccactttctgcgtttttccagactctttctgtccattcacctgccacagacaagggctaaaaattcagaagccaagtttctgatgccagctctgttcctcaaatgctgggccgcactggtggagtgccctctagtctgaactccacagctgcttcattgatacccctcccacggagttgtaaggggataatagagcggatgaaaacggactgtaaaagcaccaaaggatgaagacactttggatcctacgtttatttccaggactgaagccctcgggtttctttaagaggagacgtccttgtgctcgtccttgtcctcgtcctcctgtgcaccatggcttttgctgtgggcctgacacaccttggggctgccttgtttcaggtcagaagaggagaacttgtagagtgagccatgcttgggtggaaggtaggtgggctcaccaacatcctctacacaattagtacagactgtgatctgaggtggcgtcctagagctagaggctaagaagtctcatgcctgaagcagatctaggcatttaacacgcagaataagctaggtgggttttcaaggagctgctgaatatgcatgagaggcagcaagagagagagcaggagaatgaacatgggggagacgcagagaagcacacagaggcatgactgataagggcagaggaggaaagaaggtctcggagaccagggcatgaatgtggttgcacagagacggggagaaggatggggagaaatgaggaacaggaagaagattccgagagaaataaagaggccgagaggagctgagccagg

SEQ ID NO: 8686 - DNA, 2300 bp, Homo sapien
gtgcccttcttgcagtggggtccttacagggccgtcccacgagcctgctcagagccaggcagccccggccaagcccgtgccacagtgcagcagctccttcaccatccacgctcctcccaattccgcagaggacccgaaacctcagtcccgagcagatcaattgccgctgataacatttaaattctggcctggaggtgccgaggcggccctgggaaagaggaagggaaaggtggcacggatttcaagggagggactcggagttaacagatctgatccttccgagcctgcagtctctagccgcgcgcccccgcccccacccccaccgccaagccgaaaacccaatcctgggcccacccatttgcgtggatgccacagctcggccggaaggcttcagcgtgggagggggtgggggtgacaccagggctgccccttgagagcgacaccggcctgaaccccgtcctccccgcgccccccagccccgcctcgctgcagacggttcgccttgtccactcttctcgactcttctcgactcttctccactcttctcgactcttctccactcttctcgactcttctccactctcccaaccagagggcccgggaggggagcgggaggaggggcggtgcaggggcgggtctcctccgagcagggcggccctcagcaccccttcccggacgtgcgcccggcacgcccacactctcgcacggaaaagccccacttctcctcagcgtctgggtgctgggccgtgctgggccctcccccgtggaactgggatttatgaagccgtaaccggccagcgccgcggcaacctccgcttcatcctggagccaggccggcctcctgcgccgcggaggggagggcggtgggcgggagctgggcggaggcgtggggccggcggaaggcggcggggagctcttcccgggaaaggccagcacctgaggctgcactttctccccgtttcccctcaggaaaagacgcaccagcagcctagaattcgaggcactgcagagccggaaggggcctcggcgctgctccctccgccccctcatttcacaaaccggaaactgagacccaaagcaaggaagggacttggccaaggtcagagctcacctgggaccacacgaagatgataacttgctaggagttttgcaaatgggtttgtctacagtttggtagaattaaaacattgtttttagttcagatttgcaacagtggccggctccctctaatccacagtggtggagcactgtgattgacattcagctgcaaagctcttgctgggaaacgcggtggccgagccgtcagcacaggcggcagctgcctcccacacttaagacaggacttctaaagccacagtccctcaaacggcaggcaggtttgtgaatgtttccgtgttctgaacatttttctgcaaaagggttcacagctttaattgatttacaaagagacgtacaccatggaagagattgagaatcatttccttaaagcaacaagaatctaggctggggagaaatcagattttaggaacgagctgctaggcaccgtagcagcattcagagacatgaaagcattggattgtttcctagatttaagagcatatattttgcaacatgaaagggcttctatgctctagaatgtaagttcctcaaggataggggtctagtctatctcttcacctaaggtatccttagatcctggatcagtgcctgcgcgtaatcacaggtgcgaacacacatgtgattaatttgttagtctgcacagcacttccctttccatgcccactcctgcctggtctccagcagtcgtcagaattgccatcgttaaggaaaccctgatgcaagaattgcaagaatgactctgtttgtttgtttgtttgtttgtttgtttattaagacggagtctcgctctgtcgcccaggctggaatgcagtggcgcgatctcggctcactgcaaactccacctaccgggttcacgccattctcctgcctcagcctcccgagtagctgggactacaggcgcccgcctgcgcgcccggctaattttttgtatttttagtagagacggggtttcaccgtgttagccaggatggtctcgatctcctgacctcgtgatctgcccgcctcggcctcccaaagtgctggggttacaggcgtgagccaccgcgcccggccaagaatgactttgtaaatcagtgttgacattcaggacctttttcatttcgtgttaaagactgatcaccctgggaaaatcaaggcagtccagccaaaccccaactcccaatcaaatgcagtttgtatcg

SEQ ID NO: 8687 - DNA, 2300 bp, Homo sapien
gcaatcttggctcactgcaacttccacctcccgggttcaagtgattctcctgcctcagcctcccgagtagctgggattacaggcgcctgccaccatgcctggcaaatttttgtatttttagtagagacagggtttcaccatgttggtcaggctggtctcaaactcctgacctcatggtcttccctccttggtctgccaaagtgctgagattataggcgtgagccaccacgcctggccagggcttagcattttattgttggtttacattcagttccccgagctcttttaagaagtgcatgtctccctagtaagccacaccttagaaataagcatattcagatgagtaatgctgtgatggaggcagagcctcctcagccctgctcacggaatgcttccaggactttgctgctggccttattgagctctgattcccttctgcacagggtcagagctctccagggaacaatgaaaccctaaggaagagcagaccacttcacagccacgtgtgtcctaccccactctgctgcatccctagttagacttccattccaggaactgtctcagctgttggtaatgacatgccgactccatctgcagaggaaaatcaatgtcttacaatgaagcacctgccatccactctcctaggaacctctgccccttatagaatattcatgcagcccttttttgtaatctcggtctgagtttcaaaagattccctagcaggaagaccatttaacagatagaccattttacaacgcaaacactgaaaattccgcaggagaaaagaggcactggtttttgaaaaccgtgctctgtccacagtcagacaccatctcacatttccaagtaacccaaacagttccttcagttaggtaaatatgcctggccatgtgaccaggagctaaagggaataatagggaaaacagagggcagaaaaaaatgtcagtgggcataagacgaattttcttctttttaatttctcgattttgtgcttgataaagggaaagaggccaccattataaaacaacttttacacacttttacttgtgatttagtgcatggtgacctggaacataaagaagatttatgaaaggaaagacagaatcatagtaggtaattgagttattttttaatttttattctgtctttataagatttttgagaaggtaatcaattaacataaagatctgagcagttataaagatttacaaagaagattatacagtgatggaaactgaagcatattcttggcaacaatctcaatctatttcacgtttcccggcttttacatatataaatttggtatacataatatgtaaatatacttctattttgcatgaaaactaaaaatactaaaaaagtagcatgagtatatgaaaaagttaaacattaaaaatattagttggaaactggcttattttactaacaattatattcagaattctgttgctagactgctgtttctgggaacattggaggtgtactttctatacttgctaaaatacaagcttttcaagtattttccatagtattaagtgagactttaaatactcttgcttttttagatctaatttctgctttaatttatccttctcttcatttttcctgtttgtcctcatcttacctgttcttccctggttttactatctcccagtattcagaaatcagagcaaataattagtctgcttttctgcagaataaactattgggtatgccatcatgcttttgatctaccacataaacaaattattttagcaagacatcacttttatatgctgtataatgtatgtattgcttatgttttaagcagatttcagctcttttccttccatcaatttggaattgggggcccaaaagatgtgaaggcgataatgcttccaagataactgggctgcatccttatttgtaaaataagaaatactttatttcccaaattttaaaggagtgttccttctccgacctgttgtgatggatttattctatagctatggaaatataccctgcttcactcttgtacatacttctttactctcctcccgccaagttcattgaaagagaacccatgtgccggtccagagcatcgctgcatccgtaagcagctagacctcagcttcctctgtcaccatggtgccggctcggctgggcccggcggtcgccatggtaactggggcgggtcgcagggtcctggcaggctgggcgcatgcgcgcggggactacaagccgcgccgcgctgccgctggcccctcagcaaccctcgacatggcgctgaggcggccaccgcgactccggctctgcgctcg

SEQ ID NO: 8688 - DNA, 2300 bp, Homo sapien
cagcactgtcacctctgcagtggtctgcagtgagaaagtcagcggctgtggctgttctccacaggcccatgtccctgagcaccattgcaatcctgaattctgtcaagaaagccgtggagtcaaagagcaggcatcggagtcggagcttaggagtgctgcctttcactttaaattctggaagcccagaaaaaacgtgcagtcagggtaagccttatgtttggtgccagacacagtagagcatttacagatgaaaacacagaacaagctacttcttattcctttcaaagcggtgtgttttcttatctttaaaacaaataacgttaattgggcttttaggatcatgggtagtaaaacaatgcatatttattctaggagatttggaaaatagagtgaaatatgaaactcacccatagcagtgaggcattccttcctccagctattctgttcctcttacacacacgtgttttgttttgtttatggaattgtgatctgtgcgtgcattgttttatgacctgtttccctgcattcttaagtcagatgtagtagatgtagtagacagcttccatgaacttttctttccaacctttgctttcagtggctttatagcattgtggctgtggaaataactgatttattactatcctgttctttgaaatgttgattttcaatttttccatacaaatactatcacagtaaacatccttgtacatatagccttgtatgtatgtaatccttgggattaattcccagcagtcaaaggccatggatatttaaaaactttggatagtgtcaaactgtcctctatcacttatgccaagttagactcttttatttttttgaatcctaatgagaatggacattttttctcatgtttatcatttatttgtatttcttcctgaattgcctctttataagaaaattgtaaacactagtgattttgactttacgtcttgcagatatgttttctcatgtggttgttttgctcttcgttattgtttgggggtatttctggatagcagcaccttttctgttctagtgtcttcatacagtttggagcaagagtcgaatggcgagattgagcacgtgaccaagcgggccatcagcacccccgagagtgagtaactgatcggaacacgtgggcttctcctcagtctctcctgcattcgtgatgtgtttgctagagtcgcagtaaaactccttccggtgcaggatagttctgatggtcagaaccatgagtgcattgctgaggtggagtatttcacagtgaccacggtcgcttgatccatgagcactgaccgagtatgttgttccagtgtcgttacattcagtcagtcaaacaccacagtggcccgcggagcagacaatgccgttgaggcacaggtaggttgggtgactgacccagtggtgccttctggaggcggccctccgtgtctctgggctgtccgggtgcactgggcgctgctgggtgggcctgctcccagggcgggcagacgtcagcaccagcaggtaccatgcacgctctgcaactgccaagaccagagacccggggacccctgctcggagcctgtgtctcattcccctccatgttttttcctactgtttgtgcttttcctttgatttcaaaacagaggtgagttaggagagttgagtattcttttcctattatcttgtgtgatagcttcatattgtgtcaaacctcataaaaaccattattttgagaaaactcttacaggaagaagaaatgcttcctgtcctaaatctgtggagtagtggctaggccctgccgccgtgtccctgtgtgcccctcgctctgcgcccggctgtgcacagtgccctcagcaagctgcatccagccccgctcgtccctggccattccactcctcactgtttccacagaccacagtgcctggaacctgggaggtgtcagagatctcctcccggagacttctgggagggcagagctgggcgctgagcccaggccttctggtcccaactcttgtgccccttctccagcctgtctcctagtcctgactgcaggggaagatgagagcgtgctaaggtgctcttcctggtaacagagcagcaaggtgtcctgccgttcgtttagtcactgcttcagtcagctcatgtgtgtggagcacctgctgtattctagctacttgcttgtttggttctgtcacactgatgctgtgatctcttagaatagttaacaggttagaggtaattttcatccaggtccccctttgaagggagtttatcccacccccaccctcagacgacaaccgaatcatgacggcatt

SEQ ID NO: 8689 - DNA, 2300 bp, Homo sapien
tggctttacattttcgtatatgtgacttcatttctgaggagaaagttcacataatgtggaaactgccatgccatagtagattaactataataaaataccacagaagataaatccttgtttgtttagtggtttttttcattcttgtcacagatggtttaccaaagtaacccttgtttagaaataacttcatctgatgctgtgacctttgcctttcaaacatgggtcattaaacaacataatttgtacaaagtaactgactactcttagatcagacaggtgcttctggttgtccttaagtgaattttgtctcaaggaattctcgttattgaatagagttttatttattttgttttcatatttctaggtcaagctgctcccgtatttcctaggtgaatagtcaaggtgtaattatctacagtggaatttttatctgggcttacttccatcatgatttctcatctaccttctctgatttttaattgatatgtgtgctgtgaacacaaactgatttgaattttggcataaggagcaccactggggaaaggagaagtcagtctcctacacagtcccaatgccctccagagccagtgtctgctgtttggacagtctttgacactgctcctctcccaaggagagctgactggtgctcctgtgtgggtggaaattgcatttgagctctgatattaaattaaaacactggtcttgacagtgtgaatgtatcacagtgagtcctgcaccatgttagtttgacccctgagcaaaaatcagtgctttggcactctgtcacctactatcgtgatgaacagaaactctgtggtggcctgtagtcaaacagtttgcctgtttacatctggcattgaaaatcttcattttggtagggtcctggtggcatctgtgtcccatgtgcagcattgcacagatatgttgagggcatgggtggaaggagagtgcccagggcttgctggtgattccaaagcgcattgagtcagttgctttgcagagggaacttgtcctcctgatccaaactgtgaagctcttgtcattaatccttattcttgaaaaaagttccagttactaaaattggtttttgttcataattgtgggcaacaaacttgaagttgggaggtgaaggccagatatcccttttctggtgactgttgtcattgcatcagtcttataagaccactggcctctgattgcagaagcagctttggggttcagttggtcgattactttccccacttgaactgcagctggatgacaacaccttgtgtcaattttgaaaggaaacctggtggaaaaaatatacttaccttggattagaaaggaagctgtggagcaaggacagaccaaatagctgaatttctgtcttctttggatccgagggaactgtttattgggatagattttgaatccctacgcttatgtacagctctcctctgctcagcagagttcttggtgtattcagagactgttggtacatagcaaatgggtctccctctttgtttctctcacctttgcagcttcggggagttttgcctggctcacctgttactgaagaggaaccctgtcatgttcttccaacacttcattgaatgtatttttcactttaataactatgagaagcatgagaagtacaacaagttcccccagtcagagaggtcagtgaagcagctaagtctggtctccttgtatctgggtaagagctgggggaatcaggggaggttaggctctttgcatgtagtgattggacgcagaccctgccccaggtctttactgtggcttggcaggatggcgtaagaaaatacagtcgtgagaatcgcttcctaagggcagcgcctgtgatgagcactgggatctctgtagtgcactggagtctttggcatgcagcttttaggatgcagttaaagtgcagtgttaaatcccttacacccgtgcccatgtgatgcagtgaacttgtcccgttctgccacagagagaagcggctgttttcattgaagggaaagtcaaacaaagagagacgaatgaaaatctacaaatttcttctagagcacttcacagatgaacagcgattcaacatcacttccaaaatctgccttagtattttgggtaagcccagtgtgtgtgggagaaaatgtgtgtgtttgcaaatgaaatgctgtgttgataatggcccagcaggcctctagtaagggagaccctggcactgcaggaagacccctgtcatcttgtccttctctggcatcagctgtgccccagacaaaacacccttgcagaccccctgacagcctcagatggcc

SEQ ID NO: 8690 - DNA, 2300 bp, Homo sapien
tgttcattgatactggaatagtgcagtaagttatgacgacagtcctagttttgaaatggcatatacttatgtagtcattaaacatatgtgtcatacatattgacatgaaacgatgcctaatattcaaagtaatcattgcagacttcaaaatactatacttggtaagtgtataagaaaagtaaacataaagccacgtgactatagaaatactttgaaaaagttatacacaaaaacaataatggtgtctctgggtggtagggttataggtagatgtatcccagtttacccaagataaccctagcgtacacctattttcacaaaataattattaatagcacccccttttacttgcagatgtgtctagatttagatgataaaattatatgcttgccctaattttggatgagtttcattacatagtgactaagtttttacaatagccatgtatttttatgaaacgaaaactagtaacattgttttaaatttgggggataaaggaaatactccattgacatgtccttaatctagctagagttcacttttcttttgccttatttttactgtaaaaccaattatctttgtaggtgaagtacatttttaccttaggggatatagcccagctgtgtccagccagggtggagaagcgcatcttccttctgattcagtccgtcctggcttcgtctgctgatgctgaccactgtaaggcatttgaaatcatactctgtagcacgcatgccgtttcaaggttctgtcggtaactttctctcccttctttgcagcaccatcatctcaaggcagcagtgaggccccagcgtctcagccacccccccaggtcagaggttctgtcatgccctctgtgattagagcacatgccatcattaccttaggtaagaaaaacatgggagaatggggcttgacatcgttctgtgtgtagctgttgtcttaagtaagcccagccatgggactgtgtcaggggctgcggagcctgtctgtgtctgctctcagccatgtggttcctagaggtggctctgatctgagtgctgagctctgcataactgcgtgctggtcatgagagccctcaggctgataagtcctcaagactaaggtactctctagagggtctagagggagcttttgtttttcagtagggttatgttaatttattacaattatacctgtttctgtaattttttttcaataccttcacttgacttgaatattcctgtaatattttaatattcataatgcagccccacgaagtctgttctgtgccgggcactgcactgagttctggaaatgaagaaataaattttccataaaaggaaatggtttatttagtactttccagaattggctagatgactatttacatatttctccatgaactcaaattatttttaatcttgaaaacactgacctctgtgctggaaattgtattttgtttttttgtttttttatttttcctttagtgtgagtgtatatttcatgctacctaagttattaatttttttgtaatattagttatttttcaaatacctaagaattgcaaaacatttcccaggcacaaaagaaacatacaaacaaaactcagcagccttttcaactatgaacaagaaagaaagaaagaaagaaagaaaggggacatgcattctttcctatttacccagctcagatttcaaattcagcatgggtatttagcatctgtagaggatatgtataatcaggagtaaaatgtttcacctctcaggctttgctgatcattttccaggtaaggggataactgcgaaattcaaatgttgactttaaaaggaagatgattttattagtgtaaaggaacatcccatagtatataactcctggggagtttatttctccttaggtatttttattcgactattcaagatgggtctgtctgcctttagttttttgttgtttgtgattgtgggcatgatgttttaactttgatgaaatagaagccattagcaagatgtatctggagaaaatttaggaatggaattaggatttagaatacagttgagacatcttcctgtcttctgtgccaggtaagctgtgcttacagcacgaggatctggcaaagaagagcatcccagccctggtgcgagagctcgaggtgtgtgaggacgtggctgtccgcaacaacgtcatcattgtaatgtgcgatctctgcattcgctacaccatcatggtggacaagtatattcccaacatctccatgtgtctgaaggattccgacccattcatccggaagcagacactcatcttgcttaccaatctcttgc

SEQ ID NO: 8691 - DNA, 2300 bp, Homo sapien
gaaatagtcatgcaaaagctcagaggccagaaggctctatgaaatctcaggaaaatgcctgaatcaattgctgttgactgaggtgtggagagcagaagtcgggcaggttgaggacagagggagtgctggagatggaagcccagcttcaacttgaatgctttgtcacacctcagttgggagctcttggtaatgcatgaggtcacccagagttaggttggagataagaggactaagaatagagcttttcaaatcagcaattagttattagaagacaggaattagttacaggagatgaaaagagatccaactggtggaccagagtctcagcgcaagagtagtcagtaacctctggtggaggccatggagacgggcctgaagcatggccgttggttttggtactaagatagaagttagtgtgttgggtcacagtctgcccaggtggggaatggctgtggccctcagctgggctgggaggctggctgggagtggagggctgggagttgtcaaagaggagccaagtttgagatttctgcaagttcagaggattttttcccaattctgttggctacatataataaacattacttaatattttatatcgttatttttaaataaatttaaaaatacttgttcattgcttatatcttgtggtatttggacataaatcagacataaatcatgttgtaagctaactgtagtaagacttgacatctgtggatggatttttaatcaatagctgatatattagcaaaacttcatttatatgcatatgcttattatggtatatagatgtgtttattttgttacagttaccttattctgtatgttttgagaatttcccttctaaaaacagtttaatgaggaattcctgatgttcgcgtgtgggtatgtatgtgtatgtgttttcccagaagtctaagaaaaattaatcaagggaagaagtgtatttttctcttcatttaaatatataatatggcattgtctcatgaatcatatgatcccattcagtgacttgggaagaagtaaaataagagatagttctaaaacaacagtgacagccaggcacagtggctcacaactataatctcagtactttggaaggccaagacaggaggatggcttgagcccagaagttcaagaccagtctagacaacatagtgagaccctgtctcaagaaagacagacaaagagagagagagagaaattagccaggtatggtgaccatgcctgtagtctcagctactctggaggctgagggaagaggattgattgaacccaggaggtggaggctacacagagagctgtgatcatactactgtgatccagcctgggtgacagagtgagaccctgtctcaaaaactagtaatataacacaaacactttagtacatcagaagcattgttttttattttgaaaaggtttgaaatatctatttctgagtggtattaagttattgcatattttagctcatttaatatcatcatatttaattgttaggttgtcatttacaatcctgccatgtagtcccagctactcgggaggctgaggcaggagaatggtgtgaacccgggaggtggagcttgcagtgagccgagatcgcgccattgcactccagcctgggcgacagagcgagactccatctcaagaaaaaaaaaaaaaaaaggacaatgttactaatttttgtcactataactgtgtaagctctggatgtatctgtaactgaccccatgcagttatgtagaaattttggaggggaggaggataagaagagtctgaaatgaattgtgaaattttattctttactttaaggaatattttatgaggggaaaaatgaatataactgatagtagaataataaaaatttaaaagatacctagtttggtatcagacacgccactaattaggaacgtctacatataagtttcatgtgccacttgagtcctggagcagcagaagttgataccctttcagtgaggctcccatctgaatcattttgtatatttacagttgcaattctgcttttctatcttttttttttccagccgatatttaaataaggcttttcatatctggtccaagaaagaaaaattctcacccacttttataaacaatgtaatatctcacactggcacggaacattcggcacctgcctggatgctgctctccaagattgctggctcctcacccaggctggactacagcagaataatacaatcttgggagaaaatcagcaggtttgtatcttctaatttaaccagtaatgacactgaagagtcttagaaacaaagcccaagacttaa

SEQ ID NO: 8692 - DNA, 2300 bp, Homo sapien
gccacataaaaaacagtcaatagatggtatttattatttttgctatggatgagtgttaaaataatagatatgtaaaatgtaaaatgctacagagcttaatagggaatagtactgggggaggagggagaggaataagatgattcttcaattggacctgaatgtaagagttttgccaggcaaataaatgcagaaaagtgcctcccagcaagcacagtgtaacaaagcacacaaagggaaagaaattaaagtgtttctaaatgaacaaaattgttacagtgtttgcttgtgggtattagtatctgttcagcagttattatgtggcaagtacaaatttatctttacaaaaacccctgtgaggtagatattgtactccccatttgacagatcagaaaacaggggtttagcaaggataaacaacctgcacggtaatacatggatgctatggggtagagccaagggaacaatccaagtgtgtccgactccaaaggttatgctcttggaaaatcaaactggagagaatggcagctcttataaagcatgccaaggatgtggtcatttatttaggaaacaaaggggaaacattaaaggtgtacaggcttgacacattcaaagctgtgttttcaaaagtcgttctgcaaaagtgtgggggatgggctggcacagttaacatcagaaagcagctaaaatactcctgcaattgctcgaggctatgatgaaggcagcagcatcaggaatggagcggggctgccctgagacacctcagaggcaggacagtggtagtgggcatgaaaggggaagcagaaatgccatgactcctgggttggtggcttggatggtgccattagcaggctttgggaatcccattttcactcatgtgacgtttgatgatgtctgcatgtgagacatccagtggaacctatgaacatgaagttcaagaaataagtctggcggaagaaagagatttgcaatttaaaaccatcttaataggtaagaatagataggtgcacgaagacacgcacaggaagaaggggaaggccgagaaaacagatgcacaggcgctagaagagactggccaacattcgcttattctaagggtggcctggccggcttgagcccccacgggaaacctggctagccgcaatcctggcgtggcacggccctggggaccccaggcaccgccgacagccgggcgcccccaccccgcccccaccggcaccccggcccgggcttaggcatcgtcggggacgcataggaccctcgccctggcccccgggcctcccggctgcatctgctcaccgagtctaagatccagcggacaccagggctgcaggccgctaccaaggccccgcaacgccaccatgatcccagggcaccggctcgccgccgccgtgctcaactttcaaagctcgctcccgcgcgcgcgccgagtcgttcctgtggaccaatcacaacgtacagaatttcccactggccaaccaccgcgccgagccgtttccattcgctcaaccaatcaccggcgtcgtccgccgcacgctcagagaactgggcgggccgaaaagtggaagccaaacaaggctcctgcgggtgttccgctaattcgttcgagaaggagccagggcctgagttaaaccctaacagcgtttttcccgcctcgtttttcttcaatgggggaaaatctaaagggtatctgagatagggtacttccggtagtaactgtcacctttgccctcgtcaggcgacatttcgcgtgcgtgtcaaagggctgcctttcccgtcagcactcgaacagcgtaatatccgaatgtgaaaggcagcccaacgtgtatcgagctaaagtaataagggaaaagtagccgaaagcactccgagaagacaagacaactgcagttctgtagggactgcgcggcacgcgtgggcccagagcctgtcccagcgaggtagcagctgccatgccgaccgctggagcgccggccgcgctctccctgcgcatgcgcagcgagctctcctccgggctgccgggagtcccaggagcgttagggggtgcgcctgcgcgccgctgctccagcgcatccgggctggagctcgcccgccccctcccccgcccggagccgccgaagcgcctcggtgcgttgcaccgccggaggctgggcagctcgcagcgctgctcggcgctggaccccacccggcaggcgcaggccacccacacccggctctgtgcggctgccccccgcagcattgcacggccgaccctcgcccgcccactgccaccggccgcgggactggctgggactggctcggcc

SEQ ID NO: 8693 - DNA, 2300 bp, Homo sapien
ggtttttagaaacaccatttctttgtctttaaacagaaaatgtggtaactgaaaacttgcattctaataaagaagtctaagaaacgcagcctaggtagtcagatttagactgaagattatgggtcttctttctggaaacatgtacaagcataggtagttcagggctgaggtgaggtaagagagaactggttagctctctcacaccacatctaaagagaaaaacgggttggtgcgggctctgggaagtggggctcggtggacgagcctcactttgcgtctggcagttgcagatggccgggcgatgggaaagccagtattggcagagcggtctccccctaacaaacccacctgcaggctatggccagagcacctcacccagaaatcctggggacaagaagcaaagccgagtgcatgccggagacaatggggagaacccataggcaaggtgcccatcccacgaggcacagcagggcgcttcctcccgccctcgccgtccccatctccctggcagcgcgctgtcacttttggcagggaggacagtaacgcagggggagtcgcccacgggcgggacttgtagctgaaccccaggcctcagactgcagttgacaagcgactgtgacaggcctcgccggaggagctgggccctgaatcaccctgctccccggccggctgtcggcgctgggggagggggtcccgggggtcgactcaccgatctgcccgatgaactcgatcttgatgccctggtgctccagccgcttgttggggttcttgagggcaaggctcaccttcccggagaccgtctccccgtcgtagaagaggaaatatttctccttcttcccgtcctccgtcttgtgctcggcccgcttcctactctctgcatcgttcagaaggatttccacctccacgctctgcccgaagccgaagaagctcatcgcaccgccgggccgggcgggtctcggtaaggaccgctccctcgcaccggggcgcgggctgccctaggtaaagaaggccagagggcccgatgcgcgagcgcgctcggccgccgcggggctgcctggctccgccgctgccgccgggcagtgggcgccgacggacagccggctccacgggggaggggcacggccgggggaggctggcggctgcgggctgcggcgcccgagcagcaatgcaccgaggagcagtgccctcggccgagccagtcccagccagtcccgcggccggtggcagtgggcgggcgagggtcggccgtgcaatgctgcggggggcagccgcacagagccgggtgtgggtggcctgcgcctgccgggtggggtccagcgccgagcagcgctgcgagctgcccagcctccggcggtgcaacgcaccgaggcgcttcggcggctccgggcgggggagggggcgggcgagctccagcccggatgcgctggagcagcggcgcgcaggcgcaccccctaacgctcctgggactcccggcagcccggaggagagctcgctgcgcatgcgcagggagagcgcggccggcgctccagcggtcggcatggcagctgctacctcgctgggacaggctctgggcccacgcgtgccgcgcagtccctacagaactgcagttgtcttgtcttctcggagtgctttcggctacttttcccttattactttagctcgatacacgttgggctgcctttcacattcggatattacgctgttcgagtgctgacgggaaaggcagccctttgacacgcacgcgaaatgtcgcctgacgagggcaaaggtgacagttactaccggaagtaccctatctcagataccctttagattttcccccattgaagaaaaacgaggcgggaaaaacgctgttagggtttaactcaggccctggctccttctcgaacgaattagcggaacacccgcaggagccttgtttggcttccacttttcggcccgcccagttctctgagcgtgcggcggacgacgccggtgattggttgagcgaatggaaacggctcggcgcggtggttggccagtgggaaattctgtacgttgtgattggtccacaggaacgactcggcgcgcgcgcgggagcgagctttgaaagttgagcacggcggcggcgagccggtgccctgggatcatggtggcgttgcggggccttggtagcggcctgcagccctggtgtccgctggatcttagactcggtgagcagatgcagccgggaggcccgggggccagggcgagggtcctatgcgtccccgacgatgcctaagcccgggccggggtgccggtgggggcggggtgggggcgcc

SEQ ID NO: 8694 - DNA, 2300 bp, Homo sapien
ctaccagaggtgtgtagctcacagggtatttactgtgattctactcctaacctaacgacaaaaacaacttattttaaaagtacccaagcattttaataatacacaagagtctaaataaggcttagaattggagacgacccagtcttgactgggagctccccaaatcactttaccattactgccttttactgtctagttcttatttgtttatttgtttatttttttgagacagggtcttgctggttgtcacccaggctggagtgctgtggtgttatcacagctcactgctgcctggaactcctgggttcaaacaatcctcccatcttagccccccgaggagctaggactaccggcaagcaccaccacgaccagctaattacaaaaaaatttttgggggtagaggcaggtcttgctatattgcccaggctggtctccaactcctggcctcaagcaatcctcccacttcagcctctcaaagtgctgggattgtaggcatcagccactgtgcctggcgctgtctagttccaatgattaataatcatgtttaaagcattgagaaactctgatcacttaattgtggtttttagaaacaccatttctttgtctttaaacagaaaatgtggtaactgaaaacttgcattctaataaagaagtctaagaaacgcagcctaggtagtcagatttagactgaagattatgggtcttctttctggaaacatgtacaagcataggtagttcagggctgaggtgaggtaagagagaactggttagctctctcacaccacatctaaagagaaaaacgggttggtgcgggctctgggaagtggggctcggtggacgagcctcactttgcgtctggcagttgcagatggccgggcgatgggaaagccagtattggcagagcggtctccccctaacaaacccacctgcaggctatggccagagcacctcacccagaaatcctggggacaagaagcaaagccgagtgcatgccggagacaatggggagaacccataggcaaggtgcccatcccacgaggcacagcagggcgcttcctcccgccctcgccgtccccatctccctggcagcgcgctgtcacttttggcagggaggacagtaacgcagggggagtcgcccacgggcgggacttgtagctgaaccccaggcctcagactgcagttgacaagcgactgtgacaggcctcgccggaggagctgggccctgaatcaccctgctccccggccggctgtcggcgctgggggagggggtcccgggggtcgactcaccgatctgcccgatgaactcgatcttgatgccctggtgctccagccgcttgttggggttcttgagggcaaggctcaccttcccggagaccgtctccccgtcgtagaagaggaaatatttctccttcttcccgtcctccgtcttgtgctcggcccgcttcctactctctgcatcgttcagaaggatttccacctccacgctctgcccgaagccgaagaagctcatcgcaccgccgggccgggcgggtctcggtaaggaccgctccctcgcaccggggcgcgggctgccctaggtaaagaaggccagagggcccgatgcgcgagcgcgctcggccgccgcggggctgcctggctccgccgctgccgccgggcagtgggcgccgacggacagccggctccacgggggaggggcacggccgggggaggctggcggctgcgggctgcggcgcccgagcagcaatgcaccgaggagcagtgccctcggccgagccagtcccagccagtcccgcggccggtggcagtgggcgggcgagggtcggccgtgcaatgctgcggggggcagccgcacagagccgggtgtgggtggcctgcgcctgccgggtggggtccagcgccgagcagcgctgcgagctgcccagcctccggcggtgcaacgcaccgaggcgcttcggcggctccgggcgggggagggggcgggcgagctccagcccggatgcgctggagcagcggcgcgcaggcgcaccccctaacgctcctgggactcccggcagcccggaggagagctcgctgcgcatgcgcagggagagcgcggccggcgctccagcggtcggcatggcagctgctacctcgctgggacaggctctgggcccacgcgtgccgcgcagtccctacagaactgcagttgtcttgtcttctcggagtgctttcggctacttttcccttattactttagctcgatacacgttgggctgcctttcacattcggatattacgctgttcgagtgctgacgggaaag

SEQ ID NO: 8695 - DNA, 2300 bp, Homo sapien
acacgaaagccaacaccatcgaccaggactcatgcaacaagagtaagccgaggagtccctgtccccggggctggccgcggctccgcttctgcctgtcatatacttctgacttttattgggggggcacaattactggattgctcactttccacccataatttggagctgccacctcccactctgaggctttgtggattatcactcactaaccagaatgctgcctactattgaaaccactgagtgtttggaaaggaaggtcattgtttgtaataaaagattgtggctgattgtagttacacgggaaatcagccacaagccacagccacacaatacactgtgaattcatacagaagtggcatcactagtgtgggatcccagagactccagtctgtggactcgcctcttcctccccaagcagcaaacaacagaggcaatgagtgtgctccgcctgctctgtgttcccaattcatctgccccgctgcaagttgcagtctagcacgggacttgaacacagaatccttgaggggtggtggcttgaactgtaatgtggccatgcatagccacagtcagtattaagagcttacctcggccgggcacggtggctcgcgcctgtaatcccagcactttgggaggccaaggcggttagatcacgaggtcaggagatcgagaccatcctggctaacatggtgaaaccccatctctactaaaaatacaaaaacaattagctgggcgtggtggcagatgcctgtagtctcagcttcttgggaggctgaggcagaagaattgcttgaacccaggaggcggaggttgcagtgagtcgagatcacactactgcactccagcctgggcgacagagcgagactctgtctcaaaaaacaaacaaaaaaagctcacttgtgcagggccaggttctaggaagcaccagggagctggggatgtgggccttatctttaaagggcctgcagtccacagtgggagcgggggagaccaggtatgtagcaaaacttatacttaaatagaatataagcaaacataaaataatataggacaaatgggtggcatgaacttatcatcaaaaaataccagaactatttcctgaagaggataaatttagagcaatgcttcttaaagcgtggaagtgtggtagcagccgtcctggggagcttatcagaagggccagttctcaggccccatcccagactcctgaatcagaaacactagggtggagtccagccatctgtgtgttaaccagctctctcagtgactctggtgcacactaaagttcgacaccccctgatttcagtggagggaataacatgaaaatgtccatgttcgattggccacatgccttccttttggagtaataacagcagctactaacgatgtttttgagtatttgctgtgtactagatactgttctaagtcttttacctacatcacccctgctacttcacacagagccttgtgaagtaggttgtgtcatgacctgcattataccagctgatagaaatagacgcagtctagaaggagacctgctctagtctcagctctgcagccagctctgcgactccaggccagtcagttaagcatgctgtgcctgggtttccatcgtcttttaaacggggtgataagacctgtcttagctgtgtcagaagattattattataaggatgatatgattaaatagctatatcctttcggaagttggaagtgttaaatgctgtttaaagaagtgtggcatttcttatattggctcccatgacttacccttattaaaagatggtgtccgagtgtcttggagcaggattattttgggttccttttctgccacgggatttcactatataagacagaaaagcctttggagaagaaggagggagtgaaagagcagaggtcaagaaaacaaggctagaaggggtctgttctgcagggaggtccttccagaaagcagtccctccagcctacagcctccagccccctactcggcccggtgtagctcagggtctgataaaggagggcgtcgcatcgctgtctctcaccagaactctactacgatcgcgggaaccaccatgagtttgtgtccctggtgaaggacctggcccggcctggagagatcacccagtcgcaggccttcgactttgagtttacccacgtggagaagccgtatgagtcctacacagggcagaatgtgaagctacggtaagtgatgtctgctggttccccactgtaccctagaacctgccccatgtggacaaggacctgaggccgtccccactttgagaatcttcacagggatcccg

SEQ ID NO: 8696 - DNA, 2300 bp, Homo sapien
ccattaccagctgtaggaacttaatcttactgttaagaagctttccttatctataaaaattagacaagaatacctaccttacagggtatcttctggattatctattcaatagggtaagaacaccttacagggttgttcaggattaaaggtccggacagtagtcaatacatgttttcctttcctcactctctcttctatgcctttgcataggaaagaggaaactgagcacctacttgcaactattttgaagcttaaatgaggtaatacaaagggcctagacaatgcctggcattacaataagtgcataataaaagcattattattctcatctcatacgtctttccttcttgctcactgtggctcctggcccatctcctttctgctccttgaaggtgccaataaaagttgaaagaaacagttcattcaggacattgtagaaaaatggtgatgattcgatttcatcccaagacaatcagaatgtgcctggaacacagtaggcattcagtagctaagttgttaaattactatatgacagggcccaaggtctatgtgttaccctaaccctaactcggttaatctacataacctgtgagatgttctactcttcatctgggaagcatgctccagatcacacatccagtaatggtggaatcaagatatgaggtcagcacctgtcactgaggtctatctgaagctacttaatgactatactgcctctgaatttagtcaaagtccctacatcaattgtcattaaataccatttatggctgtctaatgctctgaacccagcataccttcctaacctagtttcctaatggccccttaggagttaacaggcccactgcaaacaccacatattgataaataactgcaatgtgctgtagtatatctggaacccctgtcattcccaaaagaggtactttctgtaccttccaatgttcctcctcctccatccacttagaatgccatccatctttgtgattataaaaacgacatcacgttttcttagtactaaactttgcccgtggaaagtctcccattcttcaaggctgggctcaaattccacatccttctcgaggccttccccgtgattcctccctccataaacttaacaatccattttcctgaaccccatcacatctgtttgcagttcacccgcaagcaggcgctttatattctttagcacgccacctggtatctcaaagagtctttgtgcacaacaaccattgcctgaataaacaagaaaaaggaactgtaggtaggagcttggtgagacaagtaaagaagatggagagtgattaaggataatggagtaaaaatatcacaaagggttctcaaaaagcagggagtgaaaaatgagtactaaacaggctcttcgagaaaagttttttcttgggctgcctttgtgcagcctaggggcagctcacctgaaccagaagtcccagccagcctcttccggggtctcgacatggtcacgctgcaggggactttagtgcggacgattctggaatcaacggagatacaagaaagaatgctaatgtcctccaaaacccgcgcagagcgagatggaggcaacgagaggcagcctagaacgtctccaacttttgcgaaacacagacgcctacgtttgagccctcaaatccttccctccgttatctgcgccatttccatctcgcataacctgcccctaaactcttctcggttctgtccttggtccttctcatccaggaacccctatctcagtatgtagttcactgggaagtggctccacagagacacttttgttgggtgaatataagtaagccttgtgttaccttgttatccttgctaattaggatcaactgaatggataatctagatgatgaagtaatttgctggctacagacccaacactctgcagactcgactgcggtccgcctccgctgcgccgcaggctgtgcagcgcgacccccgcggcgcttggtgggcggtgcatctctgcggcgccgaggccccgaggacttctgggaattgtagtcctgtccccttgggagcccgcctggcacctgggttgttagggctcgtgggaggactacaacccccagggtgcagtgggacaggcgttgccgggtcgcaggtcccgccagtgcgagcgcaacggaggtcgaaggcgttcagactcttagctgaacgcggagctgcggcggctatgctgtggagcggctgccggcgtttcggggcgcgcctcggctgcctgcccggcggtctccgggtcctcgtccagaccggccaccggagcttgacctcctgcatcgaccgta

SEQ ID NO: 8697 - DNA, 2300 bp, Homo sapien
agtgctggggttacaaaaataaatatgatccagccaggcgcagtggctcatgcctgtaatcccagactttggggaggccaaggcaggtggatcacttgaggtcaggagttcaagtccagcttgtccaacatggtgaaaccccgtctctactaaaaatataaaaattagctgggcatggtggcatgtgctgtaatcccagctacttgggaggctgaggcacaagaattgcttgaacccgtggggcagaggttgcggtgagttgagatcgcaccactgtactccagcctgggcaacagaaagagactccatctcaaaaaaataaataaataagatccattcacacaaaggatgactatttcaatcctagcaagagctcattaaatgttaacaaatcttcttcttctgtaaatggctacttcctaaaacaaatagttcaaggaaccacaggcttaagaaataaatctgagttgcattctaatggaaggaaatagttttatgcaaatcatatgcataagtaaacacaagttcccagaaggaaatacagtataaaaacaaaacaaataccaccactcatgaactttgccagttactagcagagttcaagatgccaatacatagttactagcagagctcaagatgccaatacatatacactaaaaaggtaaagctaaatagaaaaacactccaaatgaaatgggaaaagcctttgactgcagagccactcaagtgtaagcaagatgcaaacaataacaaaacccacctctaaataattccttatctgcttcggtatcaaccagggtaatctgggttatcaaattctaagcgctaggccagggcagcacctcttgaatgagttttaggacattcagaagaaaacagtattctatgccttactgtactttatagatctgatatctaagggacttattctgttgtaaagaaaactgccatttatttaaaataaatttaaaaatatttcagaagaaaaaagtgtttataaacattcttggcagagaagtcacaaactggccgggtctccaccactcctcgctacattcaaattactgttcagagcctaaagacactcaagtttgtcagctctggtagagtttcccactggcaataataattatttttcctgcatgagtttcaacactaaaagtgtcttatagccagaggtgttaagataccaaatctttgtgtgtgagcaaatcttgtatgacctggagttcttgtgcagttgtcaccatcagcacccagccagcttcttatattctcactgcttttatgacctactgttatgattaaaaaccaaccaacccaacaacaaccaagccccaagtttcttcacttctctaagcatccgagggtgaccggccgcaggaggacccgggccggaggggaacctgcggggggatgaccggccggaggggaacctgcggggggtgaccggccggaggaggaccggggcgggggtgaccggccggaggaggaccggggcgggggtgaccggccggaggaggacccgggcaggggtgacgggccagatggggacccggatggtggtgaccgaccggagggggcagccaggccgggggtgaccggccggagtagggagccaggccgggggggtgactggccggaaggggagctgacgccggggtgactggatggaacggggagactgcagcccctcgcggacatatgtccgccggggttctggacacctgtcctactgcccgccaggagatccttacggtcgatgcaggaggtcaagctccggtggccggtctggacgaggacccggagaccgccgggcaggcagccgaggcgcgccccgaaacgccggcagccgctccacagcatagccgccgcagctccgcgttcagctaagagtctgaacgccttcgacctccgttgcgctcgcactggcgggacctgcgacccggcaacgcctgtcccactgcaccctgggggttgtagtcctcccacgagccctaacaacccaggtgccaggcgggctcccaaggggacaggactacaattcccagaagtcctcggggcctcggcgccgcagagatgcaccgcccaccaagcgccgcgggggtcgcgctgcacagcctgcggcgcagcggaggcggaccgcagtcgagtctgcagagtgttgggtctgtagccagcaaattacttcatcatctagattatccattcagttgatcctaattagcaaggataacaaggtaacacaaggcttacttatattcacccaacaaaagtgtctctgtggagccacttcccag

SEQ ID NO: 8698 - DNA, 2300 bp, Homo sapien
gtcatgtgccgaacaggaggaccaggccccaagggcatctcatgcatagttgttgagaaggggacccctggcctcagctttggcaagaaggagaaaaaggtgagtggctgttggacaggaaacaattcaggttatgagactctgccacctgccagcccaactcctgctctatttcagaaaacaggtttgcatacttgctaacctacctttgaagcagttgcttctattaggattttcaacaggagcatatgaaatacaacagggcattattaaacactaggcctctggggaaagtgacaatgtttgccagtaaattcttcaagccacctgtgagtgttctgacctctcctgcctctgcttttggcctgtgttccttatccagctgcttacgttggtgcactttgttgctccaggaagagacgcttagagaagacctggtgttggccacaagtctcagtaatggaaggcgtgtggtcccttttgcttctttgattaaaaataaagtaaaactcattggagatgattgtgggtatttcagcaacccaagaaggacacttaggtactgtaagtaatttgaaaagtaagatacttctaggattaagagccgccatggccagggcatgaacaggagacttgtgatcatgtaaccgtaattggtaataagggctcaagacccattcagattttttagaccagatgctcaaagcagtcatctctctctagtttgtactgttatggggggactttgtgagagaaggcaggtaatgaaatgacccctaagtgtacctctttctcacagctcctcgggtttctgtattttcctacaggatccttcctgatcctctgtaactgtaaggcattatgcattttagcatccccttctctttggtaacacagcaaccatttcctaggcttctactgtgtgtgaagcccatgctaactcctgggcaggaagaccttcagtaaaaggcttagaaatggagtttatcctatcaacaaaagagagcaaggaaatgatgtaaaggcagtctattttcagagccagagaggaactgggagattgtagatagtttgtggttttcaattagaggcactgaaattgggggcagttggtgtcacaatcctaaaagaagttgtgagaagtgtttgtaggttagtcaggtagagtagacattagtagattctcttaataagttagaaaatgtttagctgaaacaggtatctttctgagtgctgacaggcctttaaacctgaactttttctttttcctcattttaagttcttgtgggtctaagtcttgggtgctgaaacccatacctcacaggctcccgtccccagggaaggccgccctacctgctggattgttgggcaaccacgcagtccctgatttttgccaggtggggtggaactcccagccaacacgagctgtgatcttcgaagactgtgctgtccctgtggccaacagaattgggagcgaggggcagggcttcctcattgccgtgagaggactgaacggagggaggatcaatattggtgagatacgcaggggtgtggcagggaggtagcggtccgggacaggcactgctgttttccagcttggttggaacgtcggcgctcttcccctctagcttcctgctccctgggggctgcccacgcctctgtcatcctcacccgagaccacctcaatgtccggaagcagtttggagagcctctggccagtaaccaggtaacctctgccttgcctccacatggctttgcactatttgcagcccgggacctgctctagggcccacatttccaggagagaagccaggaaattcctctgtcagtcccaccactgtcctagccagagcttgtgctttatttctgtccatcttttcttgggatatctttaacgatattaaagtgtcgggtgagtgaagtggacttagcacttaaaagcaataaatttcctctatagaaaaagcaagagactttgaagctttggatcacttagaaaaggcgcctccgagatgtcttaccgaggctcctgcaccaggtgctggtctaagcccctcagtcttgtctggttctctgctccctgtgctgcagtacttgcaattcacactggctgatatggcaacaaggctggtggccgcgcggctgatggtccgcaatgcagcagtggctctgcaggaggagaggaaggatgcagtggccttgtgctccatggccaagctctttgctacagatgaatgctttgccgtaagtgattcctctggctctcctgggatggacagggaacagctgctaggcccagg

SEQ ID NO: 8699 - DNA, 2300 bp, Homo sapien
gttggccttgtagagttacttctgtaatctcaagacagaaactgacagctttgtttgatcaaaattgttacttcaccttgcacattttcaagagttctacaggtttaatgagcacagaaatctgggggaactttcactctccagggctccttcatagaggttctcaaatactccatcagcagaggggagccccagatggcaaaaggacacaggatatgtcatctttcaaatgaaccaataatccattatttgattcttctacctttgtcaaaattcctccagcaacgcctgcagaaaatcacaattcttgatacatagcttgttccaataaagcaccacagcatttctagtgactgcaggcccagctgtcaaactctttcaacttgatagagaatatgtacacaaaacctatagctgtcatcatacttaatagtgaaaaacagaatgttttccagctgacactggggacaaggtaacagtgtcagttcctgccgctcttattcaacacagaaattttagtcatcatactaagacacacaaaaaaaggaataaaaagccacgcagactggaaaggtagaaataaaactctccatatttgcagatgacatgattatctacatggaaaatgccaagtaatacacaaataacctcttaaaattaataggtgagtttgccaaggtcacaggatatgagatcaacatgagaaacacaatcacatttctgtatgctaacaacaaacatgtaaaaactgaaataaaaataataacagtttaaatctcttgagagcaaaggaaatatttaagtataaacctaacaaaacgtgataggatctgatgttgaaaaaatcacacaattctgatgaaagaagtgaaaaaaaaaaaactatttaaatagacagacataccatgttcgtgggttggaagattcaacataataaggatacaattctcaatttgatccataggttgattgcaattcctctcgaaataccaacatggctttttgtagaaacagacaagtttattctaaattttatgtgggaaggcacaagccctagaatactttaaacttgacaaagaagaataaagtgtgtggctgtaaaaccaaactgtaaaaaattaacagttcattgcttgcagtcgaaaaaatgaggaaaagatggacgatctaggaaactttcagggagctaaggtgtcggagagcaaagtatccttgtaaggaatgagacaagataaactccctcccccacacacagtattttcagagaactacattcttggtttcaacctgatgtcataggctgtgttctttgcaacggaagaagcaaagacttcaaagggagaaatcggaagatttcttttttcatcgtagggacttcacatcagcgtttccaaaaccgagtccatcgccttttccctctgcgcagcctctatcccttcctgtgtttcgcatctcaataaacgtccccgccaagtgacttcagcctgaaacatgcggcctcccggactcctctctgtgtcaccgacctcttgcgctcagttctccggagctgccggtttaacctcgcaagtcttcccggaacccgtgccctcctcctgggcagcgttaccaccacgagcgcctacctgagaggacgcctgttctcatccagcctccaccctgcagccgagcaatctccgtaaaacgaacacctggcttagtttctgctggaaaccgttgaatagtccccactgtcttctggaagggtctgggcagctcggcgtggcgtccacggccccaccaggcctctgcctcctgcaggtcccgctacttcgtcaccaaagcgcccgccgcgctcgcatctgctgtgaggctgtgctcgggccgctcccgccgagggaacggccctcccaaggctctgcgccccaattctcgctcgtttgccaagaggtagccgtgtcggggagctagagttctccggggactctctcctgcccctcgtggccctctgtggaaccctcgttttaggatctgcacgccgtttccagtcgcgcgcgcggcacggagaccgcccgctgtgccccgcgctgcgctctctccgcccctctcccgcgcaggcctccctgtgccagccggctgtcgacccaggttaggaagcccgaggtcggggcgttaccccaagggccctcccgcttcccctccgagggcagagaggcgtccgcgcccggacgcactgcgggaacacctggagcgccggcggagctcggctgtccccgcgggagggagcccgacgcgcatccttgggacccggacccggcgcc

SEQ ID NO: 8700 - DNA, 2300 bp, Homo sapien
ggtgtggtggcgggagccataatcccagctactcaggagggtgaggcaggagaatcacttgaacccaggagggggaggttgcagtgagcagagatcgcgccactgcactccagcctgggcaacagagcaagactctatctcaaaaaaaaaaaaaaaaaaaagaaaaagaaaacagaaagaaaaaagaaaggaaagaaaaaaagggggagagcaggatgtattcaagaagaaatagaggacatgagttaataaccattcaaagagctatgtcgtccccaaacccttcacctcacaaaccacaaaagatagtagtcacagagtttacaggtgaatcttaagaaactttcagggtaaagataattcttgtgcaaaatatttccaataagtaagaaaagaagatttactcactttatgagcttattataagattgattcaaaactggacaagaatactaacaaaataaaattttaaatccgttttgcttataatcataaacacatttgaaataaaacactagcaaataaagtctagcaatctgtgtgtatgtaatgtgtgcctatctcagagccaagcagagtttataccagtaccacatggctgcttgactatcagaaaaattgccgttgtaattcagcaattcaaaagaacagtgaagaaaaactatattgtccccccaatacatgcagtagcagctctcaataaaactcaacgattatttctgattaaattctttgcattttaaatgaaccagtttactgcctctcagcttcaaattcacccttcaataccagctctgcaataaggcacagggccctctaagcatcttctcctttacagtgagtgtgatggtaagcttgccacaaaatggtggtggcaggccctcaggaggacagggcctctgattctggagcagttttgcttttttgtggtcatacagggtggctggtcagttgtatacaggcatgaggacgaccgtggtgttcccttttaaagggtgaactgcttgagtccaggagtttgagaccagcccaggcaacatggcgaaactccatctctacaaacaattcaaaaaattagcctggtgtggtggcatgcacctgtggccccagctgttcaggaggctgaggcaggaggatcacctgagccagagaagtagaagctgccgtgagctaagatcgggccactgcactccagcctgagcaacaaacagaacaacaaactgtgtctcaaaaaaaaaaatttttttttgttttaaaaacatgcatgtatctgtaagtacatatttatctgtaagtgtgccttaagcttatgtcattaaactgagtgctcccaagggcgcctggtgttccttcattagacagacagaatcctgaggaaataacctcctcccttgagattctcccactaacccctatccaagtctttgatcacagagcaaactcagcatgagactaagtgacagctggacgcttaagcattaaatgtatgtgctggaaacgactgtgcggaaggtaagtcctcacgctgggcccccaaaatcggaggctcaggttcccggccaggatgcacttgtagggtaacgagatcctggaggtgaggggccggcactcacgtggtgacagtattgaagccacaggccttcagcttcagcaggcggtccctccagtactccctgggcacccggaaatagtggatggagcccccgaagatcaggaacttgtggccctccagtgtgaagtggggcttaccccgacctgtgctttcagttccaagtcccacagatcgattcttcagctccagaggggtcagatgagaccaattaaacctggagggggcgggcgagggaaagaaagtggaaagggagagaggattcgggagagggctcggaggcacggctgaaaccctagcgaaaagaagtttttgttagtaggacgtgttctgtgcatatgttagtaggacgtgttctgtgcatatgttagtaggacgtgttctgtgcatattcgcgatactattttctccaagaaaggagagatcgctcccctccctccccagggatgtagctctcaagcaaacctaggctgggacggatgcgctcttccaagcatgaagttctcttcctgcttaaaccgaggagcaaaacctgatgagataaatggcaggaaaaagatgcccgccattctcttccaggagagacacgggctgaaaggagaaaggacaacagtgacaaggggaaggttccggccccaccgggctgcaagggccgggaagctgtgccgggggcgctttagaggccagagcc

SEQ ID NO: 8701 - DNA, 2300 bp, Homo sapien
ctcctgggttcacgccattctcctgcctcagcctcccaagtagctgggactacaggtgcccaccaccatgcccggctaactttttgtatttttagtagagatggggtttcactgtgttagccaggatggtcttgatctcctgacctcgtgatcccaccacctctgcctcccaaagtgctgggattaaaggtgtgagccactgcgcccaacagcattgccttttttatggtgtacccagacctcatgcacttgataagaaacgccttcatttttaccatggcaacctagagcacacagtcaggtctgtgacaaaaaaagaacattgtactgtgcggtctacaagacagcattgtttgatcattgtaatttttttaaatttaaacaacataactcttccaaaagagaagatgcacttggatattaagtaaaaatagttcaaggacacgtctcttgatgcagctcgagatgggataaaaatctagattatggcctggcatggtggctcacggctgtaatcccagcactttgggaggccaaagtgggaggactgcttgagcccaggagtacaagaccagcctgagcaacatagtgagaccacaactctacaaaaaatacaaaaattcgagagcgtggtgagcacctgtagtcccaactactcgggaagctaaggtgggaggatggcttgagcccagttgcagtgacctgagatcgtgcctctgaactccagcctgggtgacagagcaagaccttgtctcaaaaacaaaccaaaaaaacacctggatttttaggtagtagtaggctgatatcttactcttctgtttgggagtaaatatggcaaacatatagatctaggcctttgtaactaatttggaatcatgaattgtgagttctgtttttttttttttttttggagacggagtctcactctgttgcccaggctggagtacagttgtgtgacctcggctcaccgcaacttccacctcctgggttcaagcaattctcctgcctcagcttcctgaatagctgggattacaggcaccaaccaccatgcctggctaatttttgtatttttagtagagatggggtttcaccatgttgcccaggctgatctcaaactcttgacctcagatgatccatctgcctcggcctcccaaagggctgggattacaggcatgagccacagaacccagcctgtgagttgttcttattaggataattataaagagaagaatcgagggataacaaaggaagaatgtgagagagagcttaggaatggtgttgctgcaatacagttttgagagacgggcactgctgagaggaagaaaaccctgtctttaggattaaactctggctccgttaggtggagttgaggtacatcttttgtttgaagggctgaagctgtatgtgtctgtttgcatttctgcaatctagatgggactcagtggcaggagtgagcctcaaaaccagaaagactggtggccgggcgcggtggctcacgcctgttaatcccagcactttgggaggctgaggcgggtggatcacgaggtcaggagatggagaccatcttggctaacacggtgaaaccccgtctctactaaaaaatagaaaaaattagccgggcgtggtggcgggcgcctgtagtcccagctactcgggaggctgaggcaggagaatgacgtgaacccggggggcggagcttgcagggagccaagatggcgccaccgcactccagcctgggcgacagagcgagactccgtctcaaaaaataaataaatacataaataagaaatagacatgcattaaaataatagataggtaggctatataatacacagaaaacatttatacaaaattaatgtccaggctgggagctgtggctcacacctgtaattccagcactttgggaggccgaggtgggtggatcacgaggtcaggagatcaagaccatcctggctaacacggtgaaaccccgtctctactaaaaaatagaaaaaatgagccgggcgtggtggcgggcgcctgtagtcccagctactcgggaggctgacgcaggagaatgacgtgaacccgggaggcggagcttgcagggagccaagatggcgccaccgcactccagcctgggcgccagagtgagactccgtctcgaaaaaaaacaaaaacccagaaagactgaatatttggatggaagttttaccagaagcacaaatgccgttcacaggcacatgtatgcaacgaggaaagctaatttacaggcatcccattgaactgtgggaaatgctaggaaacttttaagaagcaag

SEQ ID NO: 8702 - DNA, 2300 bp, Homo sapien
acccatcttcctttttgctttctctcctcccagggagccagtatagatgcaggactgctctcagatgcctcacaagcagcaacttcttcctccttatagttcttatctgtgattcttccataattttgtccttctaagcttctgatgcactgaattatgtaaagtgcattcccttcaccagcttgtgcaccctattctgtaactgataataaatggttggtattgcactatagagtatgcttcttacttaggagaaatttgtgctgttagtctttcctaaaatcttcgacaaagagcattctctctctacgttttttgaacccctgatagaccttcaatgcttttgcgcttcttcctcctcatttatattttgaagtttcagatgactcttagcttcacagaggatgttgtttgtgtttccatttctcagtccttattttgatttggaagatttccaggaggagaatgtcaagcccacagtacaattttaacaccagaagtcagtctttcctcttgaatacaaatggaaaattaaggatctgtatttatttaataaaatttcacaaagagaaaataattaaattacaaataaagaagaaaatggaaatcagggaacatggagttaattcaggcaacaaaatagagtagtaaaaaggcttattaatatgcatagagatatgaataagattatacctgaacaagagtgggctgttaagtaagagggacaatcagggaaccaaaaacaactctttgaaattaaaaatctaatatttgaaattaaaaattaaatatagaagttggaaggtaaagatgatcaaattccctaatattactattagtataagcccacaaaacagaaaagagacaagataaacgtcttataggagtattgtaggagacccaacatcttattaatactggttgcaaaaagagtggacaaagagcatggaggaaaggaaattgcaaataacataagaatttcctttaactgaagtatctatatgtccagatgaaaagtgtacctcaaatagtaagcacagtaagtgatgaaaaagacctaaattgtgaaattagcatcctacagagagaaaaaccacaggtttacatgccaagcaaaaacaattagaatggcataggattataaaatattggataataggaagcaatggcatatgcctttaaaatttgaggctaaatgaattttaacttagaattttatacccaattaataattttaaatattaattgtgttgatagccagacatttaaggactcagaatatttattttccactcatcttttctatggaagtgtttgaaggatgcaggaaatgagaaatgaaaccaaagtagaagagaacataggatctggaaaacatcataatccaaatccagggagcagctaacaaaagtcctaggttgacagatctttgggcttagagtgagacaatcttagagcagcagcatgccagaggactccaggagtgcagctgaaaatgcatgctgagtggctgacatatcacccagaagaagctcagctatgatcttccgttttaatatccatggcacagcaacagccaggcctactgtagaggaggtgtcaccttttaaaaacagaatctacgttattcagcagcactgaaaatgctaggctacaagtggaatgcaggtgtcaggctgaaagcctgtggcatctgagtttctacataaggaattgcggtcaggtcctcgtgtatccaaaacccattctttcaacaccagccttgggtgagacagggttgaaattgctgatggtgctttccgggtatagtagggaggcacatgaagctggagaccatggacgtttaggagtggaggaaccagagctgtgaatgacggccaagggccgtgggggaagaaatactggatcaaaacgggaaagctctgaattgggaaaaaggagaaacgcatgagttccttagttcccatctattgcattcaggttttctgatttttcttttttgttttttgccagacttagtatttgctttggtttgtttttagagagataagccccttctgattatggaatactgggtcggctggttcgacagatggggagataagcaccatgttaaagatgcaaagggtgagtgttttgcagtgtttgactccaggaagagatggccccaggtcccatgagaactcattcatacagttctctgctaattgattcacttgatcagccgtagatattcatgcaacttttcacatacaagcactcagccaggccctgaggatgctctggtggatagaaattac

SEQ ID NO: 8703 - DNA, 2300 bp, Homo sapien
tctagcagtgcataggccctctctatggcattgtcaactaagcactaataatagtcaggggacaacatgcagcgatagccaagagcatggatcttggagccaaagagatcaggttttaatctcagctctgcagcgctagccatgcgctagcttcatgcaggcttccttcattttaattctcagtgacctcatccaaacgtgaggattatcataaaaccaacctcatgaggctggtgtgaggatcaagtgctgccacttagagcaatgcctggcagtcgtttacttaataggcatttgtgtctacagaagatatttcgaaagagctgttatgaaaacaaggccacttgtatctgaagtatagaaaaacattgaaaaatacttgggaactgagaaaagcctgttttaggttgaaaaatagaaaaaaagtcaaaagaaaaatgccactattaccaccaataacaccaacaataataccatcactaccaccaacaataatgccagcaacaataccaccaccatcatcacatcaccaccacaatcaccatcatcaccaacaccaccaccagcaccaccaccatcaccatcatcaccatcaccactaccaccaccaccatcaccatcaccaccaccaccatcaccatcaccaccatcaccaccaccaccaccaccaccaccaccaaataccaccaccaccaccaccaccaccactaccaccaccatcaccatcaccatcaccatcatcaccatcaccactaccaccaccaccaccaccaccatcaccaccatcaccaccatcaccatcaccaccaccaccatcatcaccatcaccaccaccaccaccatcaccaccaccaccaccaccaccaccaaataccaccaccaccatcaccaccaaataccaccaccaccaccaccatgtccaccaccactaccaccaccatcaccatcaccatcaccaccaccaccaccatcaccatcaccatcatcaccatcacctccaccaccaccaccactatcaccaccatcaccatcaacaccatcaccaccatcatcaccaccaccaccaccaccaacaccaccaccaccactaccaaataaaacttttctggtctcttgtatggcaggcactgtgccttttttccacatatattacctcatcaatgaattttctcatcagtcccatgatatagctggaattaatacattcatttaacagatcaggaagcagtggcgttgagaaagaaaataggttgccccaggtcatacaaatagtaacgagcacagccagaattgactcccactctaaatgacttttaaccttcttcttcccactgtggccagtggagagatgattgcagctgtttaaacacagtacaaaatggaagttttgtggctaaagattaagagcaaccacttgtggactatggcggtgtttccaagtcagtgttcccagaaacatttcactggaaggtagtaatgagggtgtactaattatatgtatgatttcaaaaaacttaaggaaaattagatatttaagtgacatgagggttcttaggttattatttaatagatgtagtttagagtcaaattatgtcaatattttggaaaaaaagtgttcaaaaatctcttgggattgacaagattcggtgtcctagagtagttctggccaattctgcctatttttttgttggaatctttgtagaggttgaatgataaaacatttgcagtaggtctttaacgtcatcaataggttcttggaaactaaacaaaatgatgtacagcatatcctcatataatactgttttcttcaacattgtttcattataaaattgagagaaaaattgtttttttttttatatcattttacttaaagtctccattcccaagaatgtatatagccgtgaagcgaggagttactgtaactgattgtggagtggggttggaaaggataagagtttgccagaggcttctgtctcctcttaatttctaacattctctgtgttctcatgttcccctttgcagaggttgaacatgctgtgtctgaattcatcaaatatgagatctccttcaatgtatatatgttccatggtggaaccaactttggtttcatgaacggggccacatatttcgggaagcactcgggcattgtcaccagctatggcaagtgtcgctggtgtagtagcctctccagcatgggcggtgctggggctttacagaggaggctccggaagcctgttctggcaccactgggttcttgacctataatctatgctgagtactgaagattttcctatctactt

SEQ ID NO: 8704 - DNA, 2300 bp, Homo sapien
ttagccaggatggtctcgatctcctgacctcgtgatctgcccccctcggcctcccaaagtgctgggattcaggcttgagccaccgcacccggcctaatgttttaaaaaacaaaagtctcaggctggaaatggtgactcacgcctgtaatcccagccctttgggaggccgaggcaggtggatcacctgaggtcaagagtttgagatctgcctgggcaacatggtgaaaccccgtctctactaaaaatacaaaaattagccggggaaggtggtgggtgcctgcagtcccacctattcgggagactgaggcaggagaatagcttgcatcccgggaggcattgcagtgagctgagattgcaccactgcactccagcctgggtaacagagtgagactctgtctcaaaaaaaaaaaaaaaagtctcagcctatgagcaagacgcatctcgggttagtgctaactttgtagcattctgtggtatcattaagcccagataaagtaaaattgttcctagactgtgagcagggtgtgtccctagttctgaacatcccacaaggttaaggggaaatttttttgaaaacactcagttatgtatatttttctcgcacaaataaaaacgaaggatacaagggtgggccaaggagttcacggttttcacaacccatgttaagtttttgctaacgtttgaagaaaaatggagatgcttgtattgcttaaaccatttgagaattcccttatatttgatagattctgccactgttcaacgtgaccagaagtgagaggatgaatgtggggtgcatgtctttcggatggtcccctgcaggcaaaggggctagcctttgacaatttctccacacgcttcggggctagctggtatattccaattaaaccaacatgtttccatcacagacttcatagccatcaagcaatcatagccttacccaatggagaaaaggagcgggcttggagcgcgtccacgggagtgggcctccctctgcgcgcctctgggaatgtttgcggtgcttaagtcagacccggattgctccaagcccagcttatcctccccagttctgccagggtttttttcctcttgtttgttcgtttgtttttgcctctctttgatttaacttttgctccttgactaaatatgtgcttaacgctagacaaaggacacttcatacccaagtctgtgtctttgttccaagatctgcaatttcatttggttcctgtcggctttacaagttcaaaactatgcccccgtttaggaaatgaattcaaagcatgcggcaagggagacattcgacaaacccggatgctctggaaaacgttgcccttcctcgagtttctttcagtaaaatctgaattttgttcccgggaggagttgggtttgtgattgctacagtgtaagttgcaccgaaatactacatcatgttctttgggacatacattctgtttcagaataagaatgatattcttcctttcctaaaatgtgagagttttatatggacctttttaaaataaaaaattggaagcccttggagtcaaggccagagtaagactcgcagaaaccaaagacagaaaatatttggaaccccccctcctcagacatgaaccacactgaaatgtgtccagatacaattcttcaaaatcctggcttttcacaggatgatttgttattgaaaaagttgtttgcttcagaatctgaattgttttaaaagattctgttggttgcccctgctttgcggacgccttttgtacgttcttcctgatgtagcgctgcgaggggcgactttacctcggcgtttgacaggtacgcagcattcccgcacccgcctgcgcctcgcgagcagaaagacggcggactctgcaccgctccacgacactggggacccgccccggccagacccgtcccctaccgagaccttgtccccgccccgcccccggccggggccccgccccgccagccccgcccccgccagccccctctcctaccgagacctcgtccccgcccaccagccccgccccgccccccccccgacagaggccccgccccggccccggccagccccgcccccgcttgcgcgaggcctagggctgcaggcgcggagccgcgagccccagccaatgagcgccggcgggccggttgcccaggcgaccagtgcgcggctccgccccccgcggcgaggctcccgcgcgcggctgagtgcggactggagtgggaacccgggtccccgcgcttagagaacacgcgatgaccacgtggagcctccggcggaggccggcccgcacgctgggactcctgct

SEQ ID NO: 8705 - DNA, 2300 bp, Homo sapien
agccatcatattggatttttgggctaaagaaggtaatgtgagaggtgaaatggaatgaatgacatgctctagcctataattatcatttctgttgcagctatgttccgtggaacctgcatgagccagaaagaggcaaatttgacttctctgggaacctggacctggagtatgtggtgttgctgcttctgtgaactggccaggggcagggcacagaggtggctactggggtggattagcaaccaaagagaaccagggagggacgtgggtctggagtcctgttctaggactgtgagaggccctgcacccaggacccagacgctccccagtcgtgacctgtcacccagagggactgggcctgcagcctccgggccccacctctccactgcagcccagaggggcagaagaccctgggagccgcccgactctgcatggggtccggccgctgggctggggcagggcggcccctctaggctagcaaggctatggggtcaggttcactgttgagaccactgagccctgggtgtcacccttcctcctcaggcccccgatggggctgtgcagaggctctgaggctgggagcagctcaggccaccgacctggtgtgggagtccccgcgctttgggggtggggccgagccgtcccttcgccccaccaggcagctcctccaccctgtgatgcgcgtggcccccacccggcctcatcctgggccgtcgtgggaggggctgacgatgtggacctccctagggccttcgtcctgatggccgcagagatcgggctgtgggtgattctgcgtccaggcccctacatctgcagtgagatggacctcgggggcttgcccaggtaagcggggttgtgaagggtcctgtgtgctgtggcaaaaagctcacagacataggtctggtttgtttctgtgttccagttcccattctgtactgaattgtgttccagttcccattctgtactgaatttccttttcaggaaaagcagcacccagaggggatcgctttcagtgatgctgcagtgagtgccctcacgtagccatgcatgggctgcttgtgtgacaggcagcagcagggctggccctcctggcatctcatgcttcaggactctgctgtggagctgtgagtcctggcaggtcattcacctgcgtgtctgcagtatgggaaaaatccgaccttccctgtctgtttcttttttttgagacagagtcttgctctggcactcaggctggagtgcagtggtgtgatcttggcttactgcaacctccgcctcccgggttcaagcgattctcctgcctcagcctcccgagtagctagggttacaggtgtgtgccaccacgcgcagctaatttttgtatttttagtaaagacagggtttcaccatgttggctaggctggtctggaactcctgaccttgtgatctgcccacctcggcctcccaaagtgctgggattacaggcatgagccaccgcgcccggccttccctatctctttcttaggaatgttaccaagcatattttgaaaagtccaagtattttgataaagtataagagaaacaaattcttgttatggttttgtcttcctatctcggcccacgtgtgtcatcttcccagtgctagtcttggctgagtttggtgttctgtggttggagtggaaatctggacaggaatcagctgggacttcattcattcctcatcctcaacattgtggcctttaagattttcttgttaactggtgtaacctttctcagcctcccagtgtaccaggtggttagacccagactgcctcagggaagaggctgatccttgtccccaagccgtctcccctcccctggtccctggggagccctgggcttcttttcctcctggtttccagcatgacccgcccttccctcgggggcatagcttctgtctccactacccagggccacttctcaggcactgatccatccagcctggtaggctcaccctagtcacgaacacagccagggcagcctctcccatccctgtggattagaaagctgtgtgccaccgtcagcgatttcctcggctcagccggggccgggcacaggaggacgaagggtttaacagtcttaacttagaagcagtggggagctgtggcactcagactcccccttctcaccccgcccatgtggcacctggccatgcatgagaggggcatgtgggcacacctgcggagggggcgtccgggcgtgagtgagaaggctaacctgtcaggtggggttagaatgtgggggtgtcggtctggaggaaactgctctctcctcaccccttgtttgac

SEQ ID NO: 8706 - DNA, 2300 bp, Homo sapien
gatgctgcagtgagtgccctcacgtagccatgcatgggctgcttgtgtgacaggcagcagcagggctggccctcctggcatctcatgcttcaggactctgctgtggagctgtgagtcctggcaggtcattcacctgcgtgtctgcagtatgggaaaaatccgaccttccctgtctgtttcttttttttgagacagagtcttgctctggcactcaggctggagtgcagtggtgtgatcttggcttactgcaacctccgcctcccgggttcaagcgattctcctgcctcagcctcccgagtagctagggttacaggtgtgtgccaccacgcgcagctaatttttgtatttttagtaaagacagggtttcaccatgttggctaggctggtctggaactcctgaccttgtgatctgcccacctcggcctcccaaagtgctgggattacaggcatgagccaccgcgcccggccttccctatctctttcttaggaatgttaccaagcatattttgaaaagtccaagtattttgataaagtataagagaaacaaattcttgttatggttttgtcttcctatctcggcccacgtgtgtcatcttcccagtgctagtcttggctgagtttggtgttctgtggttggagtggaaatctggacaggaatcagctgggacttcattcattcctcatcctcaacattgtggcctttaagattttcttgttaactggtgtaacctttctcagcctcccagtgtaccaggtggttagacccagactgcctcagggaagaggctgatccttgtccccaagccgtctcccctcccctggtccctggggagccctgggcttcttttcctcctggtttccagcatgacccgcccttccctcgggggcatagcttctgtctccactacccagggccacttctcaggcactgatccatccagcctggtaggctcaccctagtcacgaacacagccagggcagcctctcccatccctgtggattagaaagctgtgtgccaccgtcagcgatttcctcggctcagccggggccgggcacaggaggacgaagggtttaacagtcttaacttagaagcagtggggagctgtggcactcagactcccccttctcaccccgcccatgtggcacctggccatgcatgagaggggcatgtgggcacacctgcggagggggcgtccgggcgtgagtgagaaggctaacctgtcaggtggggttagaatgtgggggtgtcggtctggaggaaactgctctctcctcaccccttgtttgacccacagaaatgggataatttcctgaccctgtttaggacttccagaccagggcaagaggagcctcagagccttttgttagaaaatatgtgtcttctcagaacctgaagtgagaaggaagagccctgactccagctttggaaccaatccacgctgctgtgttcctctggggagtttgggatcatagcaacagggtggagggagaattcaactcttgctcacctgctgctctgggctgtgcgccactgatgccaaggcgttagccacgttggcaaggatggggactgcctcctgctcagcccctcgcagtctctgtcaggcttgttttttggggtgacgctagaaggttgtgtctcctccttccacagcctcagtgattcctaacccttttgacttcactttttgaaatgggatcacagagcaagttgttgaaaactaggcctggagtcctgtgaaaagcttttctcactgctggcagccaggccctgtagctgtggagctggaaatgaacttccaccaggctgtgtccttggggagggaagctgcaggagtgcgggtgggtgctcgccccagaatcggtttgcattgtctccccacttctgggctcagtggggtggaggagggcacaggtcattctggagcactggggggcctctcccttctcacgcatcaacagcctgctcacagcaaacccactgtgacactaacatccttcctttcccccgtttacacttcaagctggctactccaagaccctggcatgaggctgaggacaacttacaagggcttcaccgaagcagtggacctttattttgaccacctgatgtccagggtggtgccactccaggtacaagcaaatggggtcttctttgatcttggtctgtcttcctctaggtcgtggatcatccttggttagttctcagaccaagggtcctccagtgttttgaacacacgagcaggctcttcctcaccgtccgagactcgtaactgaggggcttgcaagagttgtctttg

SEQ ID NO: 8707 - DNA, 2300 bp, Homo sapien
aaagtcagtattcagaaagaagatttaagatttgttgagtggcccagccaaggtataaatccaaactgtcagtgcagaacctgcaccatgaatagctgtgctgtaaggccctgattttctggttcagaaaatgctgcaaactgctgtttaaactgagttggaccttgaagagggcccactctgcagcgtctgatttttctgctaatggagccagtacccagggtgggggggagggatctgcatccacagtatccctctcagatatggagttgtcctgggtaaaacatcccccttccctggaagaggacaggcaaagcttggcttgatcctggaccagtgtcttcttgctaacacgtatgcaacattaaaaccatcagggtttgccatatcgactttgggagctttatctgctctatacctgcaggaggccacatgtggcaggagaactggtgtgcaggcgaatttggccctcacctatgccccacctccaaagacctctaaggcagtgggtatgcagacagggaagagtagagagggcagagatcctggggctcccctccatgaagagcttccctcttttttgtctggccagcctgcttgtctaactctcattttgtggtgtccaggggactcagcccaagatggtgatggagtactggacggggtggtttgactcgtggggaggccctcacaatatcttggattcttctggtgagtgcttgcggtgactacatccagaatgtgtgctacttaagaagtgaggatgagtttcagtcacctgctaactaatgtaagccatagggggtgcaaggctgctgggattatctgtgtgcagaagttggctttggatattcctgagtcatttgtcttgacacttggatgaatgggagggcttttaacattgcttgttcgtgtttttgtaattagaagggtaatgcatgcctattgcaaacatccagaaaatacagaaaaagtatagagaagaaataaaattcccagagcacagagaaaacacttagctgtttaccacgcaggcagttctctctgtatctctgccgacagctctatacgcacacacagatagagacagatgccatcacactccgctgcatgtcacctgcttgtgccagttaatgcacatacggacagctttctgtatgaccaaatacagatttacatgactgttttaaagaatgtgaagagccccattctaaaccacactttgtggacacagtctcccgggttgtttctggtggttctgttaagcgcacgccatcccggcgagcatcccggtgagcatcccggagcctgcgctctgcgcacccggctttccctgggatgagcggcacaggggctcctcggcaccgtgtagatgtgcatgctcgcccctcagcccccggaaagacggcagcttcagccgctgctgctgaatgggtgcacccatttcccacagattcagcaacaccgagtattaaaataacttttaatatttgtctactcagtacatcattgtttagtctgcatttctttgatttatattgataaaatatatatttattaaccatttgtttttctcctttgctatgatcttgttatgtcatggttcatttcctaacaaaggtagaataggaggtgtcagagttttctctctaaggatgcatcccatctttgtgcacttgatacacctggtcaggcagactcacatggagactgtgctggctggaaggccctggccgacctgggctgcaggtggtccacatggagctcagagacttgaccaggattgacagacaactggaggctcgagctctggggccatgattctggcccacacttcctcctccacccctaatcttctgtgattggggttttatgagagctagaaggacagagtgacaaagttggccttgaggttttgaggtgggactgggaaagaggagagtagtgaagggaccccggctcatctcagactttaactcactctgcacatcccctttctccctcctccggcagaggttttgaaaaccgtgtctgccattgtggacgccggctcctccatcaacctctacatgttccacggaggcaccaactttggcttcatgaatggagccatgcacttccatgactacaagtcagatgtcaccagctatggcaagtattcatcagcactgctctccctggtctgccctgcatgggcatggctgggacttgctatggagaggccctcagggtcaacttctggcaccttcgtgtctttggcaatagagtacctggagaaggtacttgcctggacagtcatg

SEQ ID NO: 8708 - DNA, 2300 bp, Homo sapien
ccctgcttctggtggaacagtgagtaactgcccaaccagaaacctacacacacatattcaacacagcgcctgcaagcttccagctcacctggacctggagtgatccccaagcatcctggggtcaggcacagaaacaggaacagcgagctcctggctccagtgctgaatggggcacagatgcattaactctcccagtcccattaaccttagcaagtatttctgcttccatgaaaaggggaagagggaaaatgtctctaagctctggaacctttggcagtgctgggcatggactgggcagagtgagaagtctgtctgaagaccctgggaaagggtcttcaccccatgggaagaaagggaaggcttgatgtttggtccagtaaggccattaatggtcaccaactgagcagactctgggaggaaatgtctcagtctctgcagtggctaccagcagaggtagggcgacataagcacagaagacaaatcttagaaaaccctagaacaacagtcctgtgcagccacatgccccacagccctagtaacttagggagtgatgtgcctcccatttccacacaaacacatccaggcattgcacagtgctaggccctacgacatccgtaccccaacattttcaacagtgcgtgctacacagcccaagctctaggccccattgggcaccccacctatgcaggtgcccatgcactgggctagcaactgtcagtaaaggtccccttcctgtatgtccagagtccttcagctccagcttctacaagaatccatgcagctaggcctggctgggggaggaaggggacagggaagttggccaaggctcccatgtgtgtgcatgtgggggtggttcttgaccttagctgcttggtacggggctgtcacctccttaccctggcactgtcggacctggtggcttccttctctatttcctgcctcaactctcagcctcctttttctggaagttgtgtgctctgactttggagggattgggacctcagacctgagcccaggtgcagatgggagggtggtgaactggtcgcgcctccttcctccttgctacaccgaaggtcccaagggccctttgccacccttgctacccctgggtccctcagcgcgccccgcagagctcgggccccctcaagagagttaacttggcagtgcccaggagccagagagcgatccagagagcgctgttgggcagcaggggtggggaggtgggggacgactgacccctgactcctcatccggccaccagaaaccacctgctgagggggccgggaactgacgactgagagcccgggccgattgttagaagctgctgagaaccagctcttcccctaatcccggtcgacgagggcaggctgtgccgggttttgtttcgcagcccctcggcagcagcgcctcccagcccgagctcggttctcggccccctttccagctgcccccagcgcgcgcagcgcacacacacacacacacacacacacacacacacaccccagcgcgcgcccgggaggacatggcgtgggcaccgatggggacgcagaaaggggctctgtgcgcggcggggcgcccgcgggggcgcggggagcactgacctgcggcgacgagtccggagcgtctccggtgcggtccatcgcgggcaacggcccctacgccccggccccggcgcccctagaccgctgccctgggccgcgtgcggctccctccccggggactgtcgggctccgggcccccgggggccacttcatagccgcggggtccgcgcgcccgcccgccccgcccggccccgccgccccggcccggctcgttctgggctcagcgaggcggcggccgaaggctgggagcgcgcgggagggagggcgcgggcagggaggcggggggcggggggcggggagggggagcggggagggggagcggggagcgggcgcgggggcgagaggggcgaggggggcgcgcggccggagccgagccgaccgggccggcgcagagtccccgaggtggcggcggatgcgccggtgccgccgcggctctgccggcgcctcccgccccgcccccacccgctctccgcccccgccccgcccccgccccgagcccgcgccagcgccggcgggacccgagctgctaatggtcggtaccaacctcgccagcctaggcgggggcgcgaggagggaggccggcgaggggacccccccccgggattggtatcacctccccaccgccccccaccctcccccggcaccgtcccccgcggaggcggctcccgcttcaggcggcggagcaggggtggcgggcag

SEQ ID NO: 8709 - DNA, 2300 bp, Homo sapien
ggaacgagacagtcttcacggtcatttctgtcctcccatttggtgattgtgtgactgcggctggctggcttagcagaggagggaggcaatgtgccctcctggacggcctggcccctccttggtgctctctggtacccccgcccatcctgcttctgcacctgcccttcccctcccttcagctggtgtggagtctaaggagaagcagagtatggagactaggaaaataccagagaacaccgacttaggaaaggtctcttagcagagtctaaaagagagggttgtagtaggggcagaagaaggcggagcaaggctggctgggattccactcattaagagaagggggaaatgctcctgtaccgcagcaggaggtactgaggttagattcagaggaagtttcttgccggcaaagggggctgttaagcacaacaatgaaagagcgcacgacaaggaggagcagttatccctagagatagtcactaaggacactttcacatgtctgtggcatgatacggacggtgaggtgccttcctcccctcaaaatcttgaccaaaggggctgattctggagtctctgccccctccccacctgcacatcctcagtgggaagagcagggcccggcttggtcctaacagggcaggaaagctgatggaaaagaggcccgtggtcctcagccccagcccatagcacgggggcacagctctggttaagcagtgcctagcagtggggctggaactggtttcccgggaaggagggagaccctagagaaagtaccgacagtccctggtcccgccgcgaaccccgccatgggaggtggccttctcctggggctgtgaagaggacacagcgggtgtggcccgaatacaggtgtccaagagcaccgggagatgccaacctctaaaacgagtgcaaggatggcttcaaagtctccgacaagctgaaggagtatctggaatatacagctccacagaggcaccctaccagtgcacccacatacgtccaagtgcgcgcccactcactggcctccgtcccccgccgaccaacacaccgcggcagaggcccgggaaactcctggagatcccgctgcccccggcctccccgcgcccgtccgcccacgcaggcctcccgggcctctctccggaacgccgggtgcaccggcccggaaggggaggctggggtgaggctgacgcgcggcggctcgaggtgcccttccacggggcagcagaccccgtaccccggcacggcaccgtccgcccccaccggccacctcccatccggggtgcctggagccaaggaaggagccgcatcccccaccggcttcccagctcggcctctcggtcccagagcgccgccccccgccctcctgcagcagcccggccggaaacaatcaccctttgagagaggctgccaagctgggcgccaggagcagccaggatggaggcggggtggaatgggggtgcaggcgggggccgagctttaactctcgagagccgagatctgggggtgcgctcggcccctgcccgccacccctgctccgccgcctgaagcgggagccgcctccgcgggggacggtgccgggggagggtggggggcggtggggaggtgataccaatcccgggggggggtcccctcgccggcctccctcctcgcgcccccgcctaggctggcgaggttggtaccgaccattagcagctcgggtcccgccggcgctggcgcgggctcggggcgggggcggggcgggggcggagagcgggtgggggcggggcgggaggcgccggcagagccgcggcggcaccggcgcatccgccgccacctcggggactctgcgccggcccggtcggctcggctccggccgcgcgcccccctcgcccctctcgcccccgcgcccgctccccgctccccctccccgctccccctccccgccccccgccccccgcctccctgcccgcgccctccctcccgcgcgctcccagccttcggccgccgcctcgctgagcccagaacgagccgggccggggcggcggggccgggcggggcgggcgggcgcgcggaccccgcggctatgaagtggcccccgggggcccggagcccgacagtccccggggagggagccgcacgcggcccagggcagcggtctaggggcgccggggccggggcgtaggggccgttgcccgcgatggaccgcaccggagacgctccggactcgtcgccgcaggtcagtgctccccgcgcccccgcgggcgccccgccgcgcacagagcccctttctgcgtccccatcggtgcccacgccatgtcctcccg

SEQ ID NO: 8710 - DNA, 2300 bp, Homo sapien
atttctccacagtgtccattcttcatggaacctaaggatacaaacagatggttcccctgcagcttcagatcttcatttctcaaggcacctgtattatatgaaactttaagtaaatctgttatgcttttctctcgtcagcctgtcttctgttgtaggagtgtcagctgtgagccttaggatgagtgagtaaaggcatcacacccttctgccactacatctgcatagacacgttttctttggatacgtccacaacaaaacttttccttgtaaatttccatgtgtgaatgaggtcagtcgtgggagtgatgctgaagcacatctggcatgtcgtggtggctgattaaaggcagagccaggcccactcacctgatgcacatcacactcctgacacgtcctggtggctgtattaaaggcagccaacccaggcccgctcagatgcccggcggtaacctgatgcacatcacactcttctcacagatcccaggaaggaaaccaacgagggtcatgcattacagggcatgagagaattacagactctgaagtttgtaagggcaacttaagtggttttcaaggacattatctatactccaggaagcactgcaaccatcattttacacagaaaaagcaattctggtcgactacaaaaagcctccactgcccagaatataatctgatcacctcctgcacaagttctggtgtcagactccagaaagtgcagtctgtctggtacatacaacctgggaatcaaaagtaaagtggtttctacttatttgaaccatgaactgtacacacgaaaacccttctttcacttaggattaaagtgttttctttcaaatgcctcttgagtgacttgctatcaattcagaaagcccagctgtccagcagacagcaaagaaaaacaacctagctttgtcttgggaaaaaaactcatcttcctgtctcccgttatggttctgcacagaaagtcaagtacctttcccagacaccacacagagtgtgaatgcaggaactaaacccttctgcaaagacatgggatggttttattgaaaaataacagtgcatttttaatgttttgcttctatattttataacaactccttggtagctgacgcccgctccctttccaatgttctgtgcctttcctccttcctctgctccctcagatggaacggagctggctgcctctgttccaagaagcctgcggctgagtgcgggcttgacatgagatatttatcatctcaggatgtcttcgctcagatcgctggctctccacccccagacttctttatcttattttgctaaacaagatgagtttctgtcattgctggaagtaattgccttgttttttaatatatatcaaggcccaggttaacaactggacaatgcaatgcatttgttattccctctctctcctgtttattctagtgtgaaattgttttccaggtagtgattaattctgccaaagcttcctgcccttgctgggtaatttgctgtatttgggaagaagatgctaactgcgcggctctgccatcagaggtgtcgttactgttttgtcaaacactagctcctccattgtcttctgccaatcagccaagcctgtggtcctttattcatttcctgtttctgagttttctgtggggaggactgaagctgagtcttcgggggagactgtgtcaggaggctggggtgggctggagagggccccccagcggtggctccaaagcatctccgcagcgatggagaactggggttcgtgggcagagtggtgagcgacggagaactggggttcgtgggcagagtggtgagcgacggagaactggggttcgtgggcagagtggtgagcgacgcagagctggggttcatgggcagagtggtgagcgacggagaactggggttcgtgggcagagtggtgagcgacggagagctggggttcatgggcagagtggtgagcgacggagaactggggttcgtgggcagagtggtgagcgacggagagctggggttcgtgggcagagtggtgagcgacgcagagctggggttcgtgggcagagtggtgagcgacggagaactggggttcgtgagcagagtggtgagcgacggagagctggggttcatgggcagagtggtgagcgacggagaactggggttcgtgggcagagtggtgagcgacggagaactggggttcgtgggcagagtggtgagcgacggagaactggggttcgtgggcagagtggtgagtgacggagaactggggttcgtgagcagagtggtgagcgacgcagagctggggttcatgggca

SEQ ID NO: 8711 - DNA, 2300 bp, Homo sapien
ctgaggagccacatgatctgacatggttaaggatgcctcaggcttccctgttgagaatagactgaaggggcaaaaatggaagcagaagagcagttaggaggctcctgtcaaacccacgtggaaggcaggctctgggctgtgttactggactaacactaacaccgttcccttgcacttctgaggggtccctggaacttccccaggggatgagactcctggctagcaggactcagcccttccccttcaactttactcaggacctggtctccccttcttaaggtctctggagcccaacctcagcccactctcacaggcattctctctgtccacaaaatatcaccgaagagtcttctgtgagtgcagcatggtgtgaacactgggagtacaaggagaaataagacacagttgctgtgctggagaagcttgtgcccagtggtggtgatactgccggaggtgagaccactatgccagcacaggaacaaagatggcaggggcacagggcaattcaggggtgcagatctgggggcatccaagaggctcctaagcctcagtatataaactgacaggtcacagcctgctctaggaaacaccttcctaagggttggagttatctttgtgcatcccatccccaccccaccaagccgcccttggccctgccctcaggagcctctgcttggccttgctaattcctctcttctccctgaagccagagtgaggtccctcttggcagcctttgtgtctagagagagccgtccaatagaaacataaggtgagcaacatgcttaattttaaaatttctagtagctacattaaacatttttaagtgaaattaactttaataatacatttatttaacccaatatatccaaaagattatcatttcaacatgcaatcctattttaaaaataactagtgaggtacctgacaaaaaaaaatcccttttcatactaagtccagaagatctttgtgtattttatactcataggacatctgagtttggatgttacctttttattggaaatatgggatctgtacttagatttcactgaatttacattgaaaaggtagggtcacatacccaagttgtctcacacatacctaaatgttttctggtaactggatggagtatcagtttttatatttatctttgcattagctaaaaaacaaattaatactgcaggtcctcagccgcacgcaggcagttttctccacggtccaaatggttgcccgaattcacccagaccccgctgtcctccgctttttcatgcagacattcaaacaactgcctcccttcctcctggcacccccaccccatcgccagcagcctccgaaccagtttccctcctgtcctcatctcagccacccatgactcacacacacatctggctcccctggcccacttttcacctggtcctcataatctatgcataaacattaacataccacagagtcaatctgcatactgattacttctgctctggtcaaattcttgctttcaggatcaggaggctttctccccacaccaaactgggcctgaggaaatcgtgtcttgtcttcctgtcacccctcccgtagttgcatgtcttatgagacaaggggtgtctcaggtgaagcaggacagggaggatgccagcacttgggtggtagaggtttgaggagtgcctgttgggggatgtgtcgggggaggaggacttttcacatatggctcattgtgtcgggatgatttcgttgttaaataagcaccgacgggatgatttcacatttcatacttctaagtttttataatttaaattctttccgccaggctgggtttttttttttttttccaagctttaaatctgtgcctagaattggtttgatttacataatcctgccactgagattcagccccacccctgagagccccctcagagccacccacagccaggacacctctgctggcctccccttccccagcctcttccaacttgcggcaggcccctggctctggcctcccctatctgggaatgagccggctgcaccgctgctgacagtggctgggataatcctccccgagctgttccagggattagtcctgctgccctgtgcccagctcccacacagcggggtttcggggctgtggaccctgtgccaggaaaggaagggcgcagctcctgtaatgcggagcggccagggcagtgggcaccaggctttagcctccctttctcaccctacagagggcaggcccttcagctccattctcctccaaggttgcagacggggcaggaactgggggtgacaggagagctgtaaggtctcca

SEQ ID NO: 8712 - DNA, 2300 bp, Homo sapien
cgtgagctcagctgtggataagcttcctttattcattctttaccaaagaaagtttgctaggaagataaatgggagaaaagcaaaataaaaacacatcaggaatgcagataaaccaatatatgtgcagagcacaagttccttctcataaggtcattcaagtctggcaccacgtggtggtggggggtgggccagctcactgggcacatggtacccataaatatgcctaccctgggggaatggaaggttgacagggagcctgatggacatgtgtgtgaagaacggaacaacacaataacaaacatgcgaagcgtactcatagcccttcctccttcccatcccattcctataaaagaggaaagaacaactcatttccttcacggggcatggtggtatgcatctgtagtcccacctactcaggaagctgaggctagaggattccttgatcccaggaggtcaaggatggagtaagctatgatcctgccactgcactccagcctcggtgacagacaagactttaaaaaaaaaaaaaagtaaaggaaaagaaaaggaaagggatatttccctgccaaattaatttaaaccaagtgctctatttccattcattagttttttccctgctgcctgatgtatctttctcatatctggccccctgttctgtctacctgttgaaatatttcccattcttcgtggcccaacttgagtaacacctctgtcagaacttatcagatcaacacagtcaaatgaatcctctccctcccctgaactctatggcacttggcttgaagagctcttacagaaatcttgagttgtgttttacttattcatgtgcatggcatatctactctatgagattggaatcaacttgattatagaaatgataacttattatctatgctagatgtggcttgcatagattctgtacattactttgcacctagtgagtggtgattattgtagacatgaatgaatgattcaatcggtgctgattaatgtctctgagcttttgctcatgctgtcttccctttatggaaaacccttcccacaccaagggtcacttcctgtaagaagcctccctggatctccaagctgctggctcctatagcactctgggcaaacctctgcctgattactcaccaccactatcatacgtcaaagttaatcatgaccaatttcacccacttatttataagcttcaaaaagcctaacattccattctagtcatgcttctcttaccaccatctagcacagtgtttggtaatagtgtgcattttataactgtttgtcaaatagaatgatctattcagaagcttctggaagcgttagcccttgccacagaggacctcgtttatttagtgtttctatcaggaactgccacagttgtcttgaggtctcactcccagaggaaacccagcatgaacagccttcccatcccaagtttcgtcacggatgaaggaaggagcaggaccagacgctctttagggtcccttagagccccaggattcttgtgttccagggaatcccctggcagaatagattgctgcgagcaaaagaggcgagtgtggcccctcctcagcaggtctctagatgaaccccagcctctggaaggcctggacctgggaaaaaagaattcgcgtcccttcagggccccacgccttcctgtcctccagcacatttctctttcttggccccaccttccctttttctgcttcctctctgctggcctctccccttctcttcctttcttttctgtttctcttctcctacaggtcccaccgcaccttcccagtatcgctgcttccccttcgcctacttcccagtctggccagtcagattcaccgtccttctcgggtcgcctgcgttatcttgctttcctcccacgccccgacagaggctccctctcgctggcctcctccctctcctctctgccctgcaggcagcagagccttcgctgacgccaagaggcagcgaggtggggaggcgaggagttggggaggtctggaggtagggggtggggtgggggtggggccttgcgcagccgccccgccccgcgatgcgtgtgtgaaggtcggggtggcagtgacgcggcgccggcggggggagggaggctgggccggtgggagagggaggcgagccgaccgctgggctgctgggctcccgcgccctcgcgctccccgccgccagcccaggcgcaggcagggcgcaggcggcggcgggcggcatggagagcctgctggagaatccggtgcgcgccgtgctctacctcaaggagctcacggccatcgtgcagaaccagcagagcc

SEQ ID NO: 8713 - DNA, 2300 bp, Homo sapien
gagctgaagggctcatgagggaggcagatcagtctaaatgtatttttagctcaactaaattttgcagagaattggaattgccttgtttggctctggtaaggaaaggggagggacacagggcacttccactgactggtcatggaatagtaagtctttgggctgtagaagggatacttttccaacgaacttcatgtgtggaagacataaagcaagaagttaaagagcatcatgatgtgtgataagcttgtttgctcctttctaggatcttaaaataattttttggatggtgaaatgtcacatgactctgttggggtttgctatggggcaggaagatgtgggcaggaagagctggcaggcagcagaggttggtgtcgcacgagcctgaaggggatgggagatgagagtcaaactcaacacctagaaggtgcatgataaatactggttgaatacataaactctccgtctgtagggcccaggcaggctcatggattgttgagtggaggtgggttgtggtatcagggctgaggaagagttgggcagaagggaggacccctgggtccaacagcacagctcactgtcctgaagctgagcccatgcggaaagctgctctcagaggttcagttcttcaggctggttggggtgtgagacggatgaggggtgaggagaagactgcccccggcaataaacagaaccgaccccaatcctagctatgagcagggagagccctctactccctctgcccccagcctctgaccactctgtcagcccaggaagctgcattaagaacaaatctctgcagtgagagtttcatcacacacacacacacacacacacacacacacacacacacacacacaaggcctcagcaggtggagtgagaaacgggcaatgggcctatgaaggcaggagggaaaggaggctggcattgtggccgtatctctgggggaaaagagaggaaagagctggattccggggtcatgaaccagcagcacccagattccaggccccttaccaggcaggatcagctgtgttcagggaagtgtcaataccgtgacgggacggtgagcaggtggtgcgcaggcgtttgtggacctgagtgggcacgactgcgtgggcaactgtgtgttactgacttgggctgggggagttggaggacaacccacactatactaaagatgcataggcttcacagcaaagatcagcatagctttatctcagtatctcccaatgacccctggcctggtcacgccatcagcactcccagttccttttcctttctctgcatgaagtgtttcatctccattggctagccagatcctcctggttcttcccctctgtaaaatggggcaaatctaccacgcctccatacccactctgtctggagcatgcgggagaccaggccccagaggcgtgagctcctgggaagaaggctgtgtggaaggggacaggtacaggagctgtgccactgaactctacggaggtatagtgtctggaagctcaggtacggggcggccagacacacacaaagctgtagtgtgattttccctgcaggatatctcggcctagctgtggccagggcctggtaccaatgacctctcagggctttggatgcaccaggtcaaaccagccaaccacctgcctccaatcaggaatgcacgccccatcccaggcagagagacaagggagttccacaatttcttccttgatgaatgattcctatctaccacaattttcattcaatgcatcaaatcaaccaatgattatttaaaaacagcagctacaaaaactctgcaaagcgggtgggaatttcctgcttgggtctagcctccgtgtttcccgcgcacagcccggtctttaccctggatgcttccgaaccggcatcatctggcatctccgacagtcttgatgcgacttaacgcatggtaagaacccatcagagaaggccaaagggatttccagagacaggtagaggcactgcgctgggcagcaccagggaggaatattatcttttcaagcagctggactctgacctagaagccggaactcctgagtactgaggtcagcacctctctcacacacccccagctataagcttgaaggaagcccctccccttctctgggccttgatttcccctcctgctcagtggggacgttcttggtcctccttcttgcccactctacccagtcgccgagtctggcgaagcagagctgtctgggggtcaccgcagcaggagggaccgagcttagatacgaaaaaagacttctacacggcaagagccacagaaaggacgctccagctg

SEQ ID NO: 8714 - DNA, 2300 bp, Homo sapien
agagacggagtctccatcttggggcacacgaagtctgaggtgttctttcagatagctaccgtgcctcccctctactgaatcatctcaggagaacccaggggcctggaggtaccattctctagtgtgagtgtatcatggtgcagacacacgctggaggagagacggagtctccatcttggggcacacgaagtttgaggtgttctttcagatagctaccgtgcctcccctctactgaatcatctcaggagcacccaggggcctggaggtaccgttctctagtgtgagtgtatcatggtgcagacacatgctggagagacggagtctccatcttggggcacacgaagtttgaggtgttctttcagatagctaccacgcctcccctctactgaatcatcctcaggagcacccaagtgcttgtctttttcatcttacaaatcagaaccctgccttgagccctcgttgctctctagacactgcctctcttctctcctctttgctgcctccacttcctcttctccattcactcttcaacctgctccactcaagcatccaaccccaggcaccattaacacttctcttgtcacggccattgctggttgctatgtggccaaatccaacggcctatctctgtcctcatcccagccccttggcagcatcgacatggttaattgctcccttctggaaacaccgtcttcttggcttccatcaccctccctccccaggtggactctttcctctggaggagcccctcatccattgcagctgcccctcctcactgacctgaaactgggccctatccccctctcaacaaccactgtccaggtggctgcccccatgctagtggctgcccccattccagtggctctagctagctaacagtctaacttgcttgagtaaatatttgacaatgtctagtttgatagattcttcagatgaaatgtccctgaatccagcatctccctgcctctgaaatggaaaatctgtacgtgtttatttggtagatggagtaccaacacagggggcctgaagcacacgcgtattctgaattctcatcagctcggagaccactggctgtgcgctggctgcctggctccctcccacgtgggccatggccctgctgcttctccacggccctgggctctgccaacttctcccctccccatgcccacagccgcagtttagggcttcatcctttctcatcatggctgttaacagcagtagccttctcaccagtctccctgcctccaaaccatcttcagagccatccttctaggctgctaacttggcatcatagctcatgtccctgctcacatttctcccagggctccccacatccctagtgtgaaacccaagtttctcagcaaagcaaagacgccctgtctgcttccagcttctctcgccgcttccccagcatggtccccccctgcagcctggctctcacgcccccactttggtgcatgctgttatttcttcctgctgcccagccccaaccctgcaggtctctgtttagctctcatcctctctaggagtcttccctgacctccgttgtccccggaacccaccttctgtcgaccattgcgtttatctccctgtgtcataacatttgcctgcctgtcttccccacgaggctacgggctccttcaagatagggcagttattttaatctctgcctccctggtgtatgggcacccaatcactgttttgtgggatgaatgaatgagtgagtgagagatgaccaggaatgactgcatgccggcagctggagaaggagcctcagtggcctgtgcctttggaagttctacccaacggcccaggattactcagcctgctttgctgccaagattatctggagctgacaccgagacctgtgatggacttgcaaatggccccgaggcttccagactccaggcagtgaggcagtgtggagggcataggcccccttcctcccactgcacatgcaagtgagtgagtgctgagaactagagcaatgggcaccgattagaccgcttccagccaggcatgaccggacctgtctcaggaggtgctgctgacgggcgcgtggatcacgagtggtaccggttttgctaaggcctccccctctttcctgtgagcttctgcaaggtctgcagcaaatacctcacaagcgttggggaaaaaggatgtatgttccctgcctctgaagaaacaggtacaatcttgcataaaattgcttgttaacattgatctgtgcgtggaatcagtttgtgttgcagggaaatgaagcgtcctacacgcctgtgatcaaaatgaatttcatcatc

SEQ ID NO: 8715 - DNA, 2300 bp, Homo sapien
cagcaccccatcacatgtttagaaactaacacactcagcccctgcacgggatacccatgcacttgcccatcaacctgcatgtataaatatctactctctaaacgctcatttatacattcctcatctctctctctctccatctttctgtacgagaaaaaaaatctggatgagttagaaagataaagatatgcataggatgatggtagtagtttggtctacgggaacatggcctgactgtgggggaggtggggagtgggggaagccctggaatatgagatccgtggggtcagctctgagaatcaggagacttgctgacagacgcaaactgtcccctttagcctttcccctcattacttatttttcccaatcctccaggagacgagttctgggcatcacctcgggcatccatgacctgggctccctgcgctgggagctggccctgtgcctcctgctcgcctgggtcatctgctatttctgcatctggaagggggtcaagtccacaggcaaggtgagatgtcctgcctcctgggaagctccctttggcccccagagtctacggggacacttgagggggaccctctggagaactgatttctttctattaagaaactacacttcctgagcagggcaggggagatgcctagtgagaacagggggagccacaggaaggcggagcttagctcgatgcaaggaaagtctttctttttcaatatgactttaaaagtccggtttacataagaatattcagggctgccgggtgcagtggctcacgcctgtaatcccagcactttgggaggccgaggctggcggatcacgaggtcaggagatcgagaccatcctggctaacacggtaaaaccccgtctctactaaaaatacaaaaaattagccgggcgtggtggtgggcacctgtagtcccagctatgcaggaggctgaggcaggagaatggcgtgaacccgggaggcggagcttgcagtgagccgagatagcgccactgcactccagcctgggcgacagccagactccgtctcaaaaaaaaaaaaaaaaaaaaaagaatattcagggcaaattagaaacagaaaaatctcattgttggagctaatccctgctggcaggttggcactgctaatctctgttcatttttgctgtgttgccttctggtttctctcatacgtatgtgtgtgtgtctgtatccattatgtgtggctatgacatcattaggatcacacgctcttatgactcacttgttgttgtatttaacaacatagcaagataattttgagtttgaattagcaaacagaactgtctttgaggtggcgagtttccagtcattgaaggggttcccaccaagaatgggcaacaatgggcttgtcacatagacagaattcagatttgagcattatttccaacccagagagccggagactgtgcttcatgcctttttaaagccaggagtggtcagtaaacggacttctctgcttggccatacactgagtctgttcccgcagcagcctttcccctccctgaattgtaacaagttggtaatagggatgatgaaagtgatcatcgtagtaataacagcacagacagtaccactgccgccgcccagggaaggagctgagtttgcttagtggcagagaagaacagcccggagctccggccgccgctgctcccccaaccattagcctgcaaaagcacagcctaactttccccacagatcactgtgcaaatctggtcactattcccctgggtcgccagggggcaaggagagaacagccaggataaaggattaagaaagaccagattctggactttaaattagtctttgccctgatttgatcattacacattatatacacatatggaaataccactctttttcataaatatgtacagattatgcacatacgtacatgttgactaaaaataagaggaaaaaaatggtcttggacaggttatgggctggaagcctgtaccctgcctccctccctgtcttcctcctcccctccccaccctccccctgctgatgtgtatctcacaccctggggggagcacagacccactggaatgtgtaaagggaggtgtggaaactttcttgtgcttagcccctctaggctgtctctgaggttgggactgagctccgtgtgactcgagctgcctgtggggcgtggctggagggccactgcgtccccaccaggagtgaccttggcctgtccccccacctccaggtggtttatttcacagccacgtttccgtacctgatgcttgtcattttgctgatcagaggtgtcacccttcccg

SEQ ID NO: 8716 - DNA, 2300 bp, Homo sapien
ggacatgacggataaatgtgagtctccgtggacccgtgtgggtagatgtgagagcgttctcccctgcctcagtgatgtgtggggttggagtggggcgggggaggaagtgctggaaagcacacacagaatcttaaacttgcaccccagacattcagacttgcacagctcagacatccaaatttcctcttcatatgtggcaaatgggcccagcacctactcccagaattccatgacaggtgaggtaaaattctcaaatggggtcactgtgccggctcctgagtggttcagaaagtccgtgcaatgctctgttggggacaaggttagggacaagatggagagagatgctcttataccctagtccccctggccctctggccttgcagcctagtggtcctcaccactcctagccccaagagcttcttttggagcccccactctccagggcatcaggaggctcatagggccagctcttcctccccctgctcttgttccctgtgaatctgcctgctcacctggctgccctgccaacctcagacagtatccagacttcagatctactcagtcccctcatgggcggctggtacggaatgcactctccccgcttgcccgttctgacttcctgtctctccacttggcaggccaagggactgcggccctgcacctgctcttccccctgcttggaatgctgcccccatgctgggctctctctcacttcaggcctcagatgacacttctccctccccttgttctatggtttctgcagtttcgttcacctatcacaatttgtagtggttgtgtttatttgtctgttcttaccaccagactgtaaacacagtgaaggctgggtccctgctgcttttgctcagcctcgtaccaatctccagcccttggcaccgtgtttaacacacagtaggtgtccagtaagtgcttgttaagcgcacaaatgagtaagtggcaataacccttgcagtcatttaatacagtccctctgggttctcccaaccacactgactcgtccgagtggctggcctgagggcctcagaggagccaaggagcagagctgcccaggagcccacgtggcttggctgccaggcaggttctgctacacttatactccccgtcgttgcttggattcaccagccaccgcagcccagcccctaacaggcaacatcccaggggctgaaatgatggatacctgtgttccaaaagttgttgcaggtcgtccagggcagctcagaagtgaaggagctgaacaggtagaagagagcccaggcaaggatgatgatgtagtagacattcaaatatgactcgatgaccacagatgccagaccaatgccttccagagtgggggagagatggggagggacaagagagatcaatgttagcaaaaaagtcacatagaagctgccagttgaggttacaagggtattgggtgctacacaaagagcaccattggggtttatccagtggcatgagaagccattcatagcatatttttctttcttttttcttttctttttttttttttttttttttttttgagatggagtcttgttctgttgtccaggctggagtgcagtggcacagtctcggctcactggaacctccacttcccgggttcaagcgatcctcccacctcagcctccggagtagctgggaccacagacagacccggctaattttaactttttttttgtagagacgggagaaggggagggtctcgctatgctgcccaggctggtctcgaactcccgggctcaggcgatcctcctgcctcagcctcccgaagtgctcactacttaacgaaggactgtggacctttcagaacagcctggctgaaaaatcaatgctgactatgaacaaaacctctcctttggggcccggcgagcccaccctggcaaggacgggttccaccgcggtctccaccgcgcagcggcgttggggcggcccgggcgtccgccgcgggggtgggcgtggcgctgcgcgggagggacccgcagacggcagagggtccgcggggagcgggcggggcgttgagagcgcgcacacagacacccaaaaaacacacaaacaagcggcccctgtgccgcggcggaacgcgctgtgctcgcggccgtccggcccgtccggcagccccgggtcagcccggtgaactaagcggacccgggatggccgagccgggggccggcgttctggtggggctgtctgggagaggggccggggcggcgctgggtggagaaggggctcgcgggggagcgcgggggcgcgcgggggcgcgcctcgagccagtacggcagctc

SEQ ID NO: 8717 - DNA, 2300 bp, Homo sapien
tgagaggggcccgagagacatatcgtgggggtgcttgatggaaaactacagactgagagtctcacttcacaccccacccctgctgggaagttctaaaatacacagaggaagcacatgtaaaaggaaatttccctttctccctgcaacttcctctcccttcataccacctagagctgaagaagcacctcctttgtcttgaaggaggcaccagctattctgaatgaagggcggtgggacagtgctgtaccccacaccaggtgggcgtgctcagggacagtgaccaggacgctgttctggaggagctcactgggcacacggcatagggcacatgtattcaaaaaatacccttccccattgatagctggcaggccactccagacaaattctagctaggtgcctggtgctatgcagtgaccagaggtgcctgggaccagacaccccaccatcccagcctctgcttccagaggacacacaacaaacacccacacctccccttaagcacctatgatatccctgcaccctcacagcaaccccgcaaagtagatattgtgttgttacctacctttgacagactgggaaaccaaggctgacccttgcctagctgtcgtgactgatacatgatagaggaggagaagaaactcaggtctgtctggtcccaatcctgggtcctctctacattgcttcttgaggtacgctctgggtgctttctctaggaaaatcccaaggagaagggttgtgaaggtccagggccttgcctagaagccacagagggcaggtacttggtggaaaactccagcgtgtgattcaccctcctcccttgccctcgtcagtgaggtcacctcccctcccaaggttctcagtttatagcctggagtctctggtaagagagggctgtcccctgtgctgcacatacccgtctcctcatccctgggaaggagatggttctggagggggataggggaaaagggggaagggggaagggcaaggaggaggaggaggggagatgaggtcagggtgtgagtctctgagccccttcccctgcccaagggagcagcagctcagcccagctctggaggggccatcatgggactgtgcccacggggagggcaccggtctggagacagtgggttcacagtgggagtgggatgggggtgggagcgctggggacagaggacttgacttcctgaggttggatgttgtaatctcggttcacaaacttttggcctcagtccctcctgctgctcctggtatttctctgtcctttcactccccaacacacacagcccccgccccaacacatacacacacggcttctttctgtctgggagtccctggacaagtcacatgggattctgcgctgggaggaacagggtaaggcgtgaacgtggagggcagtttccctttcaggtcccggctctcttggctttcccataagcagctgccttgggactctcctggagacctgatgcccacagccaagctgaccacaggagccggtgctggggactgaggtgagcgggaagtggaggggctggctctgtctttgcagtctccaactgctgctcagaggggctggagggatagagccctgggaagcgagactctgtggaactgcgtgtctgcagcggggggcaggacctgcaataacctcaggccaaagggcaagtctgatgcccacgactctcaggacaaggggtgccccctagctccgccccatccagcgtgggagcagctcagtgattagcctgtggagcaggaaagtccagcgatgggcagctggtcacggcagtgggtgaaagcaggggtggtcatctgacgaggggaggggaagcaggtggtgcccagcaaggtggaaggagaagtggacaggagaaacctcggggcattcccgagggcccaggaactgcaataaatgatcacaggtgaggggttcctgcccgctgcctgccggctgagcgtgacgagctgggtgccaggcgcctcccaggaggaagctgtcttggctttgggcggtggatgctatgggtgtgcttgtacccgaggggggcactcaggggagttgcaggcagccaccagctgagaccggcactcacggggtgtgaaggactacagagagagccaggttttggtgccatgcacacaggtatgtgtgtgcgaagggacgtgacgggaaatggcaccagtgtgtgtatgggaatgggtgttggtatgtgggtgtggactgaagcaggggctgggtgtcccatccccccgtgtgcagggtctgagctattcctatgctggactggggagcaaagggg

SEQ ID NO: 8718 - DNA, 2300 bp, Homo sapien
gatcctctcccctctttctcctttttatggagaggctggtgttttgttctggagtagctgtagctaggtgatcacatggactttgatgtcccctctgcaataactctgtggtcaatccatggtggacctgacatgcagggacaggccacacctgagcaccggggtagctcaagtatggattctggctgggccatgtcctactgtgccacagctgacccccagcccggcttctgctttcatagaggcaatgggtctgagagctgagacctgctctgccttcctcttcatgtggaaccccacaggagaggctgagaggggcccgagagacatatcgtgggggtgcttgatggaaaactacagactgagagtctcacttcacaccccacccctgctgggaagttctaaaatacacagaggaagcacatgtaaaaggaaatttccctttctccctgcaacttcctctcccttcataccacctagagctgaagaagcacctcctttgtcttgaaggaggcaccagctattctgaatgaagggcggtgggacagtgctgtaccccacaccaggtgggcgtgctcagggacagtgaccaggacgctgttctggaggagctcactgggcacacggcatagggcacatgtattcaaaaaatacccttccccattgatagctggcaggccactccagacaaattctagctaggtgcctggtgctatgcagtgaccagaggtgcctgggaccagacaccccaccatcccagcctctgcttccagaggacacacaacaaacacccacacctccccttaagcacctatgatatccctgcaccctcacagcaaccccgcaaagtagatattgtgttgttacctacctttgacagactgggaaaccaaggctgacccttgcctagctgtcgtgactgatacatgatagaggaggagaagaaactcaggtctgtctggtcccaatcctgggtcctctctacattgcttcttgaggtacgctctgggtgctttctctaggaaaatcccaaggagaagggttgtgaaggtccagggccttgcctagaagccacagagggcaggtacttggtggaaaactccagcgtgtgattcaccctcctcccttgccctcgtcagtgaggtcacctcccctcccaaggttctcagtttatagcctggagtctctggtaagagagggctgtcccctgtgctgcacatacccgtctcctcatccctgggaaggagatggttctggagggggataggggaaaagggggaagggggaagggcaaggaggaggaggaggggagatgaggtcagggtgtgagtctctgagccccttcccctgcccaagggagcagcagctcagcccagctctggaggggccatcatgggactgtgcccacggggagggcaccggtctggagacagtgggttcacagtgggagtgggatgggggtgggagcgctggggacagaggacttgacttcctgaggttggatgttgtaatctcggttcacaaacttttggcctcagtccctcctgctgctcctggtatttctctgtcctttcactccccaacacacacagcccccgccccaacacatacacacacggcttctttctgtctgggagtccctggacaagtcacatgggattctgcgctgggaggaacagggtaaggcgtgaacgtggagggcagtttccctttcaggtcccggctctcttggctttcccataagcagctgccttgggactctcctggagacctgatgcccacagccaagctgaccacaggagccggtgctggggactgaggtgagcgggaagtggaggggctggctctgtctttgcagtctccaactgctgctcagaggggctggagggatagagccctgggaagcgagactctgtggaactgcgtgtctgcagcggggggcaggacctgcaataacctcaggccaaagggcaagtctgatgcccacgactctcaggacaaggggtgccccctagctccgccccatccagcgtgggagcagctcagtgattagcctgtggagcaggaaagtccagcgatgggcagctggtcacggcagtgggtgaaagcaggggtggtcatctgacgaggggaggggaagcaggtggtgcccagcaaggtggaaggagaagtggacaggagaaacctcggggcattcccgagggcccaggaactgcaataaatgatcacaggtgaggggttcctgcccgctgcctgccggctgagcgtgacgagctgggtgccaggcgcctcccaggagg

SEQ ID NO: 8719 - DNA, 2300 bp, Homo sapien
tgcctaccttttgcaaagatgagagtctctggcctccaggagtttactaaccagtctgaataccaagtgggtcttggaggctaggagaacttgagtgaggaagggctcaacattagagagtctctggcctccaggggtttactaaccagtctgaacaccaagtgggtcttggaggctaggagaacttgagtgaggaagggctcaacattagagagtctctggcctccagaagtttactaactggtctgaataccaagtgggtcttggaggctaggagaacttgagtgaggaagggctcaacattagagagtctctggcctccaggggtttactaaccggtctgaacaccaagtgggtcttggaggctaggagaacttgagtgaggaagggctcaacattagagagtctctggcctccagaagtttactaaccagtctgaataccaagtgggtcttggaggctaggagaacttgagtgaggaagggctcaacattagagagtctctggcctccagaagtttactaactggtctgaataccaagtgggtcttggaggctaggagaacttgagtgaggaagggctcaacattagagagtctctggcctccagaagtttactaactggtctgaataccaagtgggtcttggaggctaggaaaacttgagtgaggaagggctcaacattaagatggtgggactaaggccagaggcagtcagataaaaacagggagggaccaggtagctcttttgggggaaagtcaaactgtaccccctgggccaggtcaaccaggcagctgttctctgacaaggtgaaggagaggtgacaggactgctgggctgttgctgttcatcctcacagaaagcatgtcacactgtatgtgctaaatataatttttgagggaaccaacaaggaaattcaccatcttggcttgtctgatcctctcccctctttctcctttttatggagaggctggtgttttgttctggagtagctgtagctaggtgatcacatggactttgatgtcccctctgcaataactctgtggtcaatccatggtggacctgacatgcagggacaggccacacctgagcaccggggtagctcaagtatggattctggctgggccatgtcctactgtgccacagctgacccccagcccggcttctgctttcatagaggcaatgggtctgagagctgagacctgctctgccttcctcttcatgtggaaccccacaggagaggctgagaggggcccgagagacatatcgtgggggtgcttgatggaaaactacagactgagagtctcacttcacaccccacccctgctgggaagttctaaaatacacagaggaagcacatgtaaaaggaaatttccctttctccctgcaacttcctctcccttcataccacctagagctgaagaagcacctcctttgtcttgaaggaggcaccagctattctgaatgaagggcggtgggacagtgctgtaccccacaccaggtgggcgtgctcagggacagtgaccaggacgctgttctggaggagctcactgggcacacggcatagggcacatgtattcaaaaaatacccttccccattgatagctggcaggccactccagacaaattctagctaggtgcctggtgctatgcagtgaccagaggtgcctgggaccagacaccccaccatcccagcctctgcttccagaggacacacaacaaacacccacacctccccttaagcacctatgatatccctgcaccctcacagcaaccccgcaaagtagatattgtgttgttacctacctttgacagactgggaaaccaaggctgacccttgcctagctgtcgtgactgatacatgatagaggaggagaagaaactcaggtctgtctggtcccaatcctgggtcctctctacattgcttcttgaggtacgctctgggtgctttctctaggaaaatcccaaggagaagggttgtgaaggtccagggccttgcctagaagccacagagggcaggtacttggtggaaaactccagcgtgtgattcaccctcctcccttgccctcgtcagtgaggtcacctcccctcccaaggttctcagtttatagcctggagtctctggtaagagagggctgtcccctgtgctgcacatacccgtctcctcatccctgggaaggagatggttctggagggggataggggaaaagggggaagggggaagggcaaggaggaggaggaggggagatgaggtcagggtgtgagtctctgagccccttcccctgcccaagggagcagcag

SEQ ID NO: 8720 - DNA, 2300 bp, Homo sapien
attctgttgttacctgttttcaggtttcttgactttgcacccagcagaccaaaggatgatggcaacgtgaggtagatgcaaggctagtcatgcctgttttgtgtggaaccccagacgggaagttgtgagggactgtcgccaacatttatctaccagtggttctcaagctttttttttttttctttaacttttgtcaacctaagcaggacaaaaaacctaccatagccattcccactttatagaggaaaaagaaattggggataacaaagatttggagaggaataaaataggagtcaacatggtaacatggcagcagttatgtaaaaacaaaagagttggtaagtaaagccaacattccttcatacaacagcagcagctcacaaccaactcaggataagcctgatgatgtccttatcactgacagtctttcctggaagctggaaattgcaaccgtttgcatatgtgaggacacagaaggggctgtgcaacattgccaaaggctgaatggtatctgagaaaacacccgttatctggtaattttagattacaaatgccaaagtttataatgcatagtaggccattagtaagtaccactcagtgatacgtaaaaatggaagtcaatagcactgctttgaagatggtcttttttttacatgagtttgtaggctgtctcaggacgcttttggtttattgctttacagagctcagtctaacagatgaaagcttgaaaggggagaggaacaggggccgctgaaacataagaataataatttccaagaagcttctgggaagctctccaggtattaccatgcagtgtttccatgcccctaccccatgcccttgagttagatgagggatcaaggaaacggaaactaccttagactcttcgatccgtctttctttccacacttctccgtcatctcaagatgtctctatcacctcactcactcattgccgcatcccctacctaactcattctcacagtctggccagagcccagcttagctcaggggtctctcagtcccgtctccttcaagaagacttccgggctcactgctcactgtgaataatcccttaaggatgaataacagctgccatttacagttagtcatcatctcctgaaatctcaagctagacagtggcatacgtaggactcagaccccacactctctggtgtcaaagtctgagcaggtttccactacatgtactgtgcttcagcacatggctgaggtgggactctgccctgtcctagactccaggctgaatgaactactctcacagccgcctctgtgggctgttcctgcagagaaacgaagctccctggatgacctcggcctcgcgctcaccgcctgctccttcccttataacagctttagggctttgctttattttaaacgttggcacttccttttctctattgatttaaaaaatattttaaaattctagcatattaaaaaatctaaacaatattgaaaaagtggggaaaaaatctcccttactgccatctcctgatctcagttccactctacaaatgtaactactattaatcatttagcgaagattttttcagactttttctatatgtgtataaatgtctgtgtatgtttgggaagtttttctgacatctcagagttctgtatctatgtatctttgttctaaatcatcgtccattccacattgcaagctgcgaaacggtaagataaatgtatttttaaattaatctacacagcacctgaccaaaggaatacctattcttgatggatttataggagcacttgtgttggagacaggggtgggaggcaggatccctccagagagaccctgagctcaccaggtgggaagcgcacatgagctccggggaggagaccacacttcataagctcaccagcaactggcccgacctgccagggcgtgcacactccccagactgcgaaatcactcatgtgtgggttgtccagtggccgaggggaggggaggggagaaaaggggagggggaggcacaagggtggaatgtgggctgggccaagtttagaatttcaagtgccacagaggcgttctggaaccacactttaaatagccagcaccttctccttcccccttagataattcttctcccctgactggacctctggcagcagcttcactaaggttcgaaatgttttcttctcttttttttctatttctgcgtctcagactgcaggttggtgggatccatgggacttacaaccaaaggacttttttcttaccctcgcctagaaagtacgcttctgacatgtatgtgtgcaaatgcaaagattatg

SEQ ID NO: 8721 - DNA, 2300 bp, Homo sapien
cctgggcactggcagctttagtctttctgacctagccctaccatcctctctaattggggctaaacttcattgacaacgcaaaacagcaaatcactgatgttctctttggaaccttgaataacaattcaaactcatctcgtcttggtcacttcccaggactggttttgtcatagaaacatctcgtttcagagttcagttgaaacattgagagactggtttgattcactttgcttctcatccctataatgcattgctgccatctgaaacagaagcccatccagtcaccaggcctcaaattgttacctactttcctcaattcattttacctttgctgctgtccttgccagttcttcgcattatggagattttcattccctattcctttgtaaatatgcttttctggtttttcattaactggaaattgactctccctcagccatacttaccttaggactatttgaagtggagagtgttcattttctcactttactgctagtaaatggatggattacagggtctgttgcccctgtattcttgattgccattgctacaccattgttcttctattttgaggcttctgctgttgagctgcaccatctatcctcctcactcatctctggttactactcgtcatttatggaggggacttcgatgatgggcatctctttccctggtgctgccatcattgtgggcaatttcattagtcatggatgaccttaacaatttctggacctccatctccactagtcattttttactccatttagcaaaccaattttaagtccacacttcggactcatcagaaatttattttctgaaatgtacagcctaatttattctatgattttaatgtcttttcctttaatctcttcctctcagtatacttactctttgacctcaagaagcctccaattccttaaccaaccttttcccccccccctctgtcagtttactctggctttaccgcttccccatttagcatagactctggcctgtcactctggctctgcagaaccttatccgtggatcagtttggccatctgacttctttgatttcatgggctgctgcatgctactgagtatataccattggttggtagcaccacagattgactcaagtaggcaggctcttgaagcagtttagcagccctggcggtccaacctcttccgttcttaaagactatttcagattttcacctcttgtcaaatactcagcctgtcacctctgctgcctcagcagaagcctaccctcctaacgggtaaattgaacctaataggagagcttctaagcttcttccttagttatctatatcatcatcctcatctgtcccagaagaggtgtctgtcctctggtcaacactatgagagtataggtgaatgagcacatcagtgaatcctatcccattgtaactccttagagaccttgttctatcaatcagccctttatcttcagtatctctcatttagcatataatttcaagctctgtattaaataggagtgctcaactacatattttcccttaaacctgtctctgtttcctgttctctttttcttctttgtagccaagccttacctcttctctgtatttaggtttcaatcactcctcagccagttgtaatctggattctaccctcatttcactgaaagtttccctattgaagtcagtgaactccatattgctagaagtcatttgtatttgacctctcttcagtatgacattgttgtccacttcttttaaaaaacccctccattggattcttggccactaccgtttcctaatttttcttctttttagctgctctttaatcagcctccttgaaatggtgtaattgggggctcttctctatataacatgggtgccccagtccactcccaattacttttattcatttgaataaaagtatcacttgcccacgggttgtttctgagctgtttaatcaactgtctgttaaacatttccacttgtatttttttaacctattaaatgttatttcaataggtttttgggggacgtcgtgtttggttacatgggtaagttatttagtggtgatttctgagattttggtgcacccattacctaagaagtgtacactgcattcaatgtgtagtcttctctctctcaccccctttcacccttccccccaagtcaccagagtccattgtattagtcttattttcatcaccgtgggcgtaccctgtgggatgatgttaaacgtactctagactctgttggctatttctctagagttagacctctggagacttctcagatagctcatgggtctctggccttgccctg

SEQ ID NO: 8722 - DNA, 2300 bp, Homo sapien
atactgaggttctatcaggttctcacgctctgttaatttgaaagcaaaaccattacatttaattgaatgtttaataaaatgaattatcagtggcttgttttattcggaattccattatttctttttccgaataatatagttttccagatttaagtggtaaaaatcaaagactttgttgtaaatttttttttttttggagacagagtctcactcttcttgcctaggctggagtacagtggcacgatctcggcttactacaacttccacctcctgggttcaagcaattctcctgcctcagcctcctggatagctgggattacaggcgcctgccaccacgcctgggctaattgttgtacatttttaatagagacaggatttcaccatgttggccaggctggtctcaaactcctgacctcaggtgatctgcccgccttggcctcaaaaagtgctgggattacaggcgtgagccactgcacctggacataaatcattataataattgtatggaattattatgaatcacagcgtcctgtgtctacacccctttgtaatgtgacattgtcactcttctcataaaaaattggaattttcccacttcttgaatctgggatggtcttatgacttgctttgaccaacagaatatgatggagtgatcttgtacattttggagtctaggctttaggtctttgcttccactctcatcttcttagaatgctaagaccaccatgcagtggaaaagctccatctaccagaagatgagaagccatgtggagaactaagacttcccagccaatagccagcaccaactgccagacacgtaagtgaggccatcttgaaccctccaaccctagatgtattcacggttctccagagaaacagaaccaataagatgtgtgtgtgtgtgtgtgtgtgtgtttataaagatatttattttaaggacttgactcacttgattatagagcttccaagtccaaaatctgcagggtgggttggcaggctggaggccagggaaaaggtgatgctacagttcaagtctgagagccatctactggcaaaattccttcttgctcatggaaggtcagtcttttgttctattcaggccttcagttgattggataaggcctactcacattatggagggcaatctgcgttattcaaagtcccctgatttgttactcagaggtgagaaaaatcatggtgtactaaagtcaccacaaaaacttctgtagatcatatggagaagcaggagagatgaagctggagagcaaagcagcaaatcagcaattaaaaaagatgtttggagttgttgagtttggagatgaaaagtgacaagatgaattctggattttagacaaagcaatccaacgtgtggatggagagggatttgagaggagaaatcagctgttgtcagtaagagtatttaaattaggatactggtaacggggatggagagacacacgattatacatgggaagtgagagcagaaagaattaggattatttcttgattttttttttttttttttttttttgctcaggcaactgaatagatgaagtcattaatggaaaccaggaacactgaagaaacagtgaacaattaaagtactttgagttatcaaagtgagatgtcctgcaggtagctagacgatactggctggtaattcaggagagctgctgcgtcctgtgtaaaaggaaaagcaattcatggatggtggctaaagccagctggcaggatttaggggatgggttagacctgcacttgttttgatggagaagaggcgggtataaagtggcagagtgagattactgtaaaatatctgcattcaaagggctaaaaaaagagaaatgctggaaaggctacttgctataaacgcagcagggtaggttaaaacaaattacgaagcacgggcggtgaggcgcggtgcttaagattaagcccggcgtgttttcgagtgcactgatacacaaaagggaaagggaccctcctcaccggaagcacaacctctgccctctggggcattacacattcctccgcgccggaagaaagcgtcacgtcgcgtcgcgcctcgccccgcctcgttgcgcctcgccccgcctcgccccgtcggcttccctcaatccgtacctctagtaaagaagagcttgtgcccctccccgaccccttaccaagggcgagctgcgtggagtcgttggactgggcagaactttggcgggcaaggagacaaacagccacactgtgctgccggggaagagaagaagaaggaaaggccagacacacaggcgtcgtgcagctgcggaagg

SEQ ID NO: 8723 - DNA, 2300 bp, Homo sapien
tgaaagcaacattcatctgtttgcatacctccaccagagctcttgggtgaccagttgcattgtgagtgagaagtaatattttgaaagaaatcctttttttcctgagcagtaggacttaaaataaaacatacataaaacggtgaacttaaaatactcagttaaccatgctataaacatatatgctgtcatccaggttttgttgttccatttatagagcacaggcagactatatctaacataattcttaagggctctaggatttcagggatgtaaatgggcactggcttcaacttaaagtcaccagttgcattagcccctaacatgagagtcagtctgttcttagaagctgtgaagccaggtattgacttctctctagctacaaaagtactacttggcatctccttccaataaaaggctggttcatatatatcaaaagtctgtagtttagtttagccaccttaatcaattaccttagttagctcttctgaataacttgctgcggcatctacatcagcacttgctgcttccaccttgcacttttaagtaacggaaatagctcctttccttaaacctcacgaaccagcctccgctatcttccaccttttcttctgcagcttcctcacctgtctcagccttcattttattgaagagttaggactttgctccagattaggctttggcttcagggaatgctgtggctggtttgatcttctatccagaccactcaaactttctctatatcagcaatgtctgtttcactttcttatcatttttgtgtttactggagtagcacttttaatttccttcaaaaacttttcctttgcatgcacaacttggctaactttggtgcaagaagactggctttcatcctgtcttggctttcaacatgcctttttcactgagcttaatcattttcagctttttatttaaagtaagagatgtgtgactcttcctttcacttgaacccccactgtaggattgttaattggtctaatttcaatattgttgtatcacaggaataaggaggcaagaagagagggagaaaggcagggagactgctggtctgtggagcagttaaaacatccacaacatttatgaattaagtttgccatcttatatgggcatggttcatggtgcccctaaacaattataatagtaatataaaggataacagatcagcataacatatacaataattatgaaaaagtttgaaatattgtgaaaattaccaaatgtggtgcagagacacatagtaagcctgtgctgtaggaaaaatggcgcagatagatttggttccatgcagagttgccacaaaccttacatttgtaaaaacagttacctgggaagcgcaataaaggaaagtgcgagcctgtagcagatgcacgttccatttagacatccttaggactcacaccagcgaagggccccagcttttccataccagtagctgtaattctgagacgaaagtgcttttcccccacctttacaccttgctttctggaaagataagaccataatggattttgaacttgcttttatcattaaagcccagtgtcttacatttctccggaaaaggaagcagtgtttgctatggaacaaatagtagaattttaatacatagtcccctgaccgtagaaactgaacctcaggtcctatcctggctctaggccacccggtcatggaagaagaaacttttcttagaatctttatctcttgagacaagcttggaaattacaacatatatgtaccatgaacgcgaagtacctgagctcaaagcagttgagcaatcttaagtgggggtgcccgaaagtggtgcgttctgaccccaaacgtcacactacccgtccctggaggagcgggttgcagcccagctgcgtcgccccgcgcagagctccaggcagaagaaaactacatttcccagagacctctgcgcggtcgggagcaccgcgaggaggggcgagatgggggcgggcctctgtgtgaaggcccttcccattggtgcgcattccaaagggccatgtaaacttcttcgcgattgcacggattcagggacgctcagtggcgccgcgccgctccttggtttgacttttgtttttcagttgcgttccctgactcggagtcttagtgtgtcgtgagtatagagtttcgggtttggggtgaaggggttaggtaagaagccttgggaagaaaatctggttagggagaagtaactgcggaagcagtgcggaggagaggacgtgagcctgaatgtggtgtccgtggaggggctggggaccggaggaggaaagctccaatgtgca

SEQ ID NO: 8724 - DNA, 2300 bp, Homo sapien
acagctaataagaggcagggctttgactcaaacccaagtctgatatcagagcccacattctcaactacaaagcaatatttatttttattattattttttccaggtaaggtctcactctgtcacctaggctggagagcagtggggcaatctcagctcagtgcagcctctgcctcccaagctcaagcaatcctctgcctcagcctcctgaatagctgggactacaggcacgtgccaccactcccagctaattctgtaatttttgtagagacagggtttcaccatgttgcccaggctggtctcaaactcctgacctccagcagtccattcaccttggcctcccaaagtgctggcattacaggcatgagccactgtgcccagcctattttaattgttttttgagacagggtcttgcgctgttgtccaggctagagtgcagtggcacgatcactgctcgctgcagccttgaaccctcaggctgaagtgatcctcgcaccaagcaggtgggactacattgccactgtgcccagctaatttttaaaattttggtaaagacagggtcttgccatggcctggccatgccaaggtccggtcccaaagtgatatatttttaaagggtagttggcactaccaggcacagtggctcacgcctgtaatcccaacactggcaggcagaggtgggtggatcatctgaggtcaggagttcgagaccagcctggccaacatggcgaaaccctgtctttactaaaaatacaaaaaaaattagccacagtggcaggtgcctgtaatcccagccactggggaggctgaggcaggagaatcacttgaacccaggaggtggaggttgcagtgagccaagatcgtgccactgcactccagcctgggctgaacagagtgagactctgtctcaaaaaataaataaataaataggtagttggcactatctaattaagaatacaagtgaaggagtaactattggatggaggaggatagaaacagaaaagagcaattgaatttattaatttggatgtctgctgaccaataagagcttggttagatgtcatagtagaagcccgaggcctggctcagtggctcatgcctgtaatctcagcactttggaaggccaagggaggaggattgtttgagtccgggagttcaaggccagcctgggcaacatagcaaggccccgtcttgcagccagagaggtgagtgtagacaacttttcgtagacatgtgcaacagtgaggacagtcactatgaaggagaagagggattgcaggttgttagaagggtctttcaaagcttcaaattacttttttttttttttttttgagacggagtttcgctcttgttgcccaggctggagtgtaatggcgcgatcttggctcaccacaacctccgcctcccaggttcaagcaattctcctgcctcagtctcctgagtaggtgggattatagggatgcaccaccatgcccagctaactttgtatttttagtagagatggggtttctccaggttggtcaggctggtcttgaattcctgacctcaggtgatccgccttcctcggcctcccaaagtgctgggattacaggcaggagccactgtgcccagccgcttcaaattactcttaaatggctttgaaacagtgaaatttaactttaagttgtcacccatatccgtacaatggaattttattcagccacaaaaaggaatgaagtactgatacatggtaccacataggtgaaccttgaaaacattatgctaagtgaaacaagacagtcacaaaagaccatatactatgtgattccatttataggaaagtccagaatagggaaatctgtagagacagtaggttagtggttgcttaggactgggagacagggataatagctgaaggacacagggtttttttcttgaagtgacgaaacttctagaatggactgtgctgataggtacacgtatctgtgaatatactaaaaatcattgaatttacactttgaatgagtttaatggtgtacacaaattacattccataaagctgcttttttaaaaaaatgttacccataatccttccatgccaatccaataactttattttctaggttatttggacaagaggcacattgacccaatttggagacgtattttggaaggaggtgagtttggaggaggagagtagtcttttaaaggagagaattagaagaaagatggcgtatttgaagggttggctgtagaagaaaacaaatgggatgagagaagcagaaacagatttttaaatctagattgaatagactggccagcag

SEQ ID NO: 8725 - DNA, 2300 bp, Homo sapien
tccaacatatcagatggtgagacagatggcaagttctactaaagctccagaaaggaaggagttgcttaggacttggctggtccaagaaagctttatagaatctgaaatggaccttggataaagggtacaagttgaccaactagaaaagaaaatgtgttggagggtagtgaataaactcgttttagctggagcaggtttcatgtggtcacataaagttggaaaaggttctggaaggccctgaattctggatttacagtgtgtatcttaatcaataagcattggaagccattaaatatttttgagcaggtgtgtgactacatacgggatttttttttttttttttttttttttgagacaaggtcttgctctgtcacccaggctggagtgcagtggcatgattgtggctcactacaaccttacactcctcccacctcagcctcccgagtaagttaggactacaggtgtgtgtcaccatgcctggctttttatgaagaccatctggtggtagtggacaggatgcgatgggaagcttggagttggggaggctaattaggaaaagtcctgtagaaactattgaatatccaactgaggtgagaacagagagaagggaaacatagttctcaattctgtgagaacctctgtcttggaacagtacttgtgtgatattcatttgattttaaaatgtccaggaacactttgatccttcacttttcccatagtctcctgaccatttttcccagaagagataatggaaaagaaaactgcagtataacttgctgagtgacctggggcagttattctgccccttgatactttatctaatttaaatcagataataatgctttacctgcctgaaggcagaggactggaatactgatttttttttttttgagacagggtcttgctgtgttgcccaggctggagtgcactgacgcaatcacggctcactgcagccttgacctccagagatcaagagatcctcttgcctcagcctctcaaagtgctgggacgacagccgtgagccactgtgcctggcttatcttgctgatcttttcaactctaagagtgaatacttttcttttctttttaaaattctttttcggaaccctcaaacacctactctcttcaaacagccattccagcccagtctggggaaaactgcttgctggggttcaccgtgggggctgtacgacttccccagcgcctctcggagatgtggttcaggctgggaagaaaggtcttcaaatctcaactggaaaacgaagctatgtctgcgttaagcgtccagtggctcccgtgatatttcacgcctactggtttcgtcaagcagggagtcgggtcgttgctgttggcgacgaaaggctctgaggctaaagccttgggcgtcgcccaaaccagcctctacttcgcttctgcctaaaaccacaccgttaggcgcctgggtggtgactcggtttccctcggtcacccagagtccgcatcatcactcgccccctcctcatcccacccgttcccagtcgggggaggcaccaggcaccagttctctggccccacctctcgctcccctagggaagccgaatggcctcttcgcgtccctggcttctcgggggcggagcccacctgtgcccggggcgggggcgggggcggggccgggggcgggccaggttccgcgagcaggagagcccagagcccggagcccggtccggggctggcgggggcgcgggcggaggcaggcgggcgggcgccggggaagcctccttctgggcagcgagtgagggcgggcgcgcagggagggagggcggcagcgagcctgcgacgggagaggcgtggggaggagagcccggcgcggaacacacgcgcggaggaggagccgggctcggctcccggagagacctgctgggcgcccgcgcagcccggagacccctcgcgcccggagcatgagcccgagccccgccggagagcggccgggagagacggcctcggcgcagccctgagacgctgggccgggacgcggggcgccctgggcgcggggcccggccggggggcggcggctcggggggttggagcccgcgctggcggcggccgcctcggcgcagcgccatggggagcccccgggccgcgcggcccccgctgctcctgcgcccggtgaagctgctgcggaggcgcttccggctgctgctggcgctcgccgtggtgtctgtggggctctggactctgtatctggaactggtggcgtcggcccaggtcggcgggaaccccctgaaccggagtaagtagcacccaggggaggcgaagggcgc

SEQ ID NO: 8726 - DNA, 2300 bp, Homo sapien
gtgcccggcagcttcggaggttttaagcagcagagtgacttggtcagatccgagctttagaacgagagttctggaagcggtgaggactccgtgtgggggagaagctgagatccagttggaggctctgctgcggcccagtgagggcccggcagggccggtggatattcctgtgtgacccacacccctgcacgatgccctcccctctcccaagggttacttgctgtgtgtccttggggagtcagtttacctctctgagcttcaatgtcctcacccttaaaatgagagggttccaacagatatcttctccagcacttctgactttggaagtttcaaaaccaccattggccatagacatgctctggtgcttggagtgaccagtgcccctccctgggccttagtcactgctggacaatggagcgagtgggcagagggcagggctggtgtgctggagtcccacgtccctgccagatacaaagtctccaagactcagagggacacaaatccttgggggacggggtggttctcatcccaggcccagggaggaagagggtgccttctggcccctcagagacccccacctacagcctgagagtggggtgaagcatggtttgagggctagcctagtgctgcacaagggcctgggcttagccaggtagctcctcttcccacactgccagcctctctgcctggggctgcctgcatcatctgatgatccctttgctcaggcaagaaaggccctgagggtgaggcaggagtggccagccagtgcctccctcggccctcctctccctgcccagtcccccccctcacccccccccacccccccccaccccccggcctctggcctccaggctgaacacaacaggcttctctggtggcatgccctcccccactgccctccctcctgggatctgtatctcctagggagggggcagaaagaagcctttggaggagacagctgagtcttataaactgaacttgaggattttcccccaaagtagcacaatgtccccattctttccttccttgaagccttaacccgccacccacctacccagcctactttccctctcccatccgttccagtctcccacttctgtttctgtgagtaacggctgcttcccaaggcccacattcctggcattgaccaggccagtgtgccccattagcgccacactctgctgcagggcagggagagacaggttctcctgcgtctttctggatccagcattgaggcagtgttccccagaggctgcgcccaccccaccagccacacctgggacctcgggcactcctgttgaggagttattccctgccccctcctctccctgcctgcccatcctccctcctacagatctcttgtagaacttgtgccacttcttcttatctgggtgtcccctcagagctcctaagggcagcccagattttgctatctcgtgggcatggcggggaggccagggcaggctgctggtagggagtcaccaggccccacctcccacaacctggacagaagccctgggggaggggaggacatggggtgatccgaggcccactgtcaggatgattggcacaaagtccccacacttcccctctcctctcaaatttccagccctgccacccactcagagtgctggctcctgccttccccctttctggggaagggagccctctgctcagggcctccaagcccagtcctgcagaggagaaaggggttccaacccaactggcactgccccgaggctgtcccaggagcagcttgctcagaatgagtctaggaggcctcagagagctgtgggagaccaagatgctgggaagcccagatgggccccagctcactcctgcagtgcctcccagctgcttcccaaggggagccagaagcatggagaccactgggtagataaggtttcaccggcagacagctgtggcgctttcctctcctcaggatcagggatggggaggggaggagagcaagtctttcctgaaaccccagccggctcctcctagttccctgtcctctcagctattctgtcacaaccattgtccccgttgcctggggaatgaacaccagcccccttcctgcatgggaggtccagggagagtatgtgtgtgtgtgtgcatggccagagcagaccttgtccccaaggccaggccatggggtgaacatcagcaccaggttcctgaaagaagtgctgggtgctgggctgggaatgggatagagtgggccggacccgcacagtgagaggagcaccggcccctttctgcccagcctcccggagctgaggagctgggatgggcatggg

SEQ ID NO: 8727 - DNA, 2300 bp, Homo sapien
gagctgtgattgaaccactgcactccagcctgggtgacagagtgagatcctgtcaaaaaaaacaaacaaacaaaaaaaacaacaaagtttctttactcctcacccctctcaaaaaaatgacaactgacgctaaggggatgttcagcccatggtaggaaatccagttatcggtactgtacgagggaggggaccttctggcctcttagaagtttctagaccttattgaggctatccctgcacagtgactctaagatcaaacggtgccttgtacctggggctgtgtgctgagtcctctgctgccagggtgctcctcaaatggccctgctccaggtgcgtggggcagcctccagctggcagcctcagccacagacgtcggcagaacacagctgccgcttgcgaatacagaaagggccctgctcagggcagaggacttcagccccagtttcgtgctcaccctcaccctcactcctcctcctccactgtcctcagtgcctctgatccccaagtcgcatctccgccacgtcctgcctgactgtccctacaaacccagctatctggtggatgggcttcctctgcagcgctaccagggactccggtttgtaagtcttgggcctgggtcatggagagcagggctggcagagggattgctgcctgtgactgggatgggaggtggtgaggctgactttcccatcttcccaacatcccatcccagcagacaggacgtcctcacaggtccctgggctgggaagaacttgcactcccagatggaccgccctgaatagactgtccagcagagcctgcacgtgggtgctctgcctcagggccccccaacacacaccaactcagcccagccccgtgatgatatcaggtggcctggctgaggcttcttaagctccctgctccaagggccacacaaccctaccctgcctggtcagtcccgccagctagtgagccagcaggacttactaaacccagagaccaggcactgggggaaaaagagctatggaggggaagttagctttaaagaacccagaacccatgcggaagccagacaggcagcgtggccactctcctgtgcatccagatctagagatgattataaggaagagctggagggcagaagaaagaggtcaggaggcatcaccaggtcagagaatggctggggtgtaattgagaagttctttggtggtggtgaccacgagctatgtttaagggggcaaaggaagcagtgaagtaaataggaagaggggttgttctagggctgtgggaggttgcaggtaaaggttcagaggtttcaggagaggatcaggtggcagagggaggaaggagtggttttggctgaagctgagggacgggagctggttcaggaggggagatgtggaccaggggcttgactcagggttgcatttggtccatagggcctgggatcactagcataacaaggggaatgagagccccatctgcatcaccacgtttcattcggcgctcagagcaacccttctctccctgccaagggcgggtccctagcagccctatgtgatcccagccaggggcaggcttaaccctggctggctgatttcttaccaagatctcactctcttactcctgctgctgatttttccacttccaggttcatctgtcttttgtttaccccaatgactatacccgcctgagccacatggagacccacaataaatgtttctaccaggaaaacgcctactaccaagaccggtgagagacactgagtggggcaggaaggtgaccttgcagagggctctgcgggagccaggagagctgcctggaccagggtgatggtggcaccccagcccaaagtctttgctcttgctcttcctgagtactacacacacacacacacacacacacacacacacacacacacacacccgctcaccagcctccttcctccactctagtctggggcaaaacgtcagactcctgctgagacttccagcagagccagggctgagcccgccatgcaccgggtgccaatgcacacctcccttcctcctgcaggttcagctttcaggagtacatcaagattgaccagcctgagaagcaggggctggagcagccaggtacagagtgacagctgaggcttccaggtcaggctgagaggggcgaccatggtctgtttccaggggatgttcagaccgtgccagccccgcccctgaggagctcaagatccaaatcacgtgacctctcccttcacacccaagggagtggagagcatgactcctgccttttccatatccaggcacatgtggaaaatgacactattt

SEQ ID NO: 8728 - DNA, 2300 bp, Homo sapien
aggggaagttagctttaaagaacccagaacccatgcggaagccagacaggcagcgtggccactctcctgtgcatccagatctagagatgattataaggaagagctggagggcagaagaaagaggtcaggaggcatcaccaggtcagagaatggctggggtgtaattgagaagttctttggtggtggtgaccacgagctatgtttaagggggcaaaggaagcagtgaagtaaataggaagaggggttgttctagggctgtgggaggttgcaggtaaaggttcagaggtttcaggagaggatcaggtggcagagggaggaaggagtggttttggctgaagctgagggacgggagctggttcaggaggggagatgtggaccaggggcttgactcagggttgcatttggtccatagggcctgggatcactagcataacaaggggaatgagagccccatctgcatcaccacgtttcattcggcgctcagagcaacccttctctccctgccaagggcgggtccctagcagccctatgtgatcccagccaggggcaggcttaaccctggctggctgatttcttaccaagatctcactctcttactcctgctgctgatttttccacttccaggttcatctgtcttttgtttaccccaatgactatacccgcctgagccacatggagacccacaataaatgtttctaccaggaaaacgcctactaccaagaccggtgagagacactgagtggggcaggaaggtgaccttgcagagggctctgcgggagccaggagagctgcctggaccagggtgatggtggcaccccagcccaaagtctttgctcttgctcttcctgagtactacacacacacacacacacacacacacacacacacacacacacacccgctcaccagcctccttcctccactctagtctggggcaaaacgtcagactcctgctgagacttccagcagagccagggctgagcccgccatgcaccgggtgccaatgcacacctcccttcctcctgcaggttcagctttcaggagtacatcaagattgaccagcctgagaagcaggggctggagcagccaggtacagagtgacagctgaggcttccaggtcaggctgagaggggcgaccatggtctgtttccaggggatgttcagaccgtgccagccccgcccctgaggagctcaagatccaaatcacgtgacctctcccttcacacccaagggagtggagagcatgactcctgccttttccatatccaggcacatgtggaaaatgacactatttttagcagcatgctggggtcagctggaggagagtgagagcccgggggaggttacttggactgctggaggggcttgctgtccctggcgcaccatttgggaggttctggtttagagaagcactgtcttctggggcctttcttgggggattagggcgtggctgggaccatctgctgggtccctcaggtgctatgcacctgccgggcatgtgatgccgtttatctcactcagtcttcacaaacccatgagagatgcagtattattccctttatgcagatgaagaaactggggttaattgaggttgagtaccttgcccagggtcacacagtaagcgatagaacctggattcaaccccagtctggagccccatggtgcgtcacacgtatgatcatcctctgtcttgtatgtcttgtttggaaagggttggaaactcttgacatgaggaatggttgttattaatagcaggttttgaggaaaaccttctagaagagtcccagtatggggaagtggcagaggagacccctgcctccaacaaccagaatgccaggatgcttgagggaagacagacacctgcctccaccctggagcaagatgccactgactaccgcctccgaagcctgcggaaactcctggctcagccccgggagggcctgctggcccccttctccaagcggaactccacagcgtccttcccagggaggaccagccacattccagtgcagcagccagagaagaggaagcaaaaacccagccctgagcccagccaagattcacctcattccgacaagtggcctcctgggcaccctgtgaagaacctgcctcagatgagggggcccaggcccaggcccgctggtgacagccccaggaagactcagtggctgaaccaggtggagtcgtacatcgcagagcagagacggggtgacaggatgcggcctcaggcccctggaaggggctggcatggggaggaggaagtggtggcggccgcaggccaggaaggacaagtggaggga

SEQ ID NO: 8729 - DNA, 2300 bp, Homo sapien
atgccaattatacattagcatgctaagagacactcccaccagcaccatggcagtttacaaatgccatggcaacacctggaaattatcctatatggtctaaaagaaggaggagtcctcaactgggggagggggaaaatctccatctccttcccaaaaagctcatgaataacccaccccttgtttagcatatgatcaagaaataaccataaaaatagccaaccagcagccctcagggttgctttgcctatagagtagccattctcgtgtttctttacttgtctagcaaactcgctttcactttacttcatggactagcccagagttcttgtacaagatccgaaaaaccctctcttggggtctggatcgggacccctttctggcaatgataccctcttattgtggtaattcatttaatcctcacaatgatcctctgaggtaggtgccattattatcttcattttacatgtgggaaaactgaagccggaaggatgaacagcttcccaagttcaccgaaggagtaagtggtccacaggactaggagcctgggatttgcaccgaggcagtctggctctgttctccattggccactgcgatgccacctgggtggagggagcacaggtccaatggcggggagagtacagtacaacccaggatcctgtcttccaggtctctccacgcaattaacctactcaaaacttcatgacagtccagcaagcttgtccaacccacagcctgtgggccccgtgcagcccaggacggctttgaacgcggcccaaaacaaattcgtaaattgtcttaaaacattatgagttcttggttgggcatggtggctcacgcctgtaatcccagcactttgggaggccgaggcaggtggatcacctgaggtcaggagtttgagaccagcctgaccaacatggagaaacctcgtctctactaaaaatgcaaaattaaccaggcctggtggcgcatgcctgtaatcccagctactcaggagactgaggcaggagaatcacttgaacctgggaggcagaggttgtggtgagccgagatcgtgccgttgcactccagcctcggcgacaagagcaaaactcaaaaaaaaaaaaaaaatatatatatatatatatatatatatgaagtttctttgcgattttttaaaagtgtatcagccattgttagtgttgctgtattttatgtgtggggcaagacaattcttccaatgtggcccagggaaacaaaacaattggacaccctggatgatgaaaaagagcactcttcagcccctgctgtcaccaaagccccacctcagttcttgcccttaggtaacgccaagatagcaaaatggaattttaccaaaccgctcttaggttccttccccaggagaccagaaatgccctggggactgcctgcctttgaggcaaattttttttcctttttaaagaaagtggtaaacatctgaaaatagagtttttgaaagaaagtgactcttcagttgtaattatagcagagagggtcattgctttctatcagcaagaaagctgcttctatttttttttattctctttttcttggttttttgttttgttttgttttgttttgttttttgagacggagtctcgctgagttgcccaggctggagtgcagtggtgtgatctcggctcactgcaagctccatctcccgggttcaagcgattctcctgcctcagcctcccgagtagctgggactgcaggctccggccaccacgcctggctaattttttttgtatttttagcacagacggagtttcaccatgttgacaggctggtctcgaactcctggcctcaggtgatctgcccgcctcggccccccaaaatgctgggatcacaggcgtgagccaccgctccccgccgctgcttctaaatacagcctgtataatgcaaatccccaaagagggccagcctctggccccattcagcttcctccctcagaggctgggtgcgtgcgccctgggcggggcggcgggctccctccggagaggccccagcccggcctcgtgcccctccccagcaggcttccggccctgcgcacagacccaaatggcgcgggaggaggaagaaggggtcagcttcaagcctgacgttctaggggggagccgcttcttaagtacgtgctaggatcaagggtgcatttgcaaacttttcaaaatgccttagaggaggtaggagtcaagcccttgggatctggaggggaaggaggagagtcagttaaaccgcagaaaggttggtggggagtgggctcagtaatggcccctgtcacagcctcg

SEQ ID NO: 8730 - DNA, 2300 bp, Homo sapien
caacccctccactgtggctccaatgttacagaccactcctaacttcagtcccggaagaatggaaggaaggctgcaacttaagagactgcggttagaagtgatcttcataaattgtttgccttgcctgtgtctagagtccttaaggtatgggtcctccaggcggttttcaggctgttctcttatgtaaccatgtttatgaggtgaaattatttgacaatgtgcttgtactattttcaaataatgaaaaccagccattgccctattaatgtctcatcagaacaaaaattctgccttccgtgtgcagactgctcactggttttcaaaactaccgcttctcccttctggaacagccctaccttcccacttggaagggggaatgggaaagtggctgcactgagttgcccctcctgtctcccttccctcccccaacccaaccccctccacctcctgctttgcagattctctaggttgatgtctaccttgatctgcaggtgggttccagttggagagtctctggacaaaagcaaagcctacttttctccccagggtgaaaggcgtggggagaggccatgaggatgggaggagtgtgctccaaatcaaaatgcttctcctggaagtcaggaaagaattccagatcactagctctgataagactcttgtgctaaagaaacaggctagggccgggcgcggtggctcacacttgtaatcccagccagcactctgggaggccgaggcaggcggatcacaaggtcaggagatggagaccatcctggctaacagggtgaaaccccgtctctactaaaaaatacaaaaaatgagccgggcgtggtggcgggcgcctgtagtcccatctactcgggaggctgagggaggagaattgcttgaacccgggaggtggaggttgcagtgagccgagatggcgccactgcactccagcctgggcgacagagcgagactccgtctcaaaaaaaaaaaaaaaaaagcaggctgtaagggaagtctcttctaacactgccctggagctaggacatttcctagactggctcagaaaagacctgtctttgaggacaatgccgctttagggtagaatctagcggaacaccacctttcgacatggtcccggcatggcctccccttggggcgtggaaggcgggaaagggcccgtatttcggtttgacagcctgagatgtgaatcccggttgagccattgactagctgtgaccttgagcacattcactttcctgaacttcaagttttctcatctgtgagtcgcggttaataatacttacacagtggccctaaaaaatcagagaggaaaaaaaagtctatgcaaaatgcctgcttcgtacaaagggcccagaagtggtagtttgtttgtttgtttttgtttttgaggctggagcgcaatggtgcgatctcggctcactgcaccctccgcctcccgagttcaagcgatcctcctgcctcagcctccagggtagctgggactacaggcgcccgccaccacgcccggctaatttttgtatttttagtagagacggggtttcgccatgctggccaggatggtcttgaactcctgacctcaggtccccccgcctcggcctgccaaagtgctggaattaccggcgtgagccaccgcgcccggcgctattattattaataactaagggaagcccagggaaaactcagcagaaatcaaggactctcgtgagaaaaaaggaaccgaaatagcccagactggcgctccccggactctgcagcgggcggcgctgcccacggaggggggcgggctgggagtgggggatccgggggagacgaaggtgaaggagctgcggggctagttctgagccgggaaaaggtgagggcggccctgggcctcccgcgggggaaggaagagatgaagccacgtgacagggcccaaagccgggccccgagcgcgccgcagaccggatgcgggaagtgggctcggggccccgctcccctgcccggctcgcccgcccgcgtcagctgacctggcttccgcgggccctgcgccctcgcgctcccgggccccggccgcccccacgccccacgccgcgcccgccggcccggccctccctccccagctggcccggccgccgcggcctcttccgcccggcgcccgcgcattcctgccattcccccgagtcggcccgcgggctacggccgcctgcggagcgcaggaaccttcacctcccgaggacaggcgccttcccctcgggacccggctcccctgctgcctgcgccgctctgtccccctgccgctgcccaagcctccagca

SEQ ID NO: 8731 - DNA, 2300 bp, Homo sapien
tctacagatgggatctcactatgttgctcaagctggtcttgaactcctgggctcaagagatcctccggctttggcctcccgaagtgctgggatcacaggtatgagccatgctgcccagccaagacaatatttttgacaaccaggttttcttgagagagaggattttctaaatttcttcatttccctttgaattgttgtcatagagttctacatcagatacatcccagccaaacaggaaaaaaaaaaaaaaaaagaagacaaagcgtacattttctgattctagattaaggggactatgggaagaagtaatctcagctactcgggaggctgaggcaggagaatcgtttgaacccaggaggcagaagttgcagtgagccgagatggcgccactgcactccagcttgtgcaacagagcgagactccatctcaaaaaaaaaaaagtgcttagaatagtgcttgatacatagtggtattattatgagcggtggggtgatagatattactggtagactttttaaggagtgctgagaagagtgggttccaggtctcatttccattcaggaatgtggaaggagatcacctcgcagactgccctgtgtcagttggagcagccacatcagagcaaactctgctggaagtggggctgagcttgcctttcccctgcccttcgtcagcagccctcagtccccatgtgcctaagggggctcaggagcactggtcaagcatctcacaggaaaatttcgaggggcttatcttagagatgtgggccactgagcggatacagtgggatgggggcacatacaagtcaaagccaggtctcaggatggtccacattgccacgagccaaggtagcgcagacagcaagggagaacactggatctcaaaggcagaaagagaatcacccatgagtgactctggcctaatatcagacatcagccaccaaggccagcagaagacccaggagcaggacctgtgtctcctcagcagtcagcaattcgggcgggcccgtgggcccagcagctccagaacagaaaggagccgagatggagaggccacaggatagatgcaagaaccgtccccaccccgccctcctgtgcacctaggtgccatcttctgcaaatccgaaagactgagcattgtgtctaaagtggactgtttaccatttaaatgattaaatccaactatgcttcatagattagactaaaatatggcccccatccaatcatccaaccctccctcgcaccactgtccagagggatgggaacttataaaggcatttcatagaactgaagaaatcgcctttttttttttttacatttgaatgtggtgagggtaaacgtgttgactctgcctgtcttcctcctgcccgcacctcttcaagccctgaattggattacaggttaacaccctgccatgcacgtctacagacatacccacacccacacctgcacaagcttgtgtctaaaccttgcttcaggaacaagccagaagagttttgggctctaaggtaaacaggagaggaaaaaaaaaactttctaaaaaaagactccctcctggtaattttattttaaaagtagggagaataccactgtttgcataaacaagcttcgaaggtacaactactccctgctccctctatggctaatcaagggaggagttgaaggaatcaaacaatccgtcagtaaaaacgtattgttcactcactttgcagaacaaagcctatgctttggagcctattaggtaaactacaatttttttaaaaacttttagggatatagggaacaaagcaaagaacaacggaaatccctctgcctcagtattgagactgtgctggaggtcactccacccgtggcgactggggactggacccagcggtgaagtcagatagcgttgtcctcaggctgtttttcaatttgcttgataaacatgcaggatttctttgccagtcataaagctactagctcaaagcaggctgggtgacctcagatggctccgctgggactggaaggtcactggagccactggtgaaaatgatgctgtcactaccaactcaaaaggtcacctatcagtgtgccatgtgccacctcctggagcacacacatgtgcacacacatacactcacacgtgtgtgcaggtgcacacctcccccagaggctgcagccaagacgggcatcccacatcagagggatgaatggcaggtctgtcccgccagctgtgtgctctctcccacccgaagaaagcagcagagactcagacggcggagcctggaggagcccacgcagtctgttcccggcacccgg

SEQ ID NO: 8732 - DNA, 2300 bp, Homo sapien
gccatttcttcccttgcttacattaggtttacggttagaaaaacactcttaattccatttgccataatgagattatttaccattaccaatagcaaacgaatgaaagatacattttctaaagcaatggaacactaatattttagtactctagttgtccctgctgaatcggcattttaaaatgttcgtaacctgtcagcttcatgaaacctaacgatcattggtttaaaacatttttgtaaacttgaaagtgtagcttgtgataaacaacaaaaaaagaaagaaaagaaaaatagggttaagtattttacgtatcagatgaattaacatgaactgcagggcaagacttctgtaggtggagctcatccgataactgtgctaaggaacctcctgccgagttccttgctagctgctcgctcgcagcgtggtcctcggccccgacgcgcgctttcgagcttgttccgcagcgggcgctgaagagaggcggccgcgtccggacgctctgatgcggttgcgtacgttttcagcgcttcccgctctccaccggttggactgaggcttttaaactgcagtctgctcccgagtccggcttcctactcggtctggtgcaccctggtgctcgtcccctccacatcttgagtagttgcgaagagcacaggggtccaggcagacaaggatgctttcaagaaaaacattccatggcggcaagccgcatggatccacatttcccgggcccagagcctttgtagacattgcatgtggacattcaggagctctagagaaagagggggtgttgtttcacgaagccaccagcagaagaaaggtggaaaataagtttcaaccaactacaaaggcagaagtcagcccagccccccaagtgtggtcaaagacccatagatccgtagaccttatcttttcttgaatccaccgctcccccaaccccccttttattatttttcagacaaagcaaagatagagttcactaggatccccgatttcagtaaggcagcccttttttgagagccagaatatccgtctcggccgggagctgagaatgtggccttaattgatgaggggaggaggatggaaggtaatcctccgtgtctcctcctccaatccgtttaatcaatattaatttcatgcacaatcttcacaaagtttcttttcccctcctccgactcagagctcaggctccggttatcctgctttgcccttcccttccaccctcacagccctgcagtcactcaacactactgaggctctctccattaaagatgaacaacagatcatttttcattgcatggcaaccctaagagctctctagcttagcagagcatgatgggagtctttccatccccccccccaccccccgcccgctcgttcctcttcttttttttttttttttccttcctttccttcttccacaattaatccctaaataatgattttcctaagctcgcgcggacttcgggatggggttgagcgacccgtgatgacgctcccatcagcctttcagaagggacggtttccaaagaaaactacaactcccacgaggcattaggctacagcaaccgcaaggcatcacggaagtcgtaggcacttttcttctaggtcccgttcatccccgccaacccgtaaactataagtcccagggtgcctcggggctagcacgcctgcgcaaaagccccggagcgagttggggggtggggctgctccgggcggcggggggcgggatccgagcgggctgtgtggaggcttcagactcccggcgccatttagcgcggagagtttcccgggtggacgcggctcctctctcggccactccgcacccccatcttcggtgacagaaggcgcctggtgggggtggctgctcttttctctccctgttccccctcacccagtcctctaggtctcctctcctcttgcctcagagaagcagcggagctcgggccccgcggtgagcggccctcccctccccgccgttccctcctccgtcagcccccggcaccggcccgggaggagacgggtttgccaggcctggggcgggcggggaggcctcggggaagggggggcccgctcctcaggcgccgaggctccgaggctccggcccttcgcctctgggcgatgggcgacctgtgaggccggtccccatcgctgggggcgcgtgtgggaggaggcggccgcccgagtgaccgggagccgggccgcggccttccctcgcccgcctcggcccctcccactcctctgccccggggccgccaccgcccgggcgtcggacctggtcccgtgctcgcggtgccgcc

SEQ ID NO: 8733 - DNA, 2300 bp, Homo sapien
cgaagagcacaggggtccaggcagacaaggatgctttcaagaaaaacattccatggcggcaagccgcatggatccacatttcccgggcccagagcctttgtagacattgcatgtggacattcaggagctctagagaaagagggggtgttgtttcacgaagccaccagcagaagaaaggtggaaaataagtttcaaccaactacaaaggcagaagtcagcccagccccccaagtgtggtcaaagacccatagatccgtagaccttatcttttcttgaatccaccgctcccccaaccccccttttattatttttcagacaaagcaaagatagagttcactaggatccccgatttcagtaaggcagcccttttttgagagccagaatatccgtctcggccgggagctgagaatgtggccttaattgatgaggggaggaggatggaaggtaatcctccgtgtctcctcctccaatccgtttaatcaatattaatttcatgcacaatcttcacaaagtttcttttcccctcctccgactcagagctcaggctccggttatcctgctttgcccttcccttccaccctcacagccctgcagtcactcaacactactgaggctctctccattaaagatgaacaacagatcatttttcattgcatggcaaccctaagagctctctagcttagcagagcatgatgggagtctttccatccccccccccaccccccgcccgctcgttcctcttcttttttttttttttttccttcctttccttcttccacaattaatccctaaataatgattttcctaagctcgcgcggacttcgggatggggttgagcgacccgtgatgacgctcccatcagcctttcagaagggacggtttccaaagaaaactacaactcccacgaggcattaggctacagcaaccgcaaggcatcacggaagtcgtaggcacttttcttctaggtcccgttcatccccgccaacccgtaaactataagtcccagggtgcctcggggctagcacgcctgcgcaaaagccccggagcgagttggggggtggggctgctccgggcggcggggggcgggatccgagcgggctgtgtggaggcttcagactcccggcgccatttagcgcggagagtttcccgggtggacgcggctcctctctcggccactccgcacccccatcttcggtgacagaaggcgcctggtgggggtggctgctcttttctctccctgttccccctcacccagtcctctaggtctcctctcctcttgcctcagagaagcagcggagctcgggccccgcggtgagcggccctcccctccccgccgttccctcctccgtcagcccccggcaccggcccgggaggagacgggtttgccaggcctggggcgggcggggaggcctcggggaagggggggcccgctcctcaggcgccgaggctccgaggctccggcccttcgcctctgggcgatgggcgacctgtgaggccggtccccatcgctgggggcgcgtgtgggaggaggcggccgcccgagtgaccgggagccgggccgcggccttccctcgcccgcctcggcccctcccactcctctgccccggggccgccaccgcccgggcgtcggacctggtcccgtgctcgcggtgccgccgccctctgggcctagcccgcccagctcggcgagcggcggcagtgggagccgcgtccgccgcatccgcctcgactcggtgccggcccctggccctcccctcatgactgcggcgcctctgctgccaccgcccgcccggccgccgctcgccgcaggatggatgcggaccgtgcggcgctaacccccgtggctcagctcccgaatcgcccgccttcgagccctcctcgtgagccgcagcagcctcggtgccagcccccgccgcagctgggcccagcggtccgcctgtccctcgttgcggcttgtcggtgctgagtgaggcgtcgtccgggtcggcgcgaacccgcccggccgcggttccctgcagacctctgcgcgggcggctcggcccttcacgcccttttcgttcacgaatccgagcccgctcgcctctctccagcgaaccgaccatgtctggcggcgccgcagagaagcagagcagcactcccggttccctgttcctctcgccgccggctcctgcccccaagaatggctccagctccgattcctccgtgggggagaaactgggagccgcggccgccgacgctgtgaccggcaggaccgaggagtacaggcgccgccgccacactatggacaaggacagccgtgg

SEQ ID NO: 8734 - DNA, 2300 bp, Homo sapien
ggaaggctgttttctgtgctctcatgcttctcccctcgcgtttcctgtactgtagggagcttactcttcccttcacactgtatgtgcaatagcaatccccttgtggctccagcagacaccaagaaatgagctgacactcacactgcagtagttccgtgtcttgccatagcggtaagaagcatgtgaccttcctcactgcagcttcacctcagaattagctgttactgcagcacagacctgcttgtgtgtgccattccccaggtggtaggatataagcttgacttgagaccagcgatggtcagtaacaggctttgaagtggcaggattgcgttaggtgtgctgctgtgatctggtgctgctttgaccttgaaagcaggataacgcatgcacttacttacccccgcattacttgggtaccttaaggactagtggttcacaacttactttaggagcttttatttattctgtaacacgtgagatctggtaagacagtggggggtaaggaaaacagacaagaccatgactcttctttccctcttccccaaaacgtgcctcttggaataatcttcagtgtgccctccagcagagccgaaatcaggcaggcatagactccctcctctctcatcaaaccgcagaaatagagttccttcatcataaccgcaaagcttcctcctcccctttgcaccctgcctcagctgcattttcttgtcgcttctacatgggagtgcttgctgttctgggaagagtggggagaagcggtgggaatccttgagccaattgaaactgaggtcatcttcaggaaaaccatgtcttcctgaagttgaaagattcaggcacaccatacagtcctttcctcatgaataatcttgttctttactcatgggaaattgggagaggttaacccctcccaagtttatgtttgcaaattcatgtttatgggtccaggtgaaaaacttttctgaacacagcatgctacttctcttattacctctctctatttaaagaatggctaggctgagcatggtggctcacacctgtaatcccagcactttgggaggctgacatggcaggattgcctgagcccagcagttcatgactaagcaacatatggagattctgtctatataaaaaagtaaaaaattaactgggtgtggaagtgcatacgtctagtcccaagctacttgggaggctgaggcaggaggagttggaggctgcagtgagacgtgattgtgccgctgtatccagcctgggtgacagaaaaagaagagacccttcctttaaaaaaaaaaaaaagccgggcgtggtggctcacgtctgtaatcccagcactttgggaggccaaggcgggcggatcacctgaggtcaggagttcttgagaccagcctggccaacacggcaaaaccctgtctctactaaaatacaaaaattaactgggcatggtggtgcacacctacaatcccagctactctggaggctgagacaggagaatcgcttgaacccaggaggcaggggttgcagttaggtaggatcgtaccactgcactccagcctgagtaatagagtgagactccatctcaaaaaaaaaaaaaaaggctaaagaatgtggcagtgtccaatggtttggaaacccaccttctccttatccttagccaagcatcttttcctactcctactttaaccgtgcccaatgcacaagaaaacctctttttccctgcattctgcaaaattccagagcaactagccttgctgattgtatcacacctccatcagcaacgtgatgctgggaatagcgtactggcgagcagttccaatactcttaggtgctttgtgaatggactgaaagaggcccctgcctgtgtacctaccgtcatcctgagttgttcagccttagcagcagctactgaagagaaactgttttcatcaccctattataccaaaacaaatggctaaacaaaaccttggaatcttccctcttgcatggcttcccagttcatcctcttctcattctgtggcttgccattcatcatcccgtgaagttttccctcttcctgaaattgtaacctaggcttcttttaatgctcgtattctgttgcttataataggaaccagcagcacaaacactgttggggcaacagtgaacagccaagccgcccaagctcagcctcctgccatgacgtccagcaggaagggcacattcacagatgacttgcacaagttggtagacaattgggcccgagatgccatgaatctctcaggcaggagaggaagcaaagggcacatgaattacgaggtaagtctctc

SEQ ID NO: 8735 - DNA, 2300 bp, Homo sapien
ataagaaacaaaaagaaagaaaagtaaagtaaacctaaagtgagcagaagaaaggaagtgatgaagataacaatgaaaatcagtgaaacaaacaaatggaaaaacaattgtagtaattaataaaaccatgagctggttctttgaaaagacaggtaaaattaataaacatctagctggactagtgaaaaaaggagaggacacaaattaccaaaatcagaaatgaaaggacacaacaaagaaaacaacagagtgagagaaaatatttgcaaaccatatatccaataaggggttactatcctattctaaatatgtgaagaaagcaaacaactcatagcaaaatcagatcacacgactaaaaagggggcaaagggcaccaggtgcactggtttacacctgtaatcccagtgctttggaaggctgagacaggagaattgcttgaggccaggagttgtgaaaagcctggacaacatagaaagaccttgtctctacaaaaaaattttagattagccaggtgtggtgacatatgcttgtagtcccagctacctgggaagctgaggtgggaggatcacttgagcccaggagttagaggttgcagtgagccatgattgcagcactgcagtacagtctgggcaacagcttgatagcttgagaccctgactctttaaaaaaaaaatcatttatcaaaagatgacatacaaatgatcaacaggttcataaaaatgctcaatattggctgggcacagtggctcacacctgtaatcccagcactttgggaggctgaggtgagcagatcacctgaggttgggagttcgagaccagcctgaccaacatggagaaaccctgtctctactaaaaattccccagaggctggggaataaggggctgggggagataatggggagatgaagatgttggtctcagggtacaaagttaacagttaaacaggaggaatacaattttgagatttattgcacagcatagtgactatagttaataataatttattgtatatttcaaaatttctaagagagtaagttgaaaatatctcgccacaaaaagaatgataagtgggctaggtgcagtggctcatacctgtaatcctagcactttgggaggctgaggcaagaggatcacttgaggcgaggagttcaagaccagcctgggcaacatagcaagaccctgtcgctacaaaaacttttttttttttttttgagacggagcctcgctctgtcgcccaggctggagtgcagtggggcgatctcggctcactgcaggctccgtcccccggggttcacgccattctcctacctcagcctcccgagtagctgggactacaggcgcccgccaccacgcccggctaattttttgtatttttagtagagacagggtttcgccatgttgcccaggctggtctcgaactcctgacctcgtgatcagcccgcctcggcgtcccaaagtggtgggattacaggcctgagccaccacgcccggccccaggggacattctagaggggacttcgccccccaagccgcacttctccatttccctgcggtcgtcgctaaccgaaggcgccatccggtgacgactggatgtgcgcggcggtggtgagaggccgcgagaaccaccaggtccaccgctgcctcggcccgggcggaatctgggaaggtctctgacaaccattcatcctcagattttcccaattgtgcatgggtgggcgggccccgcatcctaatgggcactgggcatgtgaagtgtgaaccacccgggcctaactagccgctgaaggcctgacgaaaccgccaggcccaccagggggcagcagagatccgacggccgcggaccgagggaagctggcgggaagtaggaggcagagggcgcgcagggaagcggcagggcgagcggctcagaacgtaaaagccagcaccgcgcctccaggttgctttacggctgccgcagaaggctttgcggctcttttcccctccgacttgatttacggttccttctctggtctgtgtttttttttttccccctccggcgctgggcgtgggttcggaccttcttcccagagacgctcgcgcacccttcccattctcctctgcgcggcctccatctaagatctcttccccttgtccatagcctagatcgagctccctgtgtgcaccgcgcgctgcccgaggcgcgtaagtgggggaggagagcggcttcccccggggtggttctagccgtgggtgtggagcgtgggaaggctcagcttccgggtcgagaacctggggctgcggtggacctgatcctgaggtct

SEQ ID NO: 8736 - DNA, 2300 bp, Homo sapien
ctgctcttccttatatagacctttatttagtctccctggtctcaactctgcttctcactcttgctctgtctggtagttatctccaaatctccgtctccctaaagcacttctgggctgacaggtccccttcctttctacagcaccctctacacccattctacattatgcttttctccattttattttgtcagaccacacttactttttgcatgtcaaataaaaaaaaattatcttccgatgtcccccttctcattttctattttgtatcacttttatttatcatcattttatggggtctcaggaagaagagacagtaaatacatgtgctcggttagctagctttaatcaaaaatcctaaacgtaggttttaaaaaagataactggagcagggcaggaaataatattttttgccagtgtggtggcaaaaaataaaaaacaaaaatctgaatctgtgttaggacagtatttccgtgtataacatagcgcttagcaacttaattctccagatccacatattttaaggacatgatgtatctcagacacctacttcaaacctcactttacagttaagtaagaccacaagtagaatgaattgcctgaggccacacaagtagacagtgggagaatgagaacagaaatatctattgactcctagttgaattttctcttaccttaccacactgctagggagtaacaagatgggcagatcacgagtcagatgagaaaggtcatgaaaaatagtcaaaggatgacttttcctgggtaaatagccggatgtccaagaaatgaaaggctggtctggcagcagcacatcgtctaacagttggtagtcatatgtgggaagtactgaagggggagatgacagcaggcccagaaactgcaatgatccaagtgcatgtcgatcctgggagggaacagttaagagtccgggcaggatgaaacagtagaaactggtgagtgaatgaatgtgaaggctgaggagcgactgcaatttgttaatgggattatgaggcagtataaagtggttaattacggtggcggaggtaagcaggagtaaaatgatggcttttaactcctctcaaggacaccgaaaattattttaataaacactggaaggctgggaataaatataattcacaccattcttactttcttggtttagagatagcttatctacatccttaaattaatggctgtagctaccctctgcatggctccaaaaaaaaaacaaaaaacaaaaaacaaaaccaaagccggctgcgagtctgcacgagaaaatcgggttgcaccaggccccagccgcccgccgattcgcttagctgtcggaggctaaataaacagctcccgaagcagcgtttggcacagcgcagggtcggaacgtggacactaatttccgcccacgctccccgcgtcctggcgggatcaccacagacacgacgtccattgctggggtcctcggcgatgcccgtgtgcgcagccccgcgagtctcaggtcagaagaccactaatttcgcggccgcgttccacgaagctaaggggcaaaaaaccagctttcttgggacaaagcgtccccccagcagccagggtcgatcccggcgctgctcccgcggcgcttggctgccccgggcgtaacgggccacgagaagtagggggtggggcgccgcttaggtttgggaagacacgaagcggctcctcgggcttccagcgtccacttcctacggcaagcaggaggagacaagcgccaccctgcgctcgcggagccgaccccggctctcccctcccgtggccgcaggggtcgtgtgtgtgtgtgtgtgagtgtgtgtgtgtgtgcagggacgctccgcgcccatcactctgtttcggtgctaatcgaccgccgtggcgccgatttcccccgcttcccagttcctcacccgcgtgccccggaaggcgcccggaggcccccgggccgccgcgtcacgctcccgggaggctgagggaaagggaggcagccgagccgggagcccggggaggcgcgctgcgccccgcggcggggctgggggcggggctaggtgtctcgcgcagggggcggggcgcggtgacgtcgcgggcgcctgggccgtgctgtggcggcggcggcggcggtagtggcggcggcggcggtgcctgggcggcagcagcagcagtagcggcagccctgaggacggtgagacggccgcggcggcggcgacagcgcggaagtcgcgcgggacccagagcttcccccctgtcgctagtgctgaggctttcgcctttcctacccagcttcttgctcacggccc

SEQ ID NO: 8737 - DNA, 2300 bp, Homo sapien
accaccttgaaggagctaagcgtaatgcgacccaaatggtggctgccggaacgaagttgtctaaaccgaagatctccctcttcttcggtgtaaaactttcagatacatccacgctcacaatttacctgagccaaagtaaggggattctcttccctctccgaccccccacccaccccgccagaagaaaaagaatcgaaccctaaagtagaaacgtgagatctagtgcaataaaataggttctgcaactgcctcaaaggcaacatgcacagctcatcgtccttttgaaatacacttcatcttttatctcaccatttcatcgaaaagaaaagaatcatcttcagcattttacatcactcacctaacccaaagatccaccctgaccgcaccccaacctcatggctccccaatttctccgtctccccactacctcgtccgcggcttcactagtcctaagcctccccccctccgctccccaagtgcccagagccccagtccccactcccccacctcccgccccaggatccccacatctaccgcctcggctcccgcccgatcccggagcccggctgggtggagcccgcgggtgggcgccggtggtctgggtggggcccgcccctccccaccccccgggctgccgaggagggggagggggtcgcgaagcctcacctacagctccgcccctccccgggggcgcgttgccctgcccagcccagcccgggccgtgagcaagaagctgggtaggaaaggcgaaagcctcagcactagcgacaggggggaagctctgggtcccgcgcgacttccgcgctgtcgccgccgccgcggccgtctcaccgtcctcagggctgccgctactgctgctgctgccgcccaggcaccgccgccgccgccactaccgccgccgccgccgccacagcacggcccaggcgcccgcgacgtcaccgcgccccgccccctgcgcgagacacctagccccgcccccagccccgccgcggggcgcagcgcgcctccccgggctcccggctcggctgcctccctttccctcagcctcccgggagcgtgacgcggcggcccgggggcctccgggcgccttccggggcacgcgggtgaggaactgggaagcgggggaaatcggcgccacggcggtcgattagcaccgaaacagagtgatgggcgcggagcgtccctgcacacacacacacactcacacacacacacacacgacccctgcggccacgggaggggagagccggggtcggctccgcgagcgcagggtggcgcttgtctcctcctgcttgccgtaggaagtggacgctggaagcccgaggagccgcttcgtgtcttcccaaacctaagcggcgccccaccccctacttctcgtggcccgttacgcccggggcagccaagcgccgcgggagcagcgccgggatcgaccctggctgctggggggacgctttgtcccaagaaagctggttttttgccccttagcttcgtggaacgcggccgcgaaattagtggtcttctgacctgagactcgcggggctgcgcacacgggcatcgccgaggaccccagcaatggacgtcgtgtctgtggtgatcccgccaggacgcggggagcgtgggcggaaattagtgtccacgttccgaccctgcgctgtgccaaacgctgcttcgggagctgtttatttagcctccgacagctaagcgaatcggcgggcggctggggcctggtgcaacccgattttctcgtgcagactcgcagccggctttggttttgttttttgttttttgttttttttttggagccatgcagagggtagctacagccattaatttaaggatgtagataagctatctctaaaccaagaaagtaagaatggtgtgaattatatttattcccagccttccagtgtttattaaaataattttcggtgtccttgagaggagttaaaagccatcattttactcctgcttacctccgccaccgtaattaaccactttatactgcctcataatcccattaacaaattgcagtcgctcctcagccttcacattcattcactcaccagtttctactgtttcatcctgcccggactcttaactgttccctcccaggatcgacatgcacttggatcattgcagtttctgggcctgctgtcatctcccccttcagtacttcccacatatgactaccaactgttagacgatgtgctgctgccagaccagcctttcatttcttggacatccggctatttacccaggaaaagtcatcctttgactatttttcatgacctttctcatct

SEQ ID NO: 8738 - DNA, 2300 bp, Homo sapien
aacaagtatttaaacttcatttattgagtgatttttcatttcctcactgtattagtctgttctcatgttgctaatacagacatacccgagactaggtaatttaaaaaggaaagtttttttttttttttttttttgagacggagtctcgctcttgtcacccaggctggagtgcagtggcgcgatctcggctcactgcaatgtctgccgcctgggttcaagcttcttatgcctcagcctcctgagtggctgggattacaggcacctgccaccatgcttggttaatttttgtacttttagtgagattgggttttgccgtgttggtcaggctggtctcgaactcttgatgtcaggtgatccacccgccttggtctcccaaattgctggaattacagatgtaagccactgcaccctgccaggaaagaggtttaatggactctcagttccacatggctggggagacctcacaatcatggcagaaggcgaatgaggagcaaaattatgtcttacatggcgacaggcaagagaacttgtgcaggggaactccaatttataaaactatcagatcccatgagacgcactcactaccaccagaacagtagaggggaaactgcgcccatgattcagttaagtacacctggccccacccttgatacatgaagatgattgcaattcaaggtgagatttgagtggggacacagccaaaccatatcactcactgtttggaaacgttacttttaacatatattaaattcccatatataatttagaccctgttcttgggctagtactatacagttttcgttattatagttttacaaggctacaatactttgtaagaaaccttgcaggtcagatgtggttttgttgtcaggaattttttccagtaatacttagtggacattatgtagtatccagtaatcacacacattgttttcttaatgaaatatatgaagtcacactatgtgggatacatataaacagtaagtaagctcagatcaggtcaaggtttgctgctagatgagttaaaaggaaaatcttattttcagaggtttttggatttttgcagtacaaatgaagaattatggatttgtaatttatgttgctgttgagggctgtcttccttccttgttcatctattttaaattgtttggttactcttgtatctttactctccatttgaattttagagtcagcttgttgagttacttgaaaaatccttcaacacctgtgaaaggaagggatctatagctggttagcaaaatcctgtagagatttttcactgggattgtgctaagtagttggggaagaactaaatcttagcagtgtttgtcttctcatccatgaacacagataactttgtttaggtgttctttcatgtctttcagtaaaatgttatagtttttttcccccaaaattcttgcacatttctgttgatttacatcaaagtacttttatggttttgttgctgttgtgaatgggatttaaaatttcctttaaattaaaaactgcattttctagttgttactactgatgtatacattgatacttatatattgatattgagtttgaccagtttgttgagttctgttattctaataacttgtcagttgattatcttgggttttcagttagcaagtcagatattcagacattgagtttaatcttttccttgtcaatctttatacttcttgtttttttttctttttcttttttgtagacagggtcttgctatgtatcccaggttggtcttgaactcctggcctcaagcgatcttcctaccttggcctcccagagcgctgggattataggcatgagccattgcacttggcactttttttgtttgttttccagttgcatggtatgttttcagcgttcagttttgagacatctaaaatatctctaaaatattgtttactatgagtacattatgctgtaatcacattctgaatgcgtgagtacatacatggtagaagggctagatcttctttaagtgggggtaatggaaagtctctgagaagggaaatatttattattggaggatttaatgtgtgatcttttcattacagatatggtgtaagatacttcttcaagattggacagctggggaccttcttctgattaaccttaaaccaacttgtagccatagagacacctcacaaggttcccatttttgttgttgttgttgttgattttctgctcacacctttcctgaccttgcaaccatgtatggaagtgcccgctctgttgggaaggtggagccgagcagccagagccctgggcgttcacccaggcttccacgt

SEQ ID NO: 8739 - DNA, 2300 bp, Homo sapien
ggtggacaagacagacctgtcccttgacttatataatttatagcctctattaagaagatagacacttaaaaaggtaattgtagtaaatcacatggtgtgagggaagcttatatcaaggagaactaacttaggtcaaggtcatggagaacctcctaacaaaagcgacactttctaagctgagacctcaaagtaaggactcaccagcgtgtatgaaggcccagaatgctgatatgcagtagttatatttatatttgtggagttataataaataatttataataaattattagaaatcagaattatctcagtgacgttaaatgccagctggccttcacttttgtttacacaatcatcttttgtgcccctacatcaagctgcctcctattgcctatttcgtcaccttctttcttcgtagatactaagaattttctcagttacttctgcttttgtttgcatcttcaatctcttcgcctttgttgtcccctctctttatgtgtaatatgatcagctttctattgaaatatctcctgatcttggtactccttatggtcttcttccctctctccttttctattagatatatttatagccttctcctgcccatgaaggattgactgctacaggaatttccctcctacaattaacaactcaaaaactgggaaaccacgtgaaacaactgattttagacattggacaacattcagtgcagaacagtgctctcatcttaccttccaaacttatatgatttttgtttcttaaaatatacttcatatgtgtatcaaggttaagggttagggaagcctatatttaagacataaaagatttttttctacacatgtgaagccttaaacaaatgaacttgggaaaggacttatcttaaaagtatagctgttactttcaccaagcgtttaatacaattatataaacatttctcatttactcaaggtactttgcttcagagctttctgaaatatttcctaagaatatatattttctcctttaatattttttcaaaccattttaagggactaaatatattctgttgtctattgaataagaaaaaataaaacgtctaagcttttgtcttctcattaaacacattatacatacatggctttagagattccagaagacagctagggacttgaaaattagtttttaattattgaaactgttttgtattccaaaatgcattaacaatattagttgacttttgtaggatcctgaataaaaatttttttctcagatcttagtgtggttctttcaaaaaaatttttcttaaacaatttttttttccaatagagatggggccttgctgtgttgcccaggctggtcttcaacttatggctgcaagcagtccccctgcttgggcctcctatagtgctgggattacaggctcaagccactgagcccatccttaagtgtggttctcgatttctgaattcatttgtttgtcccatattattttgtaaattctctaatccttgcatgagggaggtacctgtgtgatggtagcagctgttttcttaacctgactcacatttttatggcatcacactcccagtatctgtttgattctagatgcccaaggccatgtgagtcacacgtgttaggtaaagcagcatataggaaatggaaatggaagttagggtctagtgggagttaggtctctgcactggtccggctatacgatcagcagtgagtccctggtgttgccttttgatattctcttggagagatcaataacaacagttcaatgactgttagtttgtctcactaaactctgaagcatcttttgccttatgatggtgtttgatttaataatattcagagatgtgttatttaaaacaactaatctacttggaacctaagataattctccatttattactaatatttgtctatataatacttaagcagataaaaaccttataaattacaaactaactggtagatatttgataattctgtacttaaattggaatataaatcattgtttgggacatggtttgcccattgccacctgtgtgtatctgataggattgaaatgcttttctttgtaggcacatgaggcagcattggaagccagagccagtccagagatgagtgaccgaatacagcacttggagagagagatcaccaggtacaaagatgaatctagcaaggcccaggcagaagttgatcgactcttagaaatcttgaaggaggtggaaaatgagaagaatgacaaagataagaagatagctgagttggaaaggtaagaaagtgaagctgattggggcttatgaggttaaagtatg

SEQ ID NO: 8740 - DNA, 2300 bp, Homo sapien
tcattaattccagaaatcttttttaaataaggctgtgaacactgagctcatggagtacactctggtttcactgccggcttcaggtaaagtcatgacatgagttttataatgaaacactatgaaacttgattctctgcattgtgacagattactaatcattttctccctaaaagttttttattgatacagccacaaagctatttttgccccacgcagatgtacaagtgaagttgtttgcttgaaatagattcctgggaagttatttggaattaactgtttgagcctcaattttagataatagaagcctctcaggagacttgcaaaaaacagtttaagagtgggataggatagaccgcacaaagacataatactgagttttccgtaagttgctaatgagaaacgttatcaactttatgtattaataatgtttctttatgcttctttatacttacagcaatctgtattttagaatcccacattactccaaaatagtcattctcattcattagagggtttgagaagactgaactaatcattgcatccatctcttagttcgtaatccttcttttatgtttagttttctttgattctgaagaaaccaccttggcctttgttttgacgggcatcgttccttgtctctgcgcgcggcgtccctttaaaaccctccactgtactgtgctgctcatggcaagtcaacagagggaaggaagagctcaacaaacaacgtttgttttcttttgttttgttttgttttgttttgtttgatacagataaactgccctacataaaacagaacctcacttatgggaatagatcacagtattttataactgtggagaaacacagttctctgagaagaatgaaaacttgtaacatgaacatcacgtacagcaccaaaatgtgaatttttttctaaatctcattttttaaaatttagaaaaacgagagaggaaaagatttatcaactgttcattaagaagaatgttaaataatagatgctgttcttccaaagtggggagaaaaatctgacttaactttgacagatttcaagttctagatttttgaaggtacagttgtcaaaaaggacttacaaaagtgggctgtggtataattgagtttcttagataaaataaaaaattcttggatatcttttcctgatatgagtactctgaaaattggagaatggtttagcaaatcttgctcttttgttttatgtatttttaaaaggaagcactttattcttaatcctctagtttcataagaagttaaagaaggaagtgcctataataacctgatgactgcagttctccatcccacttgaactcttcttcatgttgtcttcttaagatctctcctatcttacatgaactcagcgttctgtagggttttgtttgactttctgatagatcaacattcacctctccggaagctgtgttttaaacttgtgtagaacatcagggctgggaattgcttagttggctgataaaattgctcattcttagccagaccggtcacttatatccagttgtcatttttggttttctcctatgagattatgagaaaaccatacattcttgaaatactaggatgcatcacttgcttttcaatgtcttttaagaaatcgtttgctgacaattgtctatgaagaatatcatctgaaagatgatgctgcttactgcactttttcatgtaggcttaactgcagggaaagagtgttttgatattcggtcgaattactatctcatcaaagctggctttatgcttagagagtagttcaaaaacaactttgtgcttttaagtaatcaagcccttgccacctctgctgtctaacacagttttgttctctctgttacagagagcaaatttctcacatttgtcttgcttaactaacttgagcctttgctgttaatgatatacttcttcagcctccttctttcctttccttgctttctttattgtgtcctctgtgacgatatcttgttgacctggatttgcttctgatggaaagaacatttaataagcaaacagccctttcttaataaataggctctccctgggttaagtaattaatccacttcacctagtcttccatcattttctaggacagtctccgtaagaaggatgacaggattgaagagctggaagaagcactaagagaaagtgtacagataactgcagagcgggaaatggtgctagcacaagaggaatcagccaggaccaatgctgaaaaacaggtctgctattttatacagttccaagcaatgctgctggttaaccaaaaggtaacacacaaccagtat

SEQ ID NO: 8741 - DNA, 2300 bp, Homo sapien
ttctctctaaaggaaaaaaaaaaaagaactttagatcacaagaataaaagttctttttgatatttaaattgagacagggtctcctctgtcgcccaggctggagtgcagtagcacaatcatagctcactgcagccttgaccacctgggctcaagcgatcttcccatctcagcttcctaaggcctgggactacagatgtgcaccaccacgcccagctaatttttaaaatttttgttgtgtagagatgaggtttccccacgttgctcaggctcgtcactaactcctgggctcaagtgatcctcttgcctttcagtttcccaaagtgttgggattacaggcgtaagccaccacacccagccaaagttcttaaagctagatgttctgagggaattttatcttttctttttacaaaatcatggtccatacatggtaagaaaagaatataactgagtcaaaacataaaccaactatacacctgtgtgtacatacagtgaagtatctttaaataaacccagaggatataaaggcatttttagattcttactgaaccattcagattgaaagcaaatgatataaggccaaactctccaataccatttttttctcctatactctgactattcattataaaaggatttctctgtatatatgtatctgtacaaacatacgtggttacattgttaaaattttcccacagctactattgcactcttgattttctctattctctaaagtttcttttttgtacaactgagctaaatggctttcagtcttttctgtagaagaaaaaaacagaaaaccaccatttattaaaatcaggcttttctaaaaaaagttgttaattatagaaaagtatcttaaattatctatctcttcatagttgttgaaatatttccacttataattttataaatccaaatatttgaaaaactttgatttccagaaatatacaagtatcaggtatagattgattctgataagaaatgaatacccattaaggaccacttaaaatgaattggaagctgaataaagtaatgatactagacatcaaagctcaactgctgccagaggtatggttttccaaaacaggtaaatatgtgacttgggctaagggatgaggtagtaatgaaaattataacttaaaaaaatcggttatctgcatgtaagcattaaaattcaacctactgattacttagatatctaagcccagaacatacattttattttcctaaagagaaaaggtagtttgcttaagtcttccttcaaaaataaatccccacccttgaggcctgatcactcatgagatctgatcaaattcctcatctcccactatcaatatgtcatctctctggcttgtcttcagcaactcctgttgagtaggtctggcaagaatcccccagccatgacgtttcttcttagtaattttccatcactgacccccaccctgctccttcgctacacatctccattggtccttgtgtattctgagttgagcccaatctctgccctctaacacaaatcctcatctcagtggtcccctgaatagtctgccttactgtctttaagaagtatcaggaatatttttttttctccagcacactaagtataaaagtacaacaagaactatacacacagacaaacactaaaaaggcagagagaaggcagaccagtcaggagtgctgtgacctgcagctccctggatctttctgccttatatatccagaggtagagctgaagaagccaacaaccaggaaatgccaacaggcacagaccaaaaaagcttcaacaggagcccactctctctagccaaagaagcctccaaaggaaagggacagcctagcaacatagaaacctgtgggacaacaatcactctattccaaagaccatgtggtcccactgtcactcatgtcagtaaagaccaagcggcgggccccatgctcaccaggttgtgaggaggtgcttcagcctctccttgctccactggaaggtgtcagggaaagccgagggaggcagggctataatctccaaccatcagcaatgaagtctcccctccacagtgtcactagagactaggtgaggattctagaattccacctccatggagcagtaacagccgtgtctcctggtggagtcggaccttcactaccgcacagcagtaaccaggccccccttccttcacccccactgtgttagtggaggccttcctaccctaaccaggcagggatacaccagtgaagcctagtggggacatgaatacccatctccacctaggagtaacaagaagcctccaccccttgagtgt

SEQ ID NO: 8742 - DNA, 2300 bp, Homo sapien
tgggattacaggcatgcgccaccatgcctggctgatttttgtatttttttagtagagatggggtttcaccgtattggccaggctggtctcgaactcctgaccttaagtgatctacccgcctcagcctcccaaagtgctgggattacaggcatgagccaccgtgcccggctgaaattgattgtttattaagaataaggatctaaaaagtcagcatccgcagtcatagtggttgtaggagtgagctaataatatctttttaaattctgttttactataaggaatttgaccttctcaatatgaccatttatcacattgccccctttcttcgtggtcatacttttttctgccagttttgtcagtcaaaagtaattacctaagataagcagctctttcagcctttgcagcccagatgtggcatttgtgatggcagctctatacccacaaacatgcgcgtgtgcaccaaaagaatgggaataaattgcacaaatccagtgaaaatcccaaaggtgatttttttaaatcaatgtattcatgaaagaagatagagaaaaccaagcttttaaaaaatgaggaatgaaatagggatatgttacttggcatcatgggggtgtagtaacagaaccgtgatgagacggtttcgtcattggcgcacagagtgtgcttgcatttaaagtaattttacctttgaagactgcacctggaatcctttgtaaattttccacaatgagtatactttttgttgttgttgttgttttgagacagagtctcactctgtcgccctggctggagtgcagtggtgtgatctctgctcactgcagcctccgcttcccgggttcaagcgattctccggcctcagcctcccacatagctgggattacaggcgcacgccaccatgcccgactaatttttgtatttttagtagagacagggtttcaccatgttggccaggctgctctcaaaatcctgacctcacgtcatctgcccaccttggcctcccaaagtgctgagtttacaggcatgatccaccatgcccgaccacaagtatacatgtatgcccagaaataaaatacaatatttttgaaaagttggtattgtttgcaaaaaactatccagctcccccactctaaattctctacttgattgaaacactgtcttccttctgtgactggctgtgttgacatgcctgtcataggtaggaaattccagcccagaactggtaccgtaaacctgctgattaggagtctcttacagagcccagcagccttccacagcagaactttggtgtttatcgtttatccttagagagagagagagaattttaaaaacaaaagtaatgctaaattgattaattttctctggtttgtctagccaggctccagcttctgtgtaatatactgtataggcctaaactgaactctgatctttttagcaagctgaagattgttttagccactaagcccttgctctttattctcttttaattatttcctggaaatagtattagaaacaaaggaaatgtgctatatgtattatgcagccatgaaaaacatagtttcggtcatatataatgtagtgaacagtactgacaatataatgttaaatagataatgtatcaagcaaaatgtgaggtgtgatactgttagaagctgatttatataaatttattaaaagacttggcaggaaaatttccaaaatgttacaaatgattacttcttttttatttttttttatttttttgagacagtctcgctctatcgctcaggctggagtgcagtggtgtgatctcggctcactgcaagctccacctcccgggttcacaccattctcctgcctctgcctcccgagtagctgggactacaggcacccgcccagttaattttttgtatttttagtggaaacggggtttcaccatgttagccaggatggtctcgatctcctgatctcatgatctgccctcctcagcctcccaaagtgctggtattacaggcgtgagccaccacacccggccaaataattacttcttgatggaagtgtatgcaaaagtcttatttcctttatatttttcttttttcccccaattttttggagtaaaatatatattgttttcataataaaaacataaaactttatttcttaaaaaaactcttgttgaaaaagaaataaaggaacgtggcaggagcagtcctctgagggggtccaaggaggaatcagtgttactgtggaaagtaataccaggccttgcttctgttgacttgaagattattgagctcccaattcattagttaggccagaggtgtcct

SEQ ID NO: 8743 - DNA, 2300 bp, Homo sapien
tttgcattttctcctctccttccccacttactcagagaatttaaagtctgtagagtcagcacagccccatcagtccaggaacttcccaccaccagcccttgactgtcccattaactgacatggtcagatttccagctccccctactccctgctgtgaaacaatccctctccctgtgagaggaaactgtggagcgtttcttatcgaaggttaaatggactctgctcataaacctcttactgagatgcttcctgatagccaggctggccagagaggggtgcaggggttagatagtaagtggtggtcgtttgtggtcagttacctcaattctgttcattgcagtgcccgtaaaccatgtagaaagctcccagcactgaaaggcaggagtgttagcatctcgctttatccaccataacgtaaagaactgcggtgtgataacagccttcacggggccacggtggaaccaagacagcaggcgaggccatgcctaaacaagtggtctggcacgggcactggccagctgctctctccaagcaggtggcccagatcccacccacgtggactttctcatcaggtgcagcgcctgccactctcagccactgggtgtgtcactctcctcttcatctcagcattctccatcacttcccctccagaaaaacggatggaaggaagccctctgtgacactgcttctgagaagaagcatttccgggaccgatatcatctgtctggtctctgtgaacagcaaggaatcttcttgaccgttcttgggcactggaggctggctaggagttcagtaataaacgtggccttcgtgctgtagggcagagtggatgcagtttgtagctttcagagtgtctcattgagtctagatcattgaaccaacacttaaccaaatgtcccactcccatcacactaggacttgtcattccatgcccctctcctagtggtcatggtttcatatgggcatacaactgctactgaagttatatagccttgaaaactcagtgcaggttgcccttaattttccccaaacccctccatcggcaagtctagttgccctttagcacctaaagatctgcaccccaaaccaatgtcaccataaagagggcacgaagaagagtgggtgtgatcccaacggggttttgtaactgaagaagcccagtgtgagcttctcatcttttcatatacctctaacccccggtactcattgaatcattgatgaggtatctcaattgagatttgcaaggactttgataccatttgaaatggaaaaattttgaacgggctttaacatgtttaagaaatatggatggggccggccacagtggctcacgcctgtaatcccagaactctggaaggctgaggcaggcggatcacctgagatcaggagttcgaggccagcctggccaagatggcaaaaaccccgactctactaaaaatacaaaattagccaggcgtggtggcgtacgcctgtaatcccagctactcaggaggcaggagaatcgcttgagcctgggaggcagaggctgcggtgagccgagatcgtgtcactgcactccagcctgggtgacagagactccatttaaaaaaaaaaaaaaaaaatatatatatatatatatatatatatatatggatgggaatcaccaaattcatctcagctctaaccttttaacctttgtccttgcactttacaatctaaagatctacctgtggctctcagacttcctcacacttgggttttagaaataacttgtaaagcagactggacccaaggccgccttcagtgtcaagaagggcattgtgacttgcccctcaatttctgtccattgaagtctggttttccatgaggaacttgcgggctcacccacccccagagtgagagaagaggaaggcgaagtcatcacagacacggtcttagccacctgctgaactaatccctccgctattgagggtcagggttgtgaggcaaccatcatgtgtcaccccaaaatataaatgtttctgagccgcccatccactggcatttggatttgctgccagagtcctgttcctcccagaaccatcccgccctcctgttgaccatgttacttgagtgtaggcccggtgtcaagaccctcagagtctttgaggaaagagccaagcagagaagaccgctgcgtggagtgtgacaccacatggcatttctcaagcccagcggaccctgtgtcagcaaataccagtaatttaacatctgctcctggcctcctcttcacctgcctgggttcggaactgaggaggaaggatgagaagagactgcaatgc

SEQ ID NO: 8744 - DNA, 2300 bp, Homo sapien
aggtaggaaagtacgaggagggcacttgggacagcaagtggccagtgtggacagaggacatgcgtactgcctggcttcagagcgacgaggcgcggccgtggccgcaggtgcagcatgaaaggggatccccagtgccctaggaaggaggccagcttgggagacacgatctcacagccccagtggtcccgacccctccccagctaccgacgaagaaaagcctccccaggggctgatataaaaaagcaaaggaaacacccctgggcacatgcattctggagctgccagcgtgtgacctgagggaggctccccaggccacgtgcagagaagctacatgaggggactctgctttcctaagggaaggaggatgttcttattgatacattgagagacacatctggctctgtcacccaggctggagtgtagcactgcaatcatagctcactgcagcctcgacctcctgggctcaagtgatcctcctgcctcagcctcctgaggagctgggataacaggtgtgtgccaccatgcccaactaattttttaaactcttgtagagatgaggtctcactatgttgcccagactggtcttgaatcctgagctcaggcaatcttccctcctcagcctccctaagtgctgggatataggtgttagccaaagcaccagctgacatgggacattgtttttaccgcatccaggcaggtgggccctttagaaagggcatcactcaatcttcagttactcaacatgaggtctgtattttgcctcccttcacctgcttttctggcagagaaactagaaatgaaagattaagttgccctgagttatacagcaacttaactggacctgggttcagaatgggtccatcgctgccaaacctttctctggccccagactccctgacagcctcagaggggttgaggcatcagggccacactgtggctgggggtttcagaggaaagagaaaataacatgcgtggcttggtcaccattacggtggatgtgagtcacgtcaggatttcaggctccgtttggctctgggcagttgatttcctgggaatgaggcgatgaagccctatgaatgttctctcctccaggccctcaatgggacaggaatgaggtttgcagcttggtagtgccactccagccctccctgtccacagggaccattcctttgccgtgtcgtctggggaagaagccatcccctgccataggcaatggcttacagggtgacctgggacatccgtgccttcggctgggttcagccgtgaagcactcttcttcccaactcctcctgctgctcccagcgtgcgacattcatctttcccttcccaagttaacgctcagttctgtcttggccgccttggcaccttcccggcccctcagtctcggtctccacagcacttggtcggctcagccttgttcgtgcgagtcaagaacttgagccgcgctgctctgaagagggagagtcagatgtgggcaaaaaaagtgcatcgaatgtctgagaaacttccataacaaaaagccatctctggcatctgaaagaattcacgctcgaaagatggttcctgcttggtttgtcttgggcttacacttttttattactatgattttattcttcagggttgtgggaatctgcatcttgacttggacctggcccgtgtgcaggatgtaatgggctgatgtgcctggactcctccctctgcatttgtgcagtgctcccgtgccgggaacacaacccaggaacaaggacttccgtgcgacggtgccccggccaccaccacgcctcccgcagcagccaggcccgggccttgaggtcagcagtaaaccccaggacacaggcagtgaccctagacgagcagggcaggtccaggtgacgggaggcgtgccacgtttctccatcccgaagttcttcttggtttttatcctaagtactgatgtcaggatgactcggcagctttgacgagccatctggccctttaggcaggaagccagttggccttcctcctcccactgtcccgcctgggcactcccatggggctggctgcagggggactgaccttctcaggggaggctgcctccggcttcaccgctcctccccgagcacagcctttgtggggcctacggggcagtaggagacaggacgcttgtcctgcggaatggcaaggaatcagctctccatttcagggcaaagtggggcctggattgtgggccttgaacatgaaggcaggtgggcgagggactaggggaccgcgtgaggcccgacgtgcacacggcagggcccggcacccatggttgcgttcgg

SEQ ID NO: 8745 - DNA, 2300 bp, Homo sapien
ctccttcttagtccgaggctggtcaggccccttgtctaaaattccccccaaatgtgtggggtactttgttttttattaagcaggattaagttacactaaggtgctttggattaaggccttgacatcaacccaaacacatctaggtgcacagaacaatcaaaaagtgacttttgcgcagaatttaaggtaaacgtttaggcagaagtgactgagaagaataaaagcctagataacctccaggagaagagtgaagcccaggcataccccagaatcgtgacacttactgccaccgtacatctggatgtactggatgactaacagtacagtctattttttcaagaaggttataaaaatctatgggctccacactgcgtgtaatgtgggtgaggtaacaagctggcgagaatttttgcttctgcatttcctgatttaggaaagaggagtggtaggggtgtaaaaggtgtattatgcctattactgaatctgtatgtatttggtctaatagtggttgcttgggcaaaagttactctcctacactgaatatggaaccccttccaaatcttgttcaggtcctcaaagaatcaatgaaaccattttccctttctgataaatccgctggtcttgtatctagttgtgtggatccataaattaaaatacagaggatcattttctctgatccaaaaattcttggtttgggggtagttaaaatgaaacttctgaaattctatccttagtacggacatttaggacccaggggctacatcctagaatggaattgtgccctgcttccataaaacggttgataaaccaacagacacgactggattgtcttaaaccaagttcaactgtcattccattttaatcaaaaagtaaattggattcagcatatacgaatatattgactatcagtacaactgagccatacaactgatagtctaaggctgatgacaaggagaaagctcctaaaacaaggcttaggggaaggctgttcccctgtaagcaaagcggactgagggcattggtggcgcagcagcgttcagaagtagagggaagttttgatgtatcaagtaccgagggaaacacacacagcgtgtctggaaaccatcagaagatgctagaaggaagtagtcatggataattctagaaatttctagaacaccgactggagggggtcattgtttaagatgagtacagccgagtttctctccaatttaagacacaagactggagagaaaggcgtcgtagtaaacagccccaaccgggggagcagggggtgtgataatgaggcgttaaggggcattagggacagtaagaaaaggagagttggggtgacgattattgagcactgctataggaggcggctctcgcagggataatcaagggagaggggtgtgaaataagggtaacgaattgcaggggtaaactgtgggaaggggctgcgcagacttcaacagcaaagaaaaagaaggaacggggctggggcgtggcccagagagggaacggctcaataacgggctaccgggtgaaaagaagccgggtggggaggcgctctgctgacagctgccgctcccccgtggcgcccacagggttaaaaatcaggggccacgggaccaggccgaactcggtttccagggcaacggctccacagttccggcagcgcaggcccgtaccattgcgcgggcgcgggggagcgggagcggcggaggggacgcgctgcagggcggcggagccggggccggcccgggcgctaccaaacgcacggcccgcctgctcgcccggggtctgcgccgagccgcgctccggccggacggccgcggcgtccttggtgcgggggccggcagctcccaagtggccgcggacggcgggggagaaggaacgcacgccgccggccgggattggcctcctggtccccccgcctgggcggcggagtgcgggcggcccggggctgggaggtttgaaaagcgggcgagagacaaaggcagcaggaagcctcctccgcgcccggagcccgtgcgcccggcccccggggccccctcgccgcccgccggcccgcggagcagcggcggcggcaggaggcggaggatgcggcagggggcgtgggcgcggcggcgcgggcggagcggcgcggcccgggcgcggcgtgggtagagccgaggcggcggcggcggccggcctccgggagcgagagcgaggcgccttccccgcccgggatgtgagcgccgtgcggagcccggggcgggggagggccgggccggaggcgcagccggcaggaaggaaggacggacggaccaggaggagga

SEQ ID NO: 8746 - DNA, 2300 bp, Homo sapien
tgacttttgtttgtctttagattttggctttggttctctctctctctctctctgtctctctttctctcccccttccctcttctgttttctgaagttgaattttggacttgaaactacgtgtcatgtgtttttcaggcctctgtgcctttgctccttgggcgggtctcattctcctatctccagctgtgagaatcctgtgtgtcctcttagggacaggttcaaataccatcacccccagaaagcatccccaccgttggaacgacatagtctttctcagctgtttggatagtaattgatacctccattataacgtattgccctgctaaatgttataatcacatatgtttgcctcacctctacgagattcctgttattcaaccaagagttcctgttactcaactttgagtaagacctaatagatgctcaataatattagttgacttgaattaagagtcacagaaagaattccatttcgattactttttggcattttcactgggtctgaactttttcgtttactctgagtagcaaatttaaaatagcaaacaatttggttctgatcatgggaaattgctctcaaggtcattgcagaatggctgcttttcctaaagattacctgcaatgatggaagtataggttgtcattggaatagaaaatggttgtctccatggctggtaggtggggtcttgctcctgggcggtaggttagagtttgctacccttaccttgagtgccatggtactttgcaagtaactctgttaaagctcctactgcaccacgtttaaacaatggatttcaaatggaactttcggttttgtacaagtgatgatttgtgttcttgcctggcttccactctagaccagcactatgagacagtccataagctctctgtgatcatggaaacgttctataatccgtgctgtccaaaacaatagccactagccacttgtagctactgagcccttgaaacgtggcttctgcaatggaggaactgaacatttaatttaaattcatttttaatttaaatagccacatgtggtcagtggctaccatcttgggcagtgatattgagttcctaggagagtagcattgtattaattgattggaatatcctatacagtactgtgtattgagtaaacctacagtaagcatgtgttaaatgatgaacagttaacatttattgagtgcctgctgaatgctaggtgcttcccagaggctgtccttgtgttaccttcattttctgcagagccccgtgctggggcagcatagacagcaagcttgacccccatcattgcagccttcaccaagaaaacaggcagtcgagggagcaatttagcaagagggtcaggagttccgtgaaaagaagcctggcagagccataaaagaaactaaagaattttggtggtgaaccaaaagcctctgtaacctgcccaggcctgaatttggtgatcatgcttttgcctgaggcagccacagaggttatttaattctcaaaactagggcctgtgagacccacaaacctggtctgaggtttgctagcagggactctagttttggcaaagggaatgtgaactgcttagcattggagggggagacaggagagctgaccaccttggctctgaatgttctcatcggtgaggaaggaactggtgctgtgcctgagtgggcgtgaacttgttttgcctgtggttttctttagaaagctgcttggttcctcttctctcaaaggatttggaaggtcttccccgcacaatcaaaggagcagtttgagacacaggggcgacagctggggacagcattagagggacccacattacttagagctactggtttccccccagataaaaacccaggtgtcgtttctgcatgagcagtgagtgacgaggagaattcgcttgcagcctctccgctacgctctgcctttagagtccctctagccgtggtccctgtgttgccgcttgcccctgggtacctgactgatgaagacaggctctggggctcgccgttgaaggtgctgtggacccaggggtgctgtccttccgctgttccattcattgcaacattcatctcctgcctgtttacaaaaatgaagcaattatcctattcttccaaatggaaactgctaatttttgaagcagaaggttgacagcttcagtaagatctcaagagagcgagaagactggaatcaggtgaggccataacttcttatctaaacttagtttctggggtggaattacagaattgcttagaaaaagagtcaatataactacttgcagaaaataccacctgtaaaaatccaga

SEQ ID NO: 8747 - DNA, 2300 bp, Homo sapien
gggggccttctctgggagggatggtcagggaaggcatcttggaaggtgtggcctcagtgacaaaggaggcctgctcagcacccttgaagaggtccccacctaggctcgtggctatttctggacaggtttctggatgtgacggtgcctgtctgaggagaggggcagatgtgggaggtggctccatttcctgcaggagtcttgagatgcttgagtccctgggtgctggggaagtcagttctagatatcagtgggtttgtgtgaatggctaatgacctgaaatcaacccctcatcctgtggggcagagatgttgtttcaggcactgctctgaagtatggtggaaagcacagagttgcttggggtctcagctttacctgtcccggtctctctttttggtctcttaactctaggctggatggacatggccccttaaggaaatgaaagtgagtgactgagtcctagcagaaaaaggaggagatcttggagttcctgtcttccaacacgcacctctttggttgtgatggtgaagtgggacagtgccatctcagcagggaccttggatgtgctctagagggggtcttggaggtgtagcatcgttacatcccctcccaccatcctgcctacacagtggttttgggggcacagatatttcagagagtagtcttcccaagaaccctacatcaagtatgctaccaccccttcccattcttgattctggtcccctctttattttcctcatagtattcactggacctaacttatgatacatttgtttgttcactgccatgtctctggcacttagagcagtaactggcacatattaggcacccagggtgtaattcatttgattaatgaatgtattgaatggctgcatggatgaatgaagaggaggaacagagcagatgtctgaccagctcattctggcttctggaaggatcctgattgggaattttgcatctttccctccccacagcctcctagtcactactactaaagaatagagaccctgactcccacttttttttttttttgagatggagtcttgctctgtcacccggctggagtgcagttgtgctatcttggctcactgcaacctccacctcccaggttcaagcgattctcctgcctcagcctcccaagtagctgcgactgcaggcatgtgccaccacatctggctaatttttatacttttttattacaggtgagctttcaccatgttggccgggctggtctcgaactcctgacctcaggtgatctgcccaccttggccccccgaagagccccgcattcttaactactgtgtttggtatgtttgaattgacacttgcctcttaggaaggggaatctttttagaccctggggaaatctgtagttattgcaaaggccttttcctgcctgttgggcatttaccagatctttcttcctacacaaggagagcctcccctggttgaatcctgctataaatctcactagtgacccacaaacaggggtcccaatgtgacctgctcattaacacaaaaccgtcagcccccatacagcttcctgccttcccagtcgggttgaggcaagaaatttccattctgcccatgctgatgaaaccagtcgccagcatttacctttctaaggggtcctttctcctcccaccccagcccaccccagcacaagaatgtaagagagggcaaacagctgcctggcttcagttctatggccactcaagaattggctcgcatctgtctgccaggacagagagcgtcctgagggggctggtgtgtgtgttgtgtgtgtgtgtgtgcacgcgcgcgtgcatatgtgtgtatgggggagttcagtttcaggtaccacacatctggaagtcagagaaagaagccactgcacatgttagagccattttggggggcaatttttaaaaaaaaaaacatttttaatgggctgagagccgcctcgtggaaagcccggggcgggggatggagtagaaacagctgcgggagtgattcttgtctccatatatgtttataaggcactgagggcgggattagcagctcctgggaagtctggctctagttaccgtgtcagcctgtcctgggggcagtcacagccacagtgaccattagcaggcacccaggcctgtctttggctcggaaacggtggcccccaatgtagcctagtttgaacctaggaactgcaggaccagagagattccactggagcctgatggacgggtgacagaggtgagaggcactggtgtgagggacaagtgtcacaggcggggaggaagaactccgctatctggtggtggaaatgt

SEQ ID NO: 8748 - DNA, 2300 bp, Homo sapien
atggatgtggggatcaggggaatgttcctcaggtgctcaggtcagggacagtggcaacatcctcaatagttaaggaggtgtgggtattttgaggaaatgatgtggtttgtttcatcactatataagcatcaggaactggcagtagtgatatgtgaatgggatcaaggtaaccgagaacaagatgtgaaactttagggaaatggtaagtctgtctttcatctggttcagcacacggtgaactgttccagaggtagcttcttaaagcccttcgttttgtcaaaccagaatcttttttttttttttttttgagacagagtcttgctctgtcacacaggctggagtgcagtggcacggtctcagctcactgcaacctctgcctctcaggttcaagtgattctcctgcctcagcctccagagtacctgggattacaggcacgcgcgaccatgcttggctaattttttgtatttttgtagagacggggtttcgccatgttggccaggctggttttgaactcctgacctcaagtgatctgcccatctcggcctcccaaagtgctaggattacaggtgtgagccaccacgcttggcctggaaaccagtctttaagagaaagggatgcaggaaagattggagatctttgaagaatctctttttaagaaaattatctttttcgctctagttctgtcacctttagtagactctttattaagcctaagaatcttatacttcttatctctgttctatgtgagttggtataacgggtcaaattcacaatccagaaatgcctgtattgtttctgatgtgctgaggaggtgtacaattgtcttccttgatttcaacctcaaaagctttacatctttacctgggaacatagaagtcattattattatgtctttcacaaattatgtaaacttaaaaaaattatattttcaatgtaaaccactccttggaggaaattagttcctttaacatttatttcctaattttaatttctactagttttatctctttcaagcttaaatgagtgggccttagttctgtattattgccatcttaatcatgttctttgtgattttagtagctttactttttaaaacttacatttccataatgaagacttctgtatttttgtttttttcgtcatatatccgactccagctccctcaagacctgtcagcttttccctgcaccctttgttatctcttgctgtggtccaaaggtaaggacagtaagccgtgggcacagactttccctaaatcgtatggatttcctttagtcaataacaagaattttgatagttaaggcatttacgccttaagaatgtgataaattccccctcctactgaatgtaaagaactatttttctacgcagactaactcttatattcacttttcttatagaataagtacgtaaccaaatctgttcttggcttctaagaagttagaactcaacgtaaagatgacttgtggaaaattacttactcattctgggtaaatggacgcaggtatttagtgcttaagtaggttctgatataccattacattaacatcattttaaaaatcgctctgaattatatgtattttaagagtgactgggttttaaaaaaaatagaagtggtagagcataaatcataatctttaataaggtaataaaaggcaaacactattgctctgggcaaaactgggctaatgcttttggatttctttccgcagtcttcacagacgacgctcagcatcctatcagcccttggcagagacacacgatccagcctaaatcctcaaattctggctcttgcccaaagtgtgtagccagtatccatagagactgcgaaaagcatccgcgagccggggcggccccctcctcctcagctccaaattgcttcctttttcggtgggagaaaaaactccgaggagttgtgtgagcgcctaaggagcgcacgctcctccggccctcaacacccagtatagttttcgctaagttcctggccgaaccacagctcccacgatgcacccaggttttagagcggtcagaggggcggcttccggtttaggacagcgcggctgcgcacggcgtgtggtcttattggctcgaaccgcctcgtgcgatgcgcgtcacggcgacgtgcggtcgtgggggcggggagacgcggcggcggcggtcgctgtcgcggcggcgagagcgcgattccagaagcggcatcgcggcggcggcagcggcggcggctacaccgggcttggccccctccctcctccgttcccccctcctcccccctcccctcagcggtggctcccaagaagtc

SEQ ID NO: 8749 - DNA, 2300 bp, Homo sapien
agtcagaagaagcaattgctgtggattagataggttatgcagtctctaatgaaaattggttcttggtggggtaggggatgaaaaactattaaatactactatggtttggaaccccccatagggccacagtacatagatagtatatctgtgttattaaaattcatggggatgaggaaagcaatctaaaatgtcccagggccgggtgcagtggctcatacctgtaatcccaacacactggaagctgaggcaggaggattgcttgaggccaggagttcaggaccagcctgagcaacacagacctcgtctctacacacacgcatgtgcacacaacagacacagtggtgcatacctgtagtgcacgcatgcacacacacgtgcgcacagtggtgtacacctgtagccccagctattcaggaggcttaggtggaggattgcttgaggccaggaggttgaggctgcagtgagccatgatcgcaccactgtactccaggagcctgggtgacagagcaagaccctggggtctcaaagaaaaacgctgtctcaaactaaaaaaaaaaaaaggtcccggggcttgtgggtagcagtaatgaaaggttgaggaacacgagtttaggatagttaaagaagggttttaaataggaactatgaaggttagtcattgaaggatagatggtaagttttaggtaaacaaagatggagaggttattttattcaagatggttttcttggagattatgtgtttttataaaatcagactgggtgtataacatgtctcacatgccgcatcatagcctctagttagtgtcttataaactgaagaataggaaaattaaaatctcagaatttccttttaaacaagatcaaatttaaagtgttgtagtagattacccattgcctctgtgttcattcttaccaagtagttttttgattagaggtagaggatttattcatttctttgtgcagtcatgttagcagtactgtttatctaaacagactcttggttacatacggaattatggttctcttgtgctgtcttattcattgagttaaagaattatagaatttttttagagatgtagaagactgtagagattgtttaaactcctccattgatacatagggagaaaatggacctgcagtgaagatccattgatgttagtggtggagctggcctcaccactttggtctcctgacttgcagtctactgcccttcttctcacaatatcattttatctaaaccagtatgaaccttggtctggaggcagaaattttaattttagtaatttatctctttagaccataccagattgtcacttctttttccatttctctagacaaatcagtcattttctccagaatgtggaaaggcagtgggttttggagtttgacttttccacttcagctttaaccttggacaacttacttaacttctttgcctaatgctcttatatgttaaatgggaatgagaatacttacttaataaggtggttgttaggattaagttagatgacctatatataaagccttttcctctgtgttggatatatttaaaaaatttattaaatgtttttctcccctttctttctctgccactagagtacttaccacattgtgtatcacagttagttattttatgtgtcccaggtgcgagtcttggaggttttccccttagtaatttctcaactttatgtaatattattatggggtctatgacataatttttaaaaaacaaaccagtaaagccaggaatttgctactgaaacagagatgctgctatagtagacagttaattcatctgtcagagaagaattgagtactagtgttcatttttaatactaataattctataataaactgacttactatattgttgattcttgtctaaggccttgttttgaccttaagaatttcattataattccacaagggaaatgtattgattgtgtcatttggctcccagtctctgtccttgactgtttctgtgattgccttgcagagctctgaggaacatgaatacagtgatgaagctcctcaggaagatgagggctttatgggcatgtcccctctcttacaagcccatcatgctatggaaaaaatggaagaatttgtttgtaaggtaagagtgcagtttcttgtcattgtcatgctatatatttagcccttccaaaacagaaacctttaaagagagtggtagtactatagcctttggtttgctttggggaagatctgtggcaagatggggacagaagtggtcttgggactctaatcctgttgaagacagaatacatttgttggcttgt

SEQ ID NO: 8750 - DNA, 2300 bp, Homo sapien
tgtcatgagccagcaaatgggtctccccgtccccttccagcccactcctttcagctacctggaactcaaagcaacaaagacacccccaaagcactcaaatgttcccatatcacaggacctgttcaagaaggccagccagccggagcaccaccccaggattgccatgagactccaagggaggggaggtacctctcaaagcctcggtttcttcatctgcaaactcagatgagctctagaacaacactgtccaaaacgctggccaccaaccatacgtggctatttaaatttaagttaattaaaattaactgttttttaaattcgggtcctcaggcgtgctagccacactccgagttctcagtagccacgtgtggctgttggctaccgtttaggacagcacagatgtaggccatcttcatcatcttaggagattcaattggtgaggctttaggacgggggttccctaaatatagtgcctggactagcagcatcggcaacccctgggaacacttcagaaactctcaggcccaccctggaccccctgaaggagaaactctgggggcggggttctaacaaaccttccaggcgattctgatgcacgctgaagtttaaaaatcaaggctctagtctggagtaacagcctcacacattatctcgcttgagcctcaacaatcttatgcaacttctgcccttccaggggaagtagaaccgtgactcatcttgcagctgaggagacgaaacgcaaagatcacaaccctggaaaatgcagggctggacctctggcctttgacccttccctgctctcatttttcccatcaaatttctctaagatcattccagagtgaaaaaacaaaaacacaatcctgtatctctgtgccatactggaactcccaccaactgggtactcgagaagtgagaatgactgtgacggacacagcgtaatggttaagaagccacatccgttcccgtttcacagatgaggaaacccgagcctgagcagacagcggcttgcctgtgcccgccgctccttcccgatcaccaggactcagtccaggtccagagaggaggcagcttcagggagagacaggcccaggctgcagtcctgcttctgtgattaacaagctggtgacttgggcaagccatgtgactctgaaaagtctccatttcttcagcttggaaagtcagaataataataggactggcctgctgtgggattcaatacactcatgcatgtgaggtgctggacacgttctaagcgcccagcgcagttttgatattattataccagacactaggaagctggcctagttttgaaattcttcttcttttcaatataacctgcctcttctttctattcattggccccaagttttcctggagctctttgtcccagatttctctggatatgtgagcacctgcttgggttctccaagcctatttgggaaccagaaagtcaggggtggcccttgtaagcacagtcatcaaaagagaactatttgccagctggtggtgcctgtagtttcctggaacccacctgcagccctgggcaaacccgaacctggctttgagctggaaaagagcctccttataaagcagggaagatcctgagcagacagagggtatgaaaggaatggttacaccaggttaagatccaaggagcccatgagttgctagggcaacggccctgaattccagggtgccactcttggtcacgtgatttggtcaaaagggtgggtctctctggcctctatattcccatctatgggaaaggggagactgagctgtcccatccaccggccttgagttcccagagatctaggatgaatctgccctcgttgttttctggaatgggagcctcatcactgctgggcattttctgtcgctcttcttccagtgggaacgagagaggctgccgtctctgttcttcccccacccctcccactccccagaaaccccagtttgcactctgccctctgactcagtcctcccatccgctgcggtctctctcctcagttcctgcggaagcacctcctctctttaacttgactctatttttttctctccccgtctcttccctggccttgccctctctctttctgccctgtagccgcgggcgtccaaatgaagctggaattcctccagcgcaaattctgggcggcaacgcggcaggtaggtgtgatgtcgggccaggtcggggctggggactcaccacgctcccctgggtgtgagaccccctctccctccccttggatgctccactgccttgaggctctcaggatgccctcccggcccctacacttctc

SEQ ID NO: 8751 - DNA, 2300 bp, Homo sapien
attttgttctgcactaagaaaaattcctctgtcttgggatcctgttgatctgtgaccttactcccaaccctgtgctcactgaaacatgtgctgtgtccactcagggttaaatggattaagggcggtgcaagatgtgctttgttaaacagatgcttgaaggcagcatgctcgttaaaagtcatcaccactccctaatctcaagtacccagggacacaaacactgcggaaggccgcagggtcctctgcctaggaaaaccagagacctttgttcacttgtttatctgctgaccttccctccactattgtcctatgaccctgccaaatccccctctgcgagaaacacccaagaatgatcaataaaaaataaataaataaattaaaaaaaaaaaaaaagagtcatcaccactccctaatctcaagtacccagggacacaaacactgcggaaggcggcagggccctctgcctaggaaaaccagagacctttgttcacatgtttatctgctgaccttccctccactattgtcctatgaccctgccaaatccccctctccgagaaacacccaagaatgatcaataaatactaaaaaaattaaaaaaaaaaaaaaaaggaaaggagatgaagcagaccacagaaagctcctgcacaacatgagggtggcccaaagagaatgccagagatcggaggaggagcagggccagtcctgtggtgttccggggaaacgtcaccttgcagggggcgtttaaggaagggggaagccacccatgggcaggagagcatttcaggcccagggaagaacacgctttcatggagatggagaagcaggaagtatgtttatggggaggtgggagcctcttttgcttgacagtgggatgtgtgggaggcaccagcatgagaggtcagaggcgggactccccagaggtaaaagacactgcagctcaagccttgtgctgcccggggacccggcagaacggacagaagggagtgagcaggagcatccttctaggggcatcctgagtccagggggttcttctacacccaccccagtcctggctgtgaacccctccagcaaagcaggcaaaatggaagagggacataggacacggtgatatatcgctagcacggtgcttcatctgtctacaggcagtggacgcaaaggaagggggatttagggttcgtgctccaggctggtggggccctggctcccctctagcttggtccctgactcacttggccttcagatcagccacttcccatctcttaggatatcaatttttctgacttgctttgtcctgattggttaagaaagaggcctccaagttcttgaatgacagtctcttcccttcgcatgcctgacccatcacagataagagcaaggagccctgagaagccaagctcgtccctggcactgagaacggtctgcaggctgctgctgcaggctgccctgtgcccaaactcccagcctgccaactctggcattctgcttccctaagtagtcctggcgtcgggtggtcagaccctgaggctcagtgacctctgcatgaccatgtgatccctggctttgtgggggctcagggccctttcctgtagggtcatctggcacatggacatgcctgtgtacccttctttcgtatgaccgagagaagggttcggtttttccttctctcaggcaggatgggagactctgcctcgcatgtctctaaaacaggagaaagaccagcttcccaggggggcctccatcggaacagaagtcagccgcttgctctgtgtctgcgcctgtccctctttccccagatggaggggaagagaggagagaggcacagaagacaggtgcagccgggggggtgagggagagcctggaggcgcaggatggaagatggaggtggtggtgaaaccgctttcctcctccctgtggtcggcagcgattcatccacaggcgcctttttccactgaaatgtgagcgtggccagggtgagcgctgccctcgcggccggccgtggtgcctctggtgtgcgcctgtgtgtgctgctgccgctgtcatcacagatgcaccccagctgtcactccccgctccactctggctcgctgctcgcgcacacgcgtgcgctctcctccctcgcccctttcttccctctctcctctctctctctccctccatccctctctttccttctcagtttgtgactgacccagcagccccgtcccccgtctgccacaagcagtccacctcctggtgctgtgtgctgcgtgccagccgctgctcccgctgagtggagactctggcaccagtgcccactgcgc

SEQ ID NO: 8752 - DNA, 2300 bp, Homo sapien
aaagaaaaataatgcaaatcccaggtacaaacataaaaataaaagtgaatatttattatcgaaagcaggatctcgagagatatttgcacacccgtgttgacggcagcatatttcacagtagccaaaaggaggacaccaccccagggtccatcgatagaggaacggatgcacaaaatgaggtctatccacacaatgaaatattaacccatcattggtcacccccaaaaagtaaggaaattctgacacacgcggcaccgtgggtgaaccttaccgacattgtgctaagtgaaatgagccagtcatggaaggacaactatgtgatgacttcccttctgtgaggtccctagaaccgtcaacatcagagatacagaaaggagagtggtggccgccagcggctgggggaggagggaacgggagctagtgtttaatgggttcagagtttcagttttacaagatgaacgaattatagagatagatggcggcgaaggtggagcaacatgattaatgtatttaattacactaaaccgtacacttaaaaagatgattaagatggcacattttatgccacaataaatattgggccacaataaaaaagttgaaaaaaggtgaatatttattcagttttaaaaatcattccaaattacaaattttaagaagctggtgaattccaccaaattcacaaaacctagagaagttacattctttttatgtattgactgcccagtgtgcctctgtagtattttttctaaatgtgtttgatttgtaatcctcaaaacatgtacaaaatttatgtgaaattaaggcattcataggaatcatttagatgcctttaaaaaatacattgtattcagccacaaaactgtgccaccagattactctgatactacagcactgacttattgatgaatctgtgtaggagttttgtcatcagaacacttgcttctgcaagcatttctctgcgttggtggcaattttgcttaccattttgctggaaccaccagattttgtgaagacacagtgcaccagttacactaagaaaataatctgatacggggactgcataaaatctatgacttcacccccggagaacccatgtggtactactactggtttgggctcacaacacaagaattttgatcaattctaatttgtgtaactctcatcagaacacaaagcaatgtacggtgtaattatattctttcaatatccactattttcctaacaggagagaacttctgtcctggccaggccttggtgagaaccaaatcctccaccaacgatgttacctgtgtggctttttgtagattttctgcagatgagctcctgactgttactttgccctccccaccacacatggccagggtgggtgtgacagcgtgcgctcacatcacggcccagcctctcttgctgcatctgctggtgggatgtcctgtgggatgagtgttcctggaagccctgcctacactcagctggaggtaacttctctgtacaaagaagtcactgtgaaccatgtcagcatatcccactaagcccagattaagtgtttccccagctcactttcctcttaactggatcccccaagtgccctcagccacccaaacatcatccaactaagagtccctcagacggaagagaagttgggatggaaagagacagacagtctcaaccggttatggttaaactatctcaacttttgcatattttacaaaaacatttggccacaggaacacattgctagggcctctccgggaaaggggggagtctgtggattcaggggtcctgaagcttcatcagttgcacagcaaatgcgtccccagccccgcccacgagcagctgagatgtggaggcgtgggtccactgacttcacctatgacctatgacctgtcccaaaggcaccaggcctggaaacaccagccagagtcccagctctgcccctgggactccccgggcctcaagagcctctgccaagcagggatgaggacacacccccacctcagggtcaacaagagatttgtgggtcaatcagagtactgtgcaaactcagctgctgtcctctggccatagtcacagcaagcccttcctgggtccagaaggtggttccacaggaacggggctgcctctttaaagcagaggggtgcactatagccctgagggaaccagctgcagttgtggtaatcttgggaggcagctccccaccccctgccaccccctccctgctgtcaggagaggattagaggagaggccagcggattaaagggtttcatgttgccacagcctctcccccagtccctgtctccgag

SEQ ID NO: 8753 - DNA, 2300 bp, Homo sapien
tcatttagaccaaagacgaagtcacccttcaaagggcagttggtgatggagtgcttatttcttctatacagcaaagcagatgagagtgtctttgtacaaaaggactttctctagtgagtccaagaaatagatcaaaagggttatctaaggcacccaaagctagatttcataaataaatgggcttttcttcttcccactcagcccaaattctgagaacatcatggacgccactccttaggtgccactggctcccaggcagcagttttcacctgattgaatctcaggtgcagccctgagatttctgttcgtagaggcagccttatccagtgcagtgggcttcagcctggtagacgttccagaagccagagccgtccggtgtggggaagagcacccagctatggagtcacacagatccgccttcaactcctgaacaaacacatctttgggatgttgttttctcacttagaaaatgaaagaccctcacaaggtccatatgaggattaaatgggagcaacatatggcagacagcccctctgtgccatgactgtggtgcgggggccatgctccagttgttgggagaggcccgcagctgctgggccggcctttgtttgccatctaccaggacctgagtgttcagcctggcattggcacttagggatctgtggccgccttgctttaccgcgttctccccctcatttccttatcaatggaatgaaaacagtaacacttctcccttccttatgaaggaagtgccacagctctttaagaggtccacatacccagcagtatattacttgtaacataccatgtcggtattgttcttgcccctgccgttatgggtaaagcaccaccttaattgcaaggcgggagaaggcagtgctatttgataggatttgtacttcctggatcttctgaaaagaaacactctgctcggtctcccccttcagaaggccagacatggtgataattgcagagtgagagaaacctttgttagcatcttctagaactgtctggtgtgcatacccagccctactgatacacatagcccccttgtactggcttctgccagcccttttaagaggtaagccctgggccaacaaacaaaaacaaaacaacaacaacaacaaaatatcgcatgctgaaggattgccctggaaatcacagatctgttgcatttggtaagtttgttcttccctcagacaccagcagcctgcctgcccttttcagacccagaaaggacagaaagacctgctttcttcctcttgaatgagaagggtgaaaatctgaaagtgcgtttccacctcaagaaatctcaactattgagtaacagccctctttggttctctcaggtataaagagagaccaacagtccacccttgttaaggcctacttccctggagtatgtggtgccaaggatgggaggggcacattagaaacgagtgctctgagcaccaggctttgctcagtttccatttgtcagtgtagatgcaggtggggcggggaggggcggagtgttgggtgcagttttaggaaccatgtctctggattaatgtggacagattggtcgctcgctcctattagcaatgaagccttctgttttctaacagggcctgctctattcagacatgtgccgcctcctcccttctccaagaaatcagcctgccttgcaggctttggaacgtggagtcatcttggaggtcaaatgcgtcgtttgcagcacgcaggctggggcagcgcggcgtggtgtaaaggtgcgtggccgcgcaggctggggagcctgcccagcattttgctgaacacttggctttcagatctcagatgctctgcaccccactccctcttacaattagaggagtgagggaggtggttacaaatacttggtatatttaactcaaccttgggtatctagatagatgttcactaaattgagtcatgagtaatgcctgccaacagcttagagccttgagaaaagtacacaaataaaaactgcgtgtgcagactgttgggggggaggagagcagagcactgggtgactggcactcccggcggctgggcagtacagacaggcgcgtggccccgcgccagctagcagcccaagctgtgcagcccaggcttctgagggaggcagaagaaagaaatccaagcctcggacaagttaactaagggcacggcaggaaggaggtaaaaatatgtactaagtgggcaagagaaagggtgggagagcagacagtcataagccaaagtctaagaatttctctaaaagtctgagggccaagatgaaaggcgccaaatgtctaggg

SEQ ID NO: 8754 - DNA, 2300 bp, Homo sapien
agtcttaacagaatatatctcccatagcagtccttttcactggttaggcagacatttagtattaattaataaatgaaaattagacgtaagaacaacttgccgcagtttcactgcataatatttatcatctagaatgattcattttttcctgtgtgtgaaatatatatgaattgttccagatggcagttttctttaatattttcatatgtaaattagcaattttttgctttgaaaagttatcaatatgcctgttggtaaaaagaacattcagagccatcctaaaagtctgctcccgattctgtaaaatctttcatttccttcatcccccagatgctttcctttaactgtgtatacatgtttgtgggagctcagaatttcctcccatgtctcagacactgagttaaggtagtctttattttctgtctccttagaaattgctgagttactattagcttagtgatcagtcgactgtctctctcttccttgttactggtctctttcttttaatcttatgataccttgtgatttgtcccattctgcattttgggcaactttaaaattgctgtctgactttcccactcttggcttccctgattgcgttgaaagaggagggcttgttctctgctctgcagttggttgactgatcaatttttgagcccagggctgctcactgtgaggcagttatttccctgccatttatggggatgggaagagtctcagagtgagatgagtttcctgcacgtgctgtgtcacagcctgggactggactcagccaagcacataggatggctgctgccacatgggtatgacactgtagctctgtgtgcaaaagaatcagtccccacttttaaatcctggggcaatgaaatgactagaaagtgacctcacggaaatgaaaaacagggagcaccttttaagagatgagatagattcctgaaagtctagctagaggtagctaattttaggtaactagctcaaggtgcagatggtgattaagtgtattcaaactggtatttaccaccataacaactagttcctagaacattcatgttactgtaaattgtgcagtggataataataacaggatttcatacagattaaaaaataccctgtagctcagccaagaggccatgttataattgtcagcattctgcagtaattacctaacagctcgggcaggaaattgattatttactagcaataagcagctgattgtgtggattccgaccccctccccagttagaattaagtctctcagtaagtactcagatctttgttaccgtaaacttcatggcaataataagaatgtgagctgaaagttacagcacataaagggaaagtatattttcctcgacatcacctagcagcatataggagcaatctggtctatctttgtattgttttccaggcaacagaagaactcctcgttgctctaagtggttttttaaatggcccctcttctccgagttagaatggaatctttaccatgttttgaaactgccagagagctgcaggatttgagttgccagaatcaaccttgccttgacttcaaggcagtctgtaaagtagggggttctttcctcagtatttcagaactctaaattgggtttccttagcaactaatgagagcatcctttagaatgcactgtgtgaggagttggcaaactcttctcaaagggaccagagagtgagtattttaggctttgcagtccataggatttgtgttccgactatagaattctgcccttgtaatgtgaaagcagccataaacaacatgtaaacaaaggagcatggctgtgttgagcttggctgtgtttgtgactttctttacaaaaaacaggtggtgggctggacttggcccacagatttgctgacccctatcctagattcatttgtgtagtcagtgaattcaggacctcaactctcatttttctcctttaaattcctaagcaagcttatttctaatatggttgtaacaggatgaaaacaactaggtgagaattgggatggttttaaacattgtttgtgttgaattggcttttcttgtgtggattttcccctctgtttttctagcctaactcagtatgaacagttgaaagcccatcagggaactggagcaggaatttccccagtgatcctcaattcaggagagggcaaagaagtagacattttacgaatgctcatcaaggccaaagacgaatacacaaaggtgagtgtttgcccttccttgtgatacatacacacttcagttccgcagtgggaatattcttgtttagcaagactaggtactgtggatgctg

SEQ ID NO: 8755 - DNA, 2300 bp, Homo sapien
agagggtatgtgtgccgtatctatgatatttctatatcaaataggtaagaatttatgaatgtgagtagtaatgtctgcacagttgttctaatatttaatgctagataaatggtttagatcaaccattctcaactttttagtctcaagactcctttacactcttaaaaattatttttttaattactttttatttattttatttttgagatggagtctcgctctatcacccaggctggagtgcagtggcaggatctcggctcactgcaacctctgcctcccgggttcaagcgattctcctgcctcagcctcccgagtatccgggattacaggtacctgccaccactcctggctaatttttgtatttttagtagagacggggtttcaccatgttggccaggctggtcttgaactactgaccttgtgatccgcccgcctcagcctcccaaagtgctgggattacaggcaggagccaccgcacctggcccactcttaaaaattattaaggactccctcagagaacttttgtttatgtgagttatacccacctatatttaccatattggaaattaaaaataactttaaagaccccgggctatgtgtgttttgtttggagtatatgaagaaactctggcctcatatgtagataatgtagttggaaaagagatggatattttaatagagtttttcagacaattgtggatattcttcttggataatataccaaaacttgacaagctggagtttctcaaagcttagctgcaatgtactatctgaaatcctattaacttttcatactgttacattaaaaatccattagtccaccttgtccttgaatggatcttttgcctgtgcatgattatgtagcatgagacattggtcttttggaaaatactggaccactgagttaagcagatctttgagatattgacactttccattatacaagatttgttaaaattgcgctcattaatatcatcactgatctcatcagaaaaaaaaacattaagtactgagatgtcaagctcatggcagtagatacacattttctaaacttttaattctggcttgaaggcttaaaaattatcattggcagcagtaattgtcccttgttttcctgaaagtgacaggcacactttatttattttcagaaaaatgtctgtcaagtacctgtttgaataatcatagtttgcccatctttctttcaagtaaaaatgttttatgaaaataaaaataaaaacatgaattcggcctacaactcaagcacagaagtattttcctagagacaaatatgacacacttcattttgcagcagacgtgctttatgcctatttcctattttttcatgcagaatgttaaaaagaattgtacccaaggattaagcttcaatgaaattaataattcttactgcttatcaagaacaccatcaggtgacactggctctctaccttcttctttttttttttttcttttgtaactgagagtgcagattagtgacgcgtactttgactagcaatacagtttggtgcccctgccttgattgggttaaaccaccggcgcttttaaccaccattgtctgcaaaacgtcaccacagtgaacaagtcaaataagtaagtctcagcattgtcataaaaggttttgttttttttttgaccttgcagatcccctgaaagggtctcagaaactcccaaagggttccaggaccacaccacactttgagaaccactgggtgttagcgcattcagaaatcaattcagttctctttctcttcagagttcttgatgctcgaggcttatttattgtgatagatttgatcactgaagcgccaaagaaaagatatgccaaggggtcgaacacatccaagaaggaaatcctaccgcacacacagctcaaaggctcgagcgcgtagaaaaacagctcttggagaaagaaacgggatgcagagggcaggcctgggcttgtcgttgccagtggcaacgatcctcagtgggcggggcgcggccatcgattagtgaggccttgcgtctgtcggcgggcaggagggtgggggtgactggagccggaaggcctcccgggccgtgtggtcgccgtgggttctcggttgcgaggcagctcgctcgttctgcgatctattgagagtggcttccaagagccccgtgcctatgtctgggagggagggaagatggcagccgtggcggcaggcggcctggtgggaaaggggcgcgacatcagcctagcggccctgcagcgccacgacccctatatcaaccgcatcgtggacgtggccagccaggtggctctg

SEQ ID NO: 8756 - DNA, 2300 bp, Homo sapien
gggagtttgtgtttcaggcagtgggaatagctagagcaaaggccttacaatgtgcgtgtgtgttgaggggtcattcctggagtgtctggggcccagccaggaggctagtgtatcccgagtgagggggacagcagtaggagatgatgtaaggggatttgtactcagccattcctgtaggtcaccacaaggaccatggcttttactaagtgaaatgggtaaccatggatggttttgagcagaggagtgctgggatgtgatgttttaaatgggttactccgactgctgtattgagaaaataccagaggggagagggaaggtagaccagggggatcagccacaggagaaacctgggtgaaggatgctggttcagccccaggtggtggcagtgcaggaaatgagaagtggtcaggttctgaattcacctgaaggtagggtcaacaggatctcctgatggactagacgtggaatgatgagagaaaggagtcaagagtgactccaggattttgaactgagcaactagaagtatgggatggtcatcgactgcgatggggaaggctgtgtgaggaggagcaggctttgaagagatcaggaatccagtgtttggatgtattaggcttgaaatgtctatcagacggagtcagctgtagtctggaattcaggagagaggtctgggctggagatagacatttgatatagacagctgctgaaagccacgggaatggttagggtcacccagggaatgagggtggatgtggaggcgaggaggtcttatgtggaggcaggtagaggttttccccaagagggagttgtaggcccccctgaaagggatcacgaagccccactggaggggagcccggtcctgcagggggtgccgtggaacttgctgtggttgcagggagtgatggagggaagtgtttgcttctccgggaaggagaggtgctggatagattcctgccggagttgcagaaataattaagagaagtaggtaaggatatcctagtagaacacgtgctcggctgcctccaaggaattattaaacctgggtctaggaatctgttcagacatctgggcaccgctgcctcgcctaccaggctccgcctcgctgcccctcccgcttcccctcccctcctctatctgtcacttctacaaccgctctgattataattgatcaaacagaatcacggaatcacggctcatcttgccgttttgttcagtggcccgatccgaaacgagactctggtagtcgggcaaattgtattcctcctccttggaattccgctcacagaggccttcccggcgtggccggcccagcagggacgcgccgccgcagcggaggagagaacgcgggcggggggctgcaggccggcgcggggggcgcgacgccgccggcggggcgcgagggggtgtgtccgcgccgcggccaccgcggccaccgcggctggcgcccgggtgcgccgcgcgccccggcctccccgggggctcctcacgccgcccctcgcccgccggcggccggggcccgctccctttgacgtcatgcgggcggagggctcgctcgggcggcgctgccgcgggcgccgggagggggcccgacttcgggctccagtccgccgccgtgcgccccgcgccgtgcgcccggctccctgcgcgccgccgcagccacatctggaagcgttcagcgcgtctgcctccggcgcgccgggcgggcgggcgggcggcgcgggcaggggcgggcgcgggcgcggcggggctgggccggggggagtgagcgcggcgctctcgcgcgcccggtgtctccctctcgctgcctctgcagaaacagctcctgccagagcggcgctcggcgcggcgcggcgggcccggagcggcggcggcggctcttcctgcctccgcgcccaggagttgccggctccctttgacagcagagagccgggcaggggcctcaggaggactcgctgggagtgggcagaggcgcctcggcccctgccggcccaggcgggccccgcgcgccccccgcccctcctctccgcctcttctcgccctgcctctcccgatttattttttcaaatggtgtagccgccggaggtgcggtgctcagttcttggaaggggcccggatgtactgaggatgcgttacagtttcactcgaggaggcagtagtggaaaggagcagtttttggggtttgatgccataatgggaatcaggtaatcgtcggcggggaagaagaaacgctgcagaccacggcttcctcgaatcttgcgcgaaagccgccggcctcggaggagggattaatccagacccgc

SEQ ID NO: 8757 - DNA, 2300 bp, Homo sapien
gaatgtgagttatttaaagggcataggtaggagaatgcctgtgggtccttgattgacatgagacccagcaacacagaccccacactcatggggacgccccaggacctgccaggcctacgctttcacgtttctttcacttgtttccttttgccctcttctgccactgtgttgctcccgtgtcagccaagacctagaataccgggcatcttcatgggagactcattacagcttatctctatctgcctttctttaaagccagctgaacatacccaatgctctccctctatggtaagaccaaccctcccgaccatgctcccggcttccgtgtccccctctaacacccccactctccccaccccgaactccagagtccctgggagccctgcctggctctcactgcatgtggccactgtgtctgccgtgtgccttgcctgcctgttcccttctcgtgtgagctgtgaagatgctgtttgtgcagtggtggtgttttacccctgagctttccttggggtggtaattcactgtgatcttgactatctaacaagccactgggagagaatgggacccgaggtccatttcctgttaaacaccctgaggactccaccggccaaagcctctaaccttaatctgataggagaaatttgcagagggtacctatgagagccatggtagggctccagggtaaggagggaagacaggtgctctaggcaggagatggaagggtggacgatgattcctgttaatcagtgtctgtggctcctagcttccctgtgcttcaagtgaaaggccaccataaaaggtttcagctgggatttgttactgagcgcgtgattgaatttccagtcactccaaccttgctatcccttgcatttttctaaattcctgaagtccgttaaaattaggctgcagccactgttccgcagcaagctggaagcagaaaaacaagctccgttgattggaccactcctgttgtaggagtctctgattcgcgttggttgaagtgataaaagagacgccattcagtgtgaccttgaagcctccttggcccagccgcctccaaaaggctgccgttatgcatttctaaccgggccaagtatgagtttttagaaggaccagtggggttgattgaccaagccaccaagtctgcaggccgaggcaagcttgggtgggttgatgtgttccccagtgcagcctggcgctgcctggccacaaggctgccacaggaaaggctgagcccgggtgctctaccccgcttcctggggactctgcttctgggatcagccatctggatctgcctcctttttgcattgttatttggtttattagagcaaattggtgcatccgaatggcagtgagtttattctccttctcgagcagcattaggaaactgcagccacaggggagggctctgaacagtggaatggaattcacgctgcaagcttggtgtttggcgttttttgggtttttttgtttgtttattttgtttttttaactgagcagatccagatgcccctgtggcaccaacttctcaaactcttgacacttgcagctaaagttctccacttaagcttgttcttttttttctcctttctcgaacacggtggaactgacagctgagttataaaatcctaagcctcctctgcatactcctctggggaaacacaacctccttttaaggagtgaaaatagaagttcaagcagatacacaggtgatagaaatacagagattaaggtcatcaaaggcttcagaacacacaggcagggaagagcccagggcaggacagggctgctgcctgcagctcttgacccagcccctcaggtacccgtgcagcaggtcccgagtcccacctgtctgtcccctgccttgaggggaacgggagccttaggaggaactgaggcagctctaattttgaaatataagaaatatttttgctcttctcctgtttggaagatctggaaagcaggagaggtctctggcttgcttctgggcagagtggtggctgccttcgggtctccctgcttccctcataatctcctgtcctgcatagtgaggggagcggcctctgacgcctcatcagggtgggccagagcaggcagcgcagttagaagggctttagcgctggatattgccagtgagagtctgacctagaaataattaaagataaaaggcaaggtaaagcaaggagtggggagggcccaggtggccctagtaacaacctgagccctcccacctcgcgggaggtgtggacgggaccagtaacaggaagccccgagggtccattctctcccggtgcccgcag

SEQ ID NO: 8758 - DNA, 2300 bp, Homo sapien
cagatgaccagagcagagtggacagagtgaagactggaataaaataggtcctggtctctcacagcaagaggcggtacaaacatacccagcaaacgattttggaaaaattgagggaaatgtaagcaaacacaagatatgcaaaacagtaatgtccaaacctgtttgtggagagcagaataatgactacactggtgatacctttgctcattgtgcaaactaaagaaaacttgttccctttcccccaaccacatatagaaaagcacttgagttcaaaggtaaagcttgtcacactccaaatacaaaatgatttactttacatgcagcaaaatatacaagaagtgaatccgaaaaccaacttaattcaattcattatattcgcttggcacaattgcaattcagttttaaaaaaatatttgaaaaatactgaaactgacctgaattcaagtataacggtttcttcaacagaaacattatcaatgcaataaaacattacacggaatatattgaagcaaaatgccttcttgtgtttttcccttaaatttctgtctttttttaaaatacagttttaatgccaacacaactcacaattgtatttttaaatgaatattattgcattgtttttgcatatcttgtgggacagaaaatgcaaagagttactgattcccgtttcagaagcagagacagtggtttgtttttgctttcaaacggccccagattcagatcttcccacagctaaaccagaaaggggggactgcgtagtcactggtgtgcacgggcacatggtgtgggtgcatatacacgggcaggacatatgcacacagacaacccaccacacacacacgcgtcgcacacactcggagactctctcgcgcatgctcctctctcccaaacccacctgtacacccagcataaaaaggaacccaactctatcacccacatgtgcaagaccacatcaagtgcattgccagttacctttccattagataaccgaaccaaaccagaacaaaaataggttactacctaaggaaatgataacaaattattgggcatacacaatggttggtaaaactctcctgcagcggcttctattgaacctccgtggaaaaaggaaaccacaaccgtttaaataatacaagaaaaccaaacccgatgtacattggcaaaagtgaaaacagaaaggtgagggggctacaggactttgtaaacactcttcttcctcccctcccgctgggaaagcaaaataaaacatttaaaaaaaaccaaaaccgaaaagaaactgcaacatgctgtcaagaaaagtgtcaaaccacaaaacaaaagagcgctcagcggaagctcagcaccacctggttgggcggagccggcggcgcagctcctccctcgcgctgcctgcgggccggcggctggccgggagctcggcgtggcccgtgccggtcgggggatcccgtcgcaggtgggcagggacggagtgagccgcaccactgccggcccgacgcccatccccagagctccgcgcccctggaggcctcctcctccctctccgggccgggttggggtcctcctggaagtcctgccccgctcccttctccaaatccgcagggccctggctctagggagacagcgaggctcgtacagaatatgtgcaaatggtttctacaagcagagtcgaaagacacccgtttgctgtagggtccttttggtgagggcgcgcgggaagccggggtgctctccccgcggaggcgcggccgggcccggggcctgcgagctgggagagggcaggcgccttcctcgcgccccgggaccctcgccgcctcctctccccgcctctgcagacgcagccgggcgccttcctcccggagggcggctcgcgcacccaggctccgcgtctggtcccaacagaaatgaatgaagacgctgttccggttaactccaggtcacgagaacagtgaggcacttctgaaacgaacccattaggaacattgaaacaaataaaaaaaagcccgcatctggcagcgcccactacaggctgctgacgtagaccctgctgtcctggagctcctcctcactcggtcgaccccgcgcgcgcacacagcccgcgtcctcttcgcccccggctcggtcctgccccgcgtccctgcagttcacaaagggtaagagggcgccattggggctctgtggggcgcccccgctgaggatgttgtcggccgcgctctccatctcctctatggtcatgtcgcaggcgtcggccagctcctgggtggtgacctcgatgaacttgggatcttgagcaaactgcccca

SEQ ID NO: 8759 - DNA, 2300 bp, Homo sapien
agacgcggagcctgggtgcgcgagccgccctccgggaggaaggcgcccggctgcgtctgcagaggcggggagaggaggcggcgagggtcccggggcgcgaggaaggcgcctgccctctcccagctcgcaggccccgggcccggccgcgcctccgcggggagagcaccccggcttcccgcgcgccctcaccaaaaggaccctacagcaaacgggtgtctttcgactctgcttgtagaaaccatttgcacatattctgtacgagcctcgctgtctccctagagccagggccctgcggatttggagaagggagcggggcaggacttccaggaggaccccaacccggcccggagagggaggaggaggcctccaggggcgcggagctctggggatgggcgtcgggccggcagtggtgcggctcactccgtccctgcccacctgcgacgggatcccccgaccggcacgggccacgccgagctcccggccagccgccggcccgcaggcagcgcgagggaggagctgcgccgccggctccgcccaaccaggtggtgctgagcttccgctgagcgctcttttgttttgtggtttgacacttttcttgacagcatgttgcagtttcttttcggttttggttttttttaaatgttttattttgctttcccagcgggaggggaggaagaagagtgtttacaaagtcctgtagccccctcacctttctgttttcacttttgccaatgtacatcgggtttggttttcttgtattatttaaacggttgtggtttcctttttccacggaggttcaatagaagccgctgcaggagagttttaccaaccattgtgtatgcccaataatttgttatcatttccttaggtagtaacctatttttgttctggtttggttcggttatctaatggaaaggtaactggcaatgcacttgatgtggtcttgcacatgtgggtgatagagttgggttcctttttatgctgggtgtacaggtgggtttgggagagaggagcatgcgcgagagagtctccgagtgtgtgcgacgcgtgtgtgtgtggtgggttgtctgtgtgcatatgtcctgcccgtgtatatgcacccacaccatgtgcccgtgcacaccagtgactacgcagtcccccctttctggtttagctgtgggaagatctgaatctggggccgtttgaaagcaaaaacaaaccactgtctctgcttctgaaacgggaatcagtaactctttgcattttctgtcccacaagatatgcaaaaacaatgcaataatattcatttaaaaatacaattgtgagttgtgttggcattaaaactgtattttaaaaaaagacagaaatttaagggaaaaacacaagaaggcattttgcttcaatatattccgtgtaatgttttattgcattgataatgtttctgttgaagaaaccgttatacttgaattcaggtcagtttcagtatttttcaaatatttttttaaaactgaattgcaattgtgccaagcgaatataatgaattgaattaagttggttttcggattcacttcttgtatattttgctgcatgtaaagtaaatcattttgtatttggagtgtgacaagctttacctttgaactcaagtgcttttctatatgtggttgggggaaagggaacaagttttctttagtttgcacaatgagcaaaggtatcaccagtgtagtcattattctgctctccacaaacaggtttggacattactgttttgcatatcttgtgtttgcttacatttccctcaatttttccaaaatcgtttgctgggtatgtttgtaccgcctcttgctgtgagagaccaggacctattttattccagtcttcactctgtccactctgctctggtcatctgatttggtacttctccaagaacagcccttcactgtgaggtgcagggaggcgttctgatgagccctcagtcactgggccgtcatccgcatcccccatggaagaggtagctggctttcccttcccttccaccacacggaattttctctttggcttccttaggaaagtgtacactaaccgggaggataaaattaaagtcaggctgcttggagggaggggcatcctcacttccggattcttgttgctctacccaacaaggacagcaggggctcgagaaaggaactggtgaaaccctgatccatctgaaagtcaactctgcgtgctcctttctccatcccttcctcactctggagcagcctttccttcaggcttgccctaatgtttgggctgccggggagggggccaggacaagggaa

SEQ ID NO: 8760 - DNA, 2300 bp, Homo sapien
ttggaggcgaggactgagctagataccatacacagattcccgcttttttaaccattaaatcaccctcttttacaaatgttactatctctattttacagacaagaaatcgagacatgaagattaactaacctgccccaatttaaacagctaacataacacatgggccgcccaacgtcccttactccaaagcacatgctcattccactagggtattaggctatgtgttaatgtaacggcaggcaatctgaagggctccactatgtacgtgccgaacagaattaaagggggggtcccacactgtccgcttccgatgaagaaaaagacgcagaaaagaaaccgccacacgtggagaatcagtaggtgcaagccaaggacagtttgcggtaaactgccaccccggaagccagcacccaccatcctggtctcccggagtttgggtgacccctggcactgttacttctgcataaaagtagtggatttaacccctacagaggcagcgccccgtatcctctgaagctgtctccagccacctaaagagacgtcttcattatggctcaactcatttgggctgtaaattgctgaagcgaagggctttttcttctgcatccctttcaagttccgtcggcagggactacaataaatcatcacattatgacgctgaaagttcatctctaaaaagctttcaatttagtttgatgagactaatggcgtccaatcgcacagtgccgggcacataacgggaagtccaaaaatacagttattattggaataaaaattcaggctgggcgcagtggctcacgcctgtaatccgagaactttgggaggccgaggcgggcggatcatttgagaccagatgttcgagaccagcctgggcaacatggcgaaaccccgtctctactaaaaatacaaaaattagtcggcgtggtggcggacgcctgtagtcccggctacagagagccaagatcgcaccaccgcactgcagcctgggcgacagagcaagaccctgtctcaaaaaaaaaaaaaaaagaaaaaaaaatcagccaagacttggaaaaagaaatttaaaaaaggaaaattcatgcagccagtaactattgggacatcactcaccaggcactatgctaaactggggttaggtgctgagcaaaaccaggcccctctctagatggctctctaggtcccacgaccatagcttaggtgacaccggcacctgcgcgctccacagcctgtcgaaaaacactcgggaagcaaacattgagaagaaaatactccttctgtgggcctttaggaaaaccgagtgacttttttcgtgaggggaacccatctttgtaagcattcgcggaaacggcagttttattaccgccgggaagggtcccctgagtgtgtgccccatctgagttccgagctgggcgggccatgccttgccaaccccgctgctcgcagcatctgcaggcgctgagcgaggcatcgctgcctggccggggcttctcggatctggggaaatcgaggtcgctttccccggctctctgcagcggggcagcgctgtccactcactccccgctccccgcgcacgcccttgccctctttcccccaagtagggaagggtctacgcgggtcatagcagagaggccacgccgcccgtggtgacggccggtcccggggagggggcgccgccactgccatcccgcagcctgcgctccccacaccccgccgcaggcgcagcggactggtggagtgatgtcgggagatcgatcgagaagaatctggaagaatccggttagacagggaagcgggcggggatgggagggagggaggaagggccaagggaggccgccggggagatcccgagtccgagggtcccaggagaagggggagggggcaggcagccagaaggaggcaagaaccaaaaaaaaaaaaagaaaaaaaaattccgaagcgcccgcagcactgagcccgaaccggctcagtcccgccgtctctagaaagttctgcaccccgccccctctgtctgcgctcccgctcctcccagcccctccctcgcggcggggcgggaccaatcgctccccgagccgctcctgacccacctaccccagctctcgcgccgcgtgcagaggtgctcaagcctcctcgcggtccgcagtcagtgccgccgcgcccggcctcccgcacgccccgcaggtagcgcccccgcccgcggcccagagtgcgctcgcgccggcaccagctcccggataaacggcgcgccgcgcggagatgacagccgaggagatgaaggcgaccgagagcggggcgcagtcggc

SEQ ID NO: 8761 - DNA, 2300 bp, Homo sapien
catactcctctcgctctcctgtctccaaaccagaccttagtctgacgaccactggcatgaaggaagaaggaggaagtgtggcataaatacttccccctttgccgattataataataatctattattcaaccttttactggtctaatcttccaacaactgtaggagatagggattatcatcactgctttacaaataaagtgtggagaattttaaaaacttaccatacagcggaaacttgaactcagatctctcagccttttgtctcctttttcaaaccaagtcttgctgcacctcaagaaagacaagaaggttagttgactcataagccaagctgctagtaactgaatctggagggacaagtaggcagaggaggatgaacacagagaagtccctttatgttccctctggaggcttgcaggcagtgctggtgcccctttctgccccaaaccctggggtactcactttctcccccttcctcccaggtcatcaagagagagggcacaggtacagagatgcccatgattggggaccgagtctttgtccactacactggctggctattagatggcacaaagtttgactccagtctggatcgcaaggacaaattctcctttgacctgggaaaaggtaggcgtggtcagtgggctggtaggataggttcgaggtggacacaagctgtcacaagcagaaaccattttctcaggaccaagctcagggaggaatggtttatcacagtctgttaactctttcggtcactcttttttttttttttctaccgttctgtaactatattgatctctgtctccccttctcctcatcacctcccaacaccttactcccccttcaaaggtggactgtcttgcatcttaaactcttttgttcagggtcacgtgatcttttacagttcttagacctggtagcacttaatacaaccaggtacctcaccttctggtcccatttctaaaggatgtccagcttccccatgagtgtggtgcagtaactcttcaggagcactgtttgagcccagaatcagaaccctgctaaggcggtcctgtttgcttctgtacctgcaggggaggtcatcaaggcttgggacattgccatagccaccatgaaggtgggggaggtgtgccacatcacctgcaaaccagaatatgcctacggttcagcaggcagtcctccaaagattccccccaatgccacgcttgtatttgaggtgagtgtttggtcactgagatccaggctaagagccaggccttatctcagcccaatgcctggctgccctccagcccttcctgcttcttggagacaatgtagccaaggctgagggtctggccttatgggaggagaaatgcagagggctctgctgctgctagtaatggaagtaatagaagcttcgggtgggaagaggcaggcacaagcccctctccagactcaaagcatggtcagggttaaggcatctttatctccagagcggtacccagaagaatactgaaaggagtcgggatgtcagaaactatgtcccgttataaatggcagtacagaatattggtgctctagagaccagaagagggagcagtagctcccctgtgggtcaagggctgagaaaaggcttcactgaggagatagaacttgacattgttcaatctgaaaatggttgagccaatccgtgggcccttgaatactgagaaactgctgagagatgttgggtaatcatttctaatacctaccaggttgggcttatcaggtagtgtgaattaggattatctgggacgcgtcctgatatgtccgtgttagtagagcaggtagcaaatagattgctctcctcagcttaactgaaatctatgtagtctgcccacctctaccaaagttgagattagggcagctcccaagaactgaaaaaaagtgccactctacccaactccttgtgactgcccttgtggtcagatccggcctggcagttagtagggactctctcggatgagaaagattgtgtttcactgcccatgagttagcatgggaaggaattgtgtcacatcttgtcccacaggtggagttgtttgagtttaagggagaagatctgacggaagaggaagatggcggaatcattcgcagaatacagactcgcggtgaaggctatgctaagcccaatgagggtgctatcgtggagggtgagacagtacagtctgggctttcaattctcattctgatatttaggccttgtgtggctttgggcaagacacttccgttctccgagcctatcttcttgtccataaaatgaggggttggaccatattctc

SEQ ID NO: 8762 - DNA, 2300 bp, Homo sapien
acaggtatagctttaggacagatgtaggagaatgggtgtatctgtgtaattctgctggaaattaagtgtgtgttttttcacttgggaagtcagcccgtttgctgttcatcttccttgcaggccaaggcagaggcttcctcaggagaccatcccactgacacagagatgaaggaggagcagaagagcaacacggcagggagccagtctcaggtggagacagaagcatagcccctctccaccagccctactcctgcggctgcctgccccccagtctccccactccaccctgttagttttgtaaaaactgaagaattttgagtgaattagacctttatttttctatctggttggatggtggctttaggggaagggggaaaggtgtaggctgggggattgaggtggggaatcattttagctggtgtcagcccctcttcccttcctccattgcacatgaacatatgtccatccatatatattcatcagaatgttaatttattttgctccctctgttaggtccattttctaagggtagaagaggcaagtggtagggatgaggtctgataagaacccagggtggagagggagactcctgggcagccgttttcctcatcctttccctctcccagtccatttccaaatgtggcctccatgtgggtgctagggacatgggaaaaaccactgctatgccatttcttctctctgttcccttcctcacccccgacggtgtggctgatgatgtcttctggtgtcatggtgaccaccccctgttccctgttctggtatttcccctgtcagtttcccctctcggccaggttgtgtcccaaaatcccctcagcctcttctctgcacgttgctgaaggtccaggcttgcctcaagttccatgcttgagcaataaagtggaaacaataaaacctgggtgtcagacaaccctttctgttcagccttggagtggtgggtatgggtgggtacataatgggtagtagcacaatcaaggggtcacccacttagttccagttgagcttaaataagtgagcatctcatgtagatgccatagttgggcaggaagcagccccaccatgcatggcttcctgagcactgcacaggctgccgctgggatttgtgtctatggcttcgcccaaggttcccagcactccctccctccagcaacctggcagttttagtgcctctggttttcttccctgacacttaggaagacgaaagtataaagatctagaagactgggacaccatgcatgttcattttgaagttggaattggtcttctgcctacctctgatctggcagaggtatctgcattttggtttgttaacaaggtaaaactcctggtgtcactgacctcctcctgtcagataacttacatgattaaggttaagagtaaagcagagtgttcacgtccagcttccttctcagccttaacaggaaaaggcttgtgctttttttctaactatgctttgacccttaactcctatggcatgatggggccctgggagaagccaggcagcacaagccagtcatgctgagctgcctccagataatcctggctccaggccagagcccgtgtctgccctcatccctctctcctactgtgagctctccagtcctttcccaacagcgatgtggttgtctgcttagccacatgcctgtatagttccttccagaagaaatgtataatggtggaagatgtatttctgtgtgaaaattttcaccaagtcatacaacacagctgatgctggagccaggattaaaattggggtgtacaagtctcccagtgtgagtatcccttgagcccaagacaccaaggatgcagagaactgtgactgtgccactgcacgccagcctgggcaagagagtgagaccatctcttttttaaaaaagtccctgtgtaactgctttcttactgggcttacctcacatcacagccctgtgtttgtggtttgtgtctgggtcctcttggtatttcaaaagtagtagattcttacgcctgcagccaacaataatcactaactcaagcatttatggagtaagcctagcactgtactgacagcatcacatgagtgaaactgaatccttgcaaccatcctacaaagaaggtataactttaataaccctatttacagataagaaaaccaagactcagaagttaaatggaaaggtgaggtctctgaactaatccagactctcccatgaggttcctttggcaagtcctgggcttctgtcctcatctgcaaaatcgaaagcattcctgaggtttcttccagctctgcatcctgtaggattcca

SEQ ID NO: 8763 - DNA, 2300 bp, Homo sapien
gtttactgttctgacctgctgttctttcttacctggctgtcagatccactgggacatctaggaaaaaatctgccacccccttcccccaagaaaaggtcttgccctccagcctcctcccactatgtacagacatagaaagtagggacaagccgggcatggtggctcacgcttgtaatcccacctacctgggaggctgagacacaagatctcgagcctgggaggcggaggttgcaatgagcccagatcgcaccactgcactccagagcaagactctcaaagaaaaaaaagaaagaaaaagaaaaaaggggccgggcgcagtggctcacgcctgtaattccagcactttgggaggccgaggcgggcagatcaagaggtcaagagatcaagaccattctggccaacatggtgaaaccccgtctctactaaaagtacaaaaattagctgggcggccgggcgccggtggctcatgcctgtaatcccagcactttggaaggccgaggcgggtggatcacgaggtcaggagatcgagaccatcctggctaacacggtgaaacgccgtctctactaaaaatacaaaaaattctccttgagtggtagcgggcgcttgtagtcccagctactccggaggctgaggcaggagaatggcttgagcccgggaggcggagcttgcagcgagccgagatcgcaccactgcactccagcctgggtgacagagcgagactccgtctcaaaaaaaaaaaaaattaaattaaattaaattaaaaattagctgggcgtggtggcgctcgcctgtagtctcagctactcgggaggctgaggcaggagaactgcttgaacctgggaggcagaggttgcagtgagccgagattgcgccactgcactacagcctgggcaacagagcgagactctgtctcaaaaaaaaataaaaataaaaataaaaaaaaaaaagataaaaaggaacagcccctggtccaaaatcccagataaggtagaatcattttttttttttttttgaaacaccaagtgcgagtcagcctgggtttttagacctaaatctaaaaatgtattgaacacctgtatgatttcataaatattgccctgattgacgaggcaccccaaagaaaggcagaactggattcaacatggaaagaaagtatcccaagaagccagccatgagagtgacagtcccatctgtgctacaagagtaaggctactgaggttgagatgcaagagctttgtgctggggggccacaagacagagcagatccggaatccaggcaaccttcacttccagcctgaagactctcctacgaactatgatagtaaatgatggagaggccctagggtttgggatcaaacaattctggtttgagcacgcaccccgccccacaatccttccttctgccattttacttaatcttgctgaacctgttttcctcagccaaaaaaaaaaaaagctcgcatagtggctgaactaattatgtgaaatatgtgaaatgtgctttgcagcaggtggcttttaaactattgaccagaaaacacatacactgaaaaaaaaaattttttttacattataagccagtatacacatataagtatatacaattgaaacaagagtttcacaaaaactgtacttaccttactacctgggagtcacttggtatattactattgtatttaattttttatatgctgattgcaactcactacattgttttcactcctaatgggtagttttttaaaaacacttttcaaaaccatgcaattatcagttattacgaagattagtaagattctcaggaatggtctgatggctaggaatcttcattgccagggaaacaaaggaaaaaggtcaaggttattaggtcaagcccttgggagccctgttgccaagggaacagatcgacccccgtcagggttggtttacccacggtctgcagccctgtggagaaaaggagtggcccgtgggcctgtcactcacatcagagttgggaagcccgcctccaagcccggaagacccgcctcctctgtaaggttaaaggaggaagaggcagagattggaggttcaggcagtgacgtaacttgctgccttaggtggccttccgctctggcggctgtcgcgacgggggttcagggaatatttactgggcctctccgctccctctgctcttggaggtgccatgaggtcagttagctacgtgcagcgcgtggcgctggagttcagcgggagcctcttcccgcacgcaatctgcctcggagacgttgataacgatacggtaggtgcatgcgcaccgcaagag

SEQ ID NO: 8764 - DNA, 2300 bp, Homo sapien
gattcttactctgtcacccaggctggagtgtagtggcatgatcagagctcattgcagcctcaacctcctggactcaagcgatcctcccacctcagtcttctgagtagctaaaattacaagtgtgcgccaccacagctggctaattctttttttgtatttttagactaccacgttggtcaggctggtcctgaactcctggcctcaagcgatccttccaccttggcctcccaaagtgcttggattatagataggtgtgagccacagggccagggcattcacatccttttatagaccataaaactttctgccatatagtagagttatattatacttcctttagactcctgaagaatagcattcattgatataccttccggtaacatatcttatagtaaatactcaatgaatgtttggaatgagaaaacgatgtgtgtgtatatccaagcgtatatcaaaatgtctatgtcccaaagtaggtgaagttgtcttcctttgtttccaatagcgaacttcttggttactcatatctgagtttcctaacagggattccagtcttctcatccttcctctattcctaacctggagttttcgaaccaggaggccatcaaactcccaaggattcctctaaacaaacaaatcaccgtttctccatttctggcagatcttccccaaacttatgaacccatcacatataaccactttttttttttccattttattttttgtagagacagagtcttgctatgttgcctaggctggtcttgaactcctggcttcaagtgatcctcttgcctccaaagtgctagaactacaagcatgagccaccgcacctggtccacttccttttttgatttatttatctgggagttctgcccctattgtatgagtctcataaaaaccagtttttttgtttgttttgagacagagttttgctcttgttgcccaggctggagtgtaatggcgtgatcttggctcaccacaacctccgcctctcgggttcaagcgattctcctgcctcagcctcccgagtagctgggattacaggcatgcgccaccacacccagctaattttgtatttttagtagagacagggtttctactaaaccctggtcaggctggtcttgaactcccgacctcaggtgatccacccgcctcggccttccaaagtgctgggattacaggcgtgagctaccgcgcctggccccgataaaagccagttttaaagacagttcattttctccactcatttctaggagggaatcatcaatgggctgggaaactgaaggatccaattccaacccattctcctagggactcactgattcaccacgattcttctttcttagtgccaggaccagctgcttagagtggccgttgacacaggcacccaatacaatcggatctctgctggatgtctcagccgcctggggtaagaatgtggcccaaacaagcaagtgggggacagggtttctttttggggtgatgaaaatattctcaaattagatagtgacgacagttgcatattttatctcaataaagctgttatttaacaaaagagtggctagaagactctggcagagaaggcaaggatttagaccccacgtgaggtcaggggttggagatgaaaccatagtagagagggacacctgctgattaatggggtggaaccctctaggggctgtggtagccataacccttgcttcccaaccacaggttagagaaaagggtcctaaaagcctcagctggggacctggcccctgggcccccaacccaggtggagcagttggagctacagctggggcaggagactgtggtgtgctcggcacaggtggtgggtaagtccccccttctgcaacagccctggtgctcacctcacctttctctttggggtggggcaaaggctgagactttcactccctgcagcacgaggagttcccagagatgttctgactatcccccatctctgtgccagtgtcctcggatctggggatggggtgggcagagaaggagcaacggctaagaggagggcagcagtgaccactgggaaccctcagcctcttctgttttcaaattgttcctatagatgctgagagtcctgaattctgcctgggcctgcagactctgctttctctcaaggtaaggcacccactcagggcctgacccaaagcactgggaaaaagtagtagaaggcacaggtgtggaacctggaccaggttctgatgagagtgacttagagatgggcaactgtccctttgcttccttagaggttccttacttaccaccaagtgaaaaatcaagag

SEQ ID NO: 8765 - DNA, 2300 bp, Homo sapien
ctcctgatctcaggtgatccacccgcctcagcctcccaaagtgctgggattacagacgtgaaccactgtgctgggtcctaagacttaatgtactagtttcctggggatgccataacaaagtatgtatcacaagcttgagtggctaaaacaatagaaatttgtcatcttacagttctggaagctgaaagtacaacaggaaggtgttggcagggttggttccttctgacagctgtaaggcagggtctgttccacgcctctcccctggcttctggtggtttgctggtcctcttaggtgttccttggcttgcagatgcattatcccgacctcagccttcacgtggcgttctccccatgtgcgtttctctctgcgtcccacttcctccttttaataagagcgcagtcatatgggagtaggctcatcctaatgacctcatcttaacttcaccatatctgtaaaggccctatctccaaatgaggtcgccttctgaggtactaggggttaggggtacatttggggggtgaaggaaacaattcaacccataacactttctttccctctaaatggggattagaatacagtatttcttcatataattgcagtggttgtgaaagtgtctcaaagaggcttggttcctagaagctcagcagacatctggtttgtctgaaagtacatgtgccttggagctgtctgagtcagactgcacccttagggagcagggctcaggtggggtaatcaccctgtgagcatccaacacaggtaaacaggtgcttggccaatgcgtttccctgatggtgaagaggaaaggctggagagaaaaatctgctgataagccagggctagaaaaagtctgataccaagtcctggagaggatgtggaacctcaggagcccctgtgtgcagctgtctcagtgtgcactggtaaaaacactctggcaatatgccaaaaaggcaaagctgtatatgggatgccccagcaattccactcctaggtgtaggtgtatactctagagaaatgcctacataggtgccccaggagatgtgtgcaaaaatattcatagcagcattgtttgttagacctaaaaatgaaaaataacctacatttcctcaatgtcatgcatgcatctaatggaatactatgttacacagcaggtgaagtcaattaactagagctgggcataccgtatggatgaatctcactaacaaaaactattcagcaaaaaagagcagattgcagaagaataaatacagtgagtaggacaaaaccaacgacatattgcttagaatgcatatgtaagtatttgcataaagaatataaagaagtctgggcctgataaacaccaatttcagcaggcggaagtggaagtgcacagggagcttcaacagcttattttttaaactggtgatgagtgaagagtactggttatcttattctttataacttctgtatatttgaaatgcaacattttttaaagagccaggacttgaggagagtcatataaaggagactgagatgccagggacaatttctactcgtgggaagattcagagttgttcctgtcattccctggaacccagaatccagagtcaattagttaaagactctgacatctgctaggcgggaggcaagagacctaacaaggtaaggctagggggatgagaggagggaaggacgctctcatgctgcccctctttgatctgaacccagttactggcctgcgcgccagccctgggctgcagataatgccaggagaaaacagctgggcagtcctgggaagcctgggagggatgcagaggagggcgggggccacacacgctgggaggtgcactaaggctgctgcccccacacagtgacaagcgcttcctcgcaaaccacctggcacgggcaccctgacagtttacagcactgtctctcactctccttctctctctctctctcacacacacacacacacacacacacacacacatacgccccatccaccgcccgctctgaccaggaccccagcgttggggatgcggccaagtcagccagctgtgggccctgccaaccctccctctcttctaggactgggtttttccagccggagtctcactccctctacagcaatctcgggaaattggagactgacgcggctgctcctgcatgttatttatttttcctctttccctcccgtggagaccctcctgttggaaagagagctgcagcacgggacagagacaggcaggaagaagcagagaggactcggtgacgcccccaccgagcagcccctggcccactcctccagcaggggccatgagca

SEQ ID NO: 8766 - DNA, 2300 bp, Homo sapien
gggtggggaaggtggcaggcagacggcacacatcgagccacgtgtgaaagccccaggtgtgctgggcgccacccttccaagggtggatgagccgctgacgcaccttggacttcatatctgtgcagggcggcagcttcagagccagctggtggtaggcttgccgggtgaagccagggaactcccaggactcgctggggaggaagaactcacgctgagcccacgtttgggagggtgggagggactcgctggcctggaccatctagggagagacaaaagggagcctggggaaggttgtgcagacaggggtgcagaaaggtgggtgaggcactccgctctccttcccaggcacgacctctgccagcccaggattctcatgaggacgcagaagtcctggcagggccgcatctccatccctctccttcccggcggaagttatggctgctgcgtatcatcttcacagtcactcatcttttgatctcttgccattgaccatattttggctttgacttcccaccctctgtactcagctttcactctttaccttcacctccctcctccgttctggcatccccacattcccacccaggaactggtgctccttagagggcacatcaggcctcaggaaatcatgaagggaaatgctccctaccatgccaaggggggcagcccaccttcacttgctcctggtcttggcggtataccaggaaagtcctccagaaaatagggccaggggttttcccatcccagactcctctcaatactcatttgtccgtcactgacgctttcctcccactcctcattaaaacgctagtatagaaagcatctagaatggcagctccttcccctttctgcaccctgccccccattaaataaacagcagcaagtacatattgatgctgtgctaaatacttacatggatcttattgaacccccacaactctatgagcaagtattgctatcgtccccatctcaaagatgcagaaagcaacacacagtaagggtaggtgactcacacagggtgctggtgcctgagtgacagctgggacttaagccctctgtctgtgctcttgcttggcataccatgctgggtgaaatgaaatggccttacttagcacagtgcctgactgcaacaaaaatgtgcctcttttaaaatgcttcgccctcctatccatccccagggatgttttctttttttagatggagtttcactcttgttacccaggctggaggtgcaatggtgcaatctcggctcactgcaacctccacctcccgggttcaagtgattctcctgcctcagcctcctgagtagctgggattacaggcgcgtgccaccatgcctggctaatttggtatttttagtagagacggtttcatcatgttggccaagctggtctcaaactcctaacctcaggtgaaccgttcccctcgacctcccgaagtgctgggattgcaggcgtgagccactgtgcctggcccccaggacttttctgattgcaaaaacccacctgtttcttgagcttgggcccctaagtcatttctacaggatcaccccagtgggtggggctgggagatgtggcactagccaggcatctcctctctgttctgagctctgggttcctagtgtcataggatgaaaaggggaagacagcagaaaatgtatgggccaggcagtctgctgcccagaagaaagcctggcccactataagggacagcctgtagcccagtggggtacaaaaaggtaggcggcagagatgggccaccccctacctgcaggaaaggttcttccatatgagatgggtgactgggccctctgagtgatctttgccggttactggccattcttctgggcctcagagccaggaggggcggctttgtggggaagccctttctggcaccattgtttactcctggggttgctatggtgatgctgcttgagtggtgatgcagagaagaggccctcacctgtccctggagcctcttgtgacccttgggcccctggctacttttcaggttagacaggcaggggatagcactttcttcaagttctgactgcaaaaaactgtaacaggagctgctgccgggcagaagaaaagcagggcaggctggctcccaggcctcagggtggggatggcagtgggaatgaagcacctgtaactgggcccttcctgccctaatgttcagggggccctacccctcgtgagcttgtcttattaagaaccctcaaaaggcctaagttaaccagcaggtccaaaggtcccaaggaacaaggtcagagacgccagggaaaagaggtgagctgt

SEQ ID NO: 8767 - DNA, 2300 bp, Homo sapien
tctcaaactcctggcctcaagtgatccactcaccttggcctcccacagtgctgggattataggcgtgagccaccacgccgggcctaattccctagtttcttaatttctctgagccacctttcttgctattgatcactacctcacagccttactctgcttttctagcccctgacagctatctaggtcttttctttatcacaatctaaggttggcatcagtctttattcccgtagaatagatgggtttatggctgaaggtgacggctctgcggtgtggagtgtcaggagagttgccaagagggctgcaaagacaccagacgaagcctgtgctgagcacagtgggaggggcctgaggctggtttccccatgtgtttgaagggtgatgtttctgaatctaaagtagctgataaccagttgtcttgctcttcttccagaactccatccgccacaacctttccctgcacgacatgtttgtccgggagacgtctgccaatggcaaggtctccttctggaccattcaccccagtgccaaccgctacttgacattggaccaggtgtttaaggtgaatgccctgctttcctctaaatagggcctaagttggaggttgtcatagccatctcaaaaggaaacaagttctgctagtgatgctttcatttgatcaggggagagttagaagccagccacccaattagtgacttgcacaaaacccagtgaattaagtacacttgacaaataccaaatgacacatttttgtgccagaccagagcaaggagaaggctgttctgacccaacagaaagggctccccagggcagtgttttcctaacttccctgtgaatgggaattgcctgggacattgttaaaacacagcttcccagacccctctcttggggctcttgatttagtgcttctgggatgggcccaggaatttgtatttttagcaagcatctcaggtgattcttacaagaaattctgggaatgcttgctctaaaaaaagcccttcctgctgggtgtggtggctcacgtctgtaatcccagcactttgggaggctgaggcaggtggatcacctaaggtcgggagttggagaccagcctgaccaacatggagaaactccgtctctactaaaaatacaaaaattagctgggtgtggtggcgcatgcctgtaatcccagctacttgggaggctgaggcaggagaatcccttgaacccaggaggcggtggttgtggagagctgaaatcgcaccattgcactccagcctgggcaataagagtgaaagtctgtctcaaaaaaaaaaaaaaaaaaaaaaaaaagcctgccttaggctggagaccagaagctgagctaccagaacgtcttttcagaaagaagttattttggtttttcagagtgcccataaggctgctggtagctgtaaccattctcctgggaggggcagttgtctggggtgtcttttgtcatcagtcaggaataagtgtttttcccaatccggtcaaattgaccacgttggtggtaacttcatctcatttctctcccacaatgcctggccgccaccagccactggacccagggtctccacaattgcccgagcacttggaatcagtaaggttctttccctctggctcggggcttggccttgttttcctttcactgctcagcatggctttagtggacagagacaagatgtgatgtggggaagggtccctatggccatgttttgtctaggtgccagccctagacacagaacaccctgagggtcaggcacacacccacttccctccccttccatgggcatcacaagggcacactgagcagagcagggcacagcaggggagcatgctgcagcagccacaagcgcatggcaccagcctcaggggcggcagttcgttcgctcacttttgtgcctagcttttctttgccacgcatatagctacctgctctggcatcccccaggggtgttgaggacacgtgggtgaagcggtagtgccactctgccatcatgtgtctgtaggccacccacctgcccactcatcacagttttggagactgctcgcctacgtccatcccctcaggttggcctcctctctctgggctgtcattaactcaagcacacaccaccagagcagctggtggggttttgccatcccctctttaccttattgtgttaacataggtttctttctctccccatctgccacaagcagcagcagaaacgaccgaatccagagctccgccggaacatgaccatcaaaaccgaactccccctgggcgcacgttagtatgggagagtgggccttgggcc

SEQ ID NO: 8768 - DNA, 2300 bp, Homo sapien
gagtcaaagaccaacctgcatacacactcccctgctcccaggctgtctcaccactaggcaacaccgcctccatcttacttacccttttgcagggcccttttcctggttcttgagaatgtagcaagatttccccgctcaggatggggatgggtcggaggagccactctggaagtttcccgggcaagaaagtgttggcaataataataacgggctggtcaggaagtagaagagaaaattaagacttagatatcctgtggaaaaagaggaataatatctactgattgatgcggggagagagggaagcctggaaagatcggaggtgaaagtaaaactgagatttgaaggtagaggtgtggagggcctgtgaactctatgcagatgacaaatgtcaaaaaagtgcagttgcttttcagggagagaataagtgtcctaaaaaagagacagccaattcctctgtcttccaaagttccgtgaaatagaattacacaattttgcttaatggtagaatattccatgtatctattaaaatcaacaaaaggccgggcgcagtggctcacgcctgtaatcccagcactttgggaggccgaggcgggtggatcacctgaggagttcaagaccagcctggcaaacatggtgaaaccctgtttctactaaaaaaaaaaaaaaaaaattagctgggcatggtggtgcatgcctgtaattgcagctactcgggaggctgaggcaggagaatcgcttgaacccgggaggccgaggttgcagtgagctgagattgcgccattgcactccagcctgggtgacaagagcgaagctccgtctcaaaaaaaaaaaaaaaattaaaaaaaatcaacaaaagacttaaaaaaaaaagactacactgttagcatttcagaaccaccttagtgtaatgatgatagctcattgtggtactaagaagacaggggttatagtcttatttctggaaaagaaattaataaagtggcatgcttagttaaaatatatataaccacatgcaagtactaaaatgccactgtataaatacaatacaaattgtaaaagaaaacatgctttttaaattagagcaagtataatagcctgtgaaataaatgtcaccctctagagttgttcagtgcacaagctgcacaactttacatgggccttcagtagaggtttccattttatgtgaggttttgtaaactgggagatgatttttccagtagtgtggcaatagtacaatctgcctttcttccctgattctgtgtgcactggtcctatttacaaagtaatataaaaatcaaaaggcttggccagacgcggtggctcacgcctgtaatcccagcactttgggaggccgaggcgggcagatgacctgaggtcaggagtttgagaccagcctgagcaacatggtgaaaccctgtctctactaaaaatacaaaaactagccgggcgtggtggtgggcacctgtaatcccagctactcaggaggctgagacgtgggactcgcttaaacccaggaggcagaggttgcagtgaactgagatcgtgccactgcactccagcctgggtgacaaagtgagactctgtctcaaaaaaaaaaaaaaaaaaaaaattaaaatcctttgtcttgaatggattatgggatcagagtttcatcaggactcctaattaccatatgctttcctattctagcatcttccatttctgtccatacagtcattgcaagtgatctatttatattatagtaggcaattatagagatttccacatatttgtagctatcccatccatttctgtagccaaatattctgaagcttcaaggagatctttgtcttatctccaacccagtcccatttttgccctttgaattgcttctgtctgctgtaattttagccttcttttgtcagtaaagcttatctccttattatctgaggtctttacaaaagtccatggaatgtttacctgggcctttaggctcatgttcctggtcatataaagaggagcacctttctctaaaaggacctcttctcagcctaaacaatctctaacatcttgccactatttgcattttccagggtccacacttgtgattctcaatggagagtgaaaacgcagattcataatgaaaactagcccccgtcggccactgattctcaaaagacggaggctgccccttcctgttcaaaatgccccaagtgaaacatcagaggaggaacctaagagatcccctgcccaacaggagtctaatcaagcagaggcctccaaggaagtggcagagtccaactcttgcaagtttccagctg

SEQ ID NO: 8769 - DNA, 2300 bp, Homo sapien
cctgagtagctgggattacaggtgcccaccaccacgcccggctagtttttgtatttttagtagagacagggtttcaccatgttgctcaggctggtctcaaactcctgacctcaggtcatctgcccgcctcggcctcccaaagtgctgggattacaggcgtgagccaccgcgtctggccaagccttttgatttttatattactttgtaaataggaccagtgcacacagaatcagggaagaaaggcagattgtactattgccacactactggaaaaatcatctcccagtttacaaaacctcacataaaatggaaacctctactgaaggcccatgtaaagttgtgcagcttgtgcactgaacaactctagagggtgacatttatttcacaggctattatacttgctctaatttaaaaagcatgttttcttttacaatttgtattgtatttatacagtggcattttagtacttgcatgtggttatatatattttaactaagcatgccactttattaatttcttttccagaaataagactataacccctgtcttcttagtaccacaatgagctatcatcattacactaaggtggttctgaaatgctaacagtgtagtcttttttttttaagtcttttgttgattttttttaattttttttttttttttgagacggagcttcgctcttgtcacccaggctggagtgcaatggcgcaatctcagctcactgcaacctcggcctcccgggttcaagcgattctcctgcctcagcctcccgagtagctgcaattacaggcatgcaccaccatgcccagctaattttttttttttttttttagtagaaacagggtttcaccatgtttgccaggctggtcttgaactcctcaggtgatccacccgcctcggcctcccaaagtgctgggattacaggcgtgagccactgcgcccggccttttgttgattttaatagatacatggaatattctaccattaagcaaaattgtgtaattctatttcacggaactttggaagacagaggaattggctgtctcttttttaggacacttattctctccctgaaaagcaactgcacttttttgacatttgtcatctgcatagagttcacaggccctccacacctctaccttcaaatctcagttttactttcacctccgatctttccaggcttccctctctccccgcatcaatcagtagatattattcctctttttccacaggatatctaagtcttaattttctcttctacttcctgaccagcccgttattattattgccaacactttcttgcccgggaaacttccagagtggctcctccgacccatccccatcctgagcggggaaatcttgctacattctcaagaaccaggaaaagggccctgcaaaagggtaagtaagatggaggcggtgttgcctagtggtgagacagcctgggagcaggggagtgtgtatgcaggttggtctttgactcaatgtagtacaatctcagtcttcatctcagccacagtcggcctaagaaggtaggccaccccagccctcccgaggccgcgggcagggtgcggaggtcagacttccagggaaggccaaggggcgctttaagcagtgagaaggccacggccaggaggtggacgcagaaaaaacttgcaccctggctcagattcttcccgtgtgacccaaatctccactcgtggcccgtgccctgctgctagacgccctgacctccgcgcccggaggccttgctccccgcctgtgcccaggccaggcctgggactccattgctgcatcccgctcacctccagactgcagtcgccgccgccgttaggccgtagctccgaaggcgggctccgggctcctccaacctgggggccgagccagggccccggacgggggctcgcgccggaccggccgggtccccggcggtgcgggcggggtgggaaccccgggggatcccgggaggggagggggtcccgggccggggccgggggtggggtctggcaccggagctttcagtttgttccgctgtttgaaattggcgccggcggagcgttaaggtcacgtgacggaacgtcgccaatcggcgccggccttgtctcggcattccgggctcgaaggctgtgcggtctgccaggagctgcggccccgtccggcccgggctggtaaggcggaccgcaggccggcttgtgggggaagaagtggccgtggggccggggaggggccggaggggtccccgccgcgtgggtgggcgagccgagggagagtttggggacgcgcggaagcggcgtgacagg

SEQ ID NO: 8770 - DNA, 2300 bp, Homo sapien
gaaccgaatagttcaagatcaatctgggcaacagagtgagaccctgtctctacaaaagatacaaaaattagatgggtgtagtggcatgtgcctgtagggggtcccagccattcaggaggctgaggtgggaggatcacctgagcccaggaggttgaggttgtagtgagccaaggtcatgccactggacttcagcctgggggacagagcaagaccctgtctctaaaaaataaaaagataaataaaaataaatatataattaaaaaaaaaactcattctgagcattgctttgtagtaaaaaaacaaaaactgaattcacgatcattcccctgacaaccccccgcccgtcccttggccaaagtgattatcttccagggcccttggtcagggaatagtgtcattattccttcagttatgcagctgaaaatcttgacacttctacctcccatccaacccaccatcaagccctgtcaactttacctcttaaacatgttttcttaatgccccttttttactctctctgtctccttctttctcttcctctctctctctccctgccaccctttttcaagctccagcagttcttgcctggagtattgcaacatccaactgttctgccctaatccactctagcaatccccgctatagagggaccttttaaaatgcaaatctgacctggattcacttctgcttaaagcttatgactggtttcctttaattcttggataagcacaaaacttctcggtatggctaaggctctgcttcctccggctccagcttcaactcacaccacactccattcaggtcgattagctcaaacccctcagatatttctcagcctttgtactcactgtgcttcctcctgccatccagcctttgcacgcctgattccctctgcttagaggagttccctcctttctttgtaaaaggcatcagatctcacaccaagctctcattacaaaagcctttcctgtcctacctctcaagatctcgttattgtaaatactcaaagtatcattaacctctaatgtttcaatttacagcaataattcaacatttgtttgttttggagacggtgtctccctctgtcgcccaggctggagtgcagtggtgtgatcatggcttaccatagcctccacctctcggcctcaggtgatccttccacctcagcctccagagtagctgggactacaggcacgcaccaccacgcccggctaatttttagtagagaagcggtttcgctatgttgccaggctggtctcgaactcgtgacctcaagtgatccacccgcctcggcctcctaaagtgctgggattacaggcgtgagccactatgcccagcccacatttgtttatttgattaaaatgtctgtgcccctcttccaggattgggctgtgagcccaggggaaggaaagaaccttgtctgccattgtatcttcagggcctagcggtgcctggcgcacagcagttgctcaactagactggttgactaagtcaataaataaagcactacggtctattatatccgaaggcttggcttcgggaggggcaaaagacaggtttcgcgctgaggtagggttcatggtgccgacattttttttcaagatggaagaaagcggagataatacgcagccctcaaaggaacttagtctaatcggggggagcagacgatcgttcactgtgggaaaatggggtacgatttcccccagtgaggaaatcaactaaagccgagctttgaaaaggggagcagaggagcctgaggggaagcgggggcgtgtcgcctggcgtgaccagcgcggcaggaaaagcgggcccagggacccgggcctgtcacgccgcttccgcgcgtccccaaactctccctcggctcgcccacccacgcggcggggacccctccggcccctccccggccccacggccacttcttcccccacaagccggcctgcggtccgccttaccagcccgggccggacggggccgcagctcctggcagaccgcacagccttcgagcccggaatgccgagacaaggccggcgccgattggcgacgttccgtcacgtgaccttaacgctccgccggcgccaatttcaaacagcggaacaaactgaaagctccggtgccagaccccacccccggccccggcccgggaccccctcccctcccgggatcccccggggttcccaccccgcccgcaccgccggggacccggccggtccggcgcgagcccccgtccggggccctggctcggcccccaggttggaggagcccggagcccgccttcggagctacggcctaacggcggc

SEQ ID NO: 8771 - DNA, 2300 bp, Homo sapien
tcatctgctggccttgacctcacaaagtgctggcccagccgagatttgttttctaagatactttgtgtcatgaacagttcagtttagtgtcatgaactattcacttcatatttttcttgtattaactgtttaaatttttaaaatatcttgtagtaactctttaaaatgtatgtaagtaaatggctgcagaaagtttttttagagaatcctgcttccatcagtaatacagcaatattaccccatccactaatggtctttgtttccttaaccactactcattaatccttaatcacctcattcaaactaattcattctgcatttttgagtaccaactcttgtcaggctcagtggcagcttctacgacctgatggatggaaaaaaatcaaactctgtgactctatggttgactgccacctctgcaaccttgactcatctgctgaaaaggcaagaagaagaaagggcagcaagccctgttttagggactacataagatgaggggagataagggggacatagatgagttctttaggattgcgtgtgttttgagtttttgtttctaactgaagaaatctgtcaatattaaatagggtgggaaaatggtttcttagaataactgttcaactgtgtgtaaataaggaaagttttcaatgagtattacttattgtaattaatgcagaaggacttccccagtcaaccgaatgtctcggccttttactcagacaagtagcatctcattaaacccattcatttagcattcattcagctggacctactgtgtcaggtccagccccaactagatcaagcagggattactgtatattttacagatgggagtttgatgcagagaatgaaccatgcacaggtcacacagtgagtgcacgctgacccaggcagtgtaacggtccactctcagcgtgtgcctcctaaagtactaacttgtaggttcaaaaccaatgtggaaacaactttgaccttagaacgccataaagccatttgtgcagtgacttgtcaggactcaggatgttttgtagggactataatgtgcatgtcggtagggagaaagggactgacatttggggacgggatttattggagacaagagtacacatttagacaggggctctcacggtgggctatggatgtttgaggaaggcccacaggaggtagaaaggtagatggaaagagtctccaggacgggcccacgcctgtaatcccagcactttcggaggctgaggcgggtggatcatttgaggtcgggagttaagaggccagtctggccaacatggtgaaaccctatctctactaaaaatacgaaaaatagccaggcagtagtggcccctgcctgtaatcccagctactccacaggctgaggcaggagaatcgcttgagcctgggaggcggaggttgcggtgagctgagaccgggccactgcactgcagtctgggcgagagagaaaccctgtctcaaaaaattaaagtctctggattccctcgtgtgctttaggggagtctgtagagcaggtctaggaatgacctaaaagcttgggctggagtaggggaagcttaagttctgtgcagttgaagttcaaggccagcctatggaagatgcgtttcactgggagtgactgatggagtggagagggtaccagagggggtccacgaaggccgctggtatcagggcaggggccagaatgggaagcggcagaggtctgtacatcctcacagggcagacctcgggaagcgctctgggtgggctcggtaaaaatggcgggggtgcgaggagccgttgcgtgcgtggcggttggtgcggtataggagactcctctgaccggactcgcctgctggccgcgcggcgggcgaggcccaggcaaaaacaaagtcttcccgctcagtaccggccccgcgaggcgctccagaggaccaagccttagctcgcgtcaccccacccccgcgcaggcgcgtttaactcccgctcgcctcccgccccttagcaaccctcccgcatcgttgggccccggcaatagccaatgagacaggagccacgagaacacggaccaatcggcggcggcgacagtgtggaacgcggttgccaggaggcgggacgcggcggcgtgccagcctagccactctagcgacggcggggaagagtgtgtacgtggtgggggcttcctcggtggcgggcatggaggcttcgcgctgccggctcagtcccagcggcgacaggtcagacagggccgtggcaggtctcctcctgagcgaggcggaggggcgaagcgagaaggcggaggtcctctccgggag

SEQ ID NO: 8772 - DNA, 2300 bp, Homo sapien
tcttcagcatggcacgcaatgaccttcaaagtctggtatccacttccttcaatcttattatccacatctctattctccagccacaccagtttacatagcttcgctaaacacaccagcagactggctgcctcacctttgtaggtgctattccatgtgtcttaaatggggtttccagtctcagtttggcaaaccctcatttatcctcaagagctagatcaaatgcactgtaattggatttcactgttccttcccttgggttcccattgaactttgcataattgtctgtcttctcacctagactggaactacttgaggaaagggacctactccttcccttagtgcggtgtcaaagtcaacaaacactccaatgattgctgaattaatataattattattaattactttgagacagggtttcgctctgtcatccaggctggtgtgtagtggtgcattcacggctcactgcagcctcaactttctggggtcaaactatcctcccacctcagcctcctgagtagctgggactacaggtgcaggccaccatgatgcccaggctgatctcgaactcctgggctcaagcgatccacctgcctcggcctcccaaattgctaagatgacaggcgtgagccaccgggccccccatgattgctgaattaaatagttggtgcttagtgtgtacttcacgtggcgctgatatgctgccttgcgttttggtcttttcatgtgcatgaggtgtgaccaagccttgatatgattcattatttaacaagaataccacaattcatctattcaaatgagggctgcgtcttcaacgccttcaccttgcaggactggatgcttagctcagtcattgcttgaaacacttttggaatacctctcttggaaacaactttggcatcgatagcactttcctttcaatatcttccacggtagcaattgtttttcatttatgcagcatttatcatgcacttccctatcccaggcaccaggctggatctgtgtgaaagataagataaatcagacattactctgtcttcaaggaagtttctgtttggcaagggagataagatctagacaaccacccaacacaaggctaagtgataatgccccagaaaaggttggatttgatttttggaaaaagccaaaagtcctttggtttcagtctcctggccaggtagatgatggcgctacctgccagcacactgctttaagcccgtttgtcctaagcgtctccaaacaaggagcccagcgtgtttccagcacctcctgccccaataagagactcctgggcatgtgtgtctgaagtccagactctcaccgatggcagtatacaccgaggcctccccagctaaactctgagctctttgagggcaggtgctgacggctgatcctgatcttcacagtatctggactcatcacacatcttagatgaatattcattgagtcactgagcccagaaggcgtcccatggcatgccacatggacttcaaaccgagtgccctttctcccatgtggtttactcgtagtggcggttttacagatgcccaaggggcaggagagaaaaacggaaagagctaaagccggggagggcaagcgagggggcactggcagcggatctgggaatggagcccgcgagttcctgcttcctggttccccggagcaagtgtcctttggtgggagccgcaggaagggagcagcccttcctgcgcgccgggagcccgccccttccccggcctcccagggactcgtgcggagggacgccgggtggcggggcgggagtctgggccccgtccacccccccgcccccgggacagccccaccccggcgaagaggaaggctctcggctcctgggaaagggagtcgggaccccgccaggaggggagggcgcggggcgcgcaacgagcagccaaacagtcggagcggagagatcgaagggctagtgggcgtgggggccgcagccgaggcccgggtggaggggtccccgccgtccctcggccccctcccccgccgcccgccccggcccggcccggccccgccccgccccggcggcccggcccctcgcccgcccgcgcgcggcgcagtctcctccccgaggtgccggtggccccgccgccactccctccggctccctccctcccgccgcggcgcgcatctcattccagccctcattccgcgcattccagcgtcctcctcgcacactcgaggccagggggcgggagggccgcagctccggcgccgccgcgtcccgccaggtgagaggcgcccgcgcccgccgcacccgccggcgccctcacgggccg

SEQ ID NO: 8773 - DNA, 2300 bp, Homo sapien
gtggagacggggtttcaccatgttggccaggctggtctcaaactcctgatctcaggtaatccacccgcctcggcctccctaagtactgggattacaggtgtgagccaccatgcccatccccataattggtattcttatgccccattccacaggtgagaaaacaggcctgaagaggtcccagccgataaaagcagagccaggattcagacaggtgtgtctggctcccaagccctgcggctactccctcaccaggctgcgtccaatggtctgccagtgagttggcttgctggcagacaatcctagtatatctctttccctgtctgagacccagtttccttttctgggtacatgtacccaactctgccgcagtgactggagagattggggctggtgggggttccttgggaagactttgttataggggcattgaacagggctttggatgaagcaaaatgtagaaggagaatattttccttgtggggaaagggagatcagaaggaaatgggttatgggtttagtctaatagacaaaaacaaggttgcatgtgtgtgacggaaaggggcccagaagatgagtggaaacttccagtctaattagcagaaagcaaaagtgaccctagtgattatagccaggttttaaaaacttgtccccagtcaagcttagtgcaatggtagggcacgtgggaagcacagcatacagtttctttaaaatttaaaaaaatttcacttttaaagacagggtctccctctactgcccaggctggagtacagtggcatgatcctagtttactgcagcctccaacgcctgagcctcagcctccggagcagctgggactacaggggtgtgccaccacacccggttaattaaaacattttttttttgagatggggtttccctatgttgcccaggctgttcttgaattcctgagttcctgagctcaagcaatccttccacctgggccccccaaagtcctgggattacacgcgtgagccaccacacctggcctagaagacatttttgatgacagtaatgatgagaagagatggcgttttagtgctctttggaaacaagtttaggccttctagctttaagaatccgggcctataatcccagcactttgggaggcagaggcaggaggatggcttgagcccgggagtttgagaccagcttgggcccagggagaccaccgtctgtacaaaaaaaatcaaaaacttcgccggacgtggtggtgcgcgcctacagtcccaactactctggaggctgaggcgggatcacttgagcccgggaagtcgaggctgcagtgagccgtgatcgcaccactgcactcctgcctgggcaacagagtgagtccttgtctcaagaaaaaacaaaacaaaacaaaaagcaaaaaacacataaaatccaggcctgaaaaagcgcccgggccagacatgcctagctggagtttctcctgccttagcgcacccctcaggcacacggtgccctgtagtcgcccttggaggccgccagctcctggggaggcatggccctttctgcgggaggtgtctcaggcaggctccaacacacacccgcgctgtcagcatctcgcacagtccgcccgaaacaccagggaaggggttcgtaggtgtgggggtggggtggcgaggccaggcagcctggcgcgagggagagagccgaggcctgggccaggaaggcccttgggtgccgtgtgggcgcagagcccaggagagcgcactgccaggcccggacctccccgcccctaccccgggaagaggcccgttcgccgcagggggaaggcgggatcatagcacctcggaggagcggccggtccgggcatgcgggcggcggggcggggagggaggcttccggaaccccgagagagcacccgtgcctcgcgggccccgtgccccgtccccgggctccccttcctctaacgcaggggacccagcccggggcagtgccgggcactggcgctggcgccccgctcagccctgcgatccttctccgccccgcccctccccgctccgccccgcccctccccgctccgcccccgggccgccccgccccgcaggctcgccattcccgggcaggccccgccccctgtttccgctggcggcggcggcggcggcggtgccggagcgcgagcagagcggagacccccaggtcctgcgggcgcggtgagtgcggcccgggcggcgggcggcgaggcgggtctcgagagcgtgcggagtcgcgcggccttgagccggcgccgggcgggctgggcacccccaggccgagacccgagaagggggagcggc

SEQ ID NO: 8774 - DNA, 2300 bp, Homo sapien
gttctcgtgtgcgtaggtcgtcaccaccggaaagcaaaattgctgtctttgtatttctttcttttattttttgagatataatctttctccgtcacccaggctggagtgcagtggcatgatctcagctcatcggaacctctgcctcccaggttcaagcaattcttatgcctcagcctcccgagtagctgggattacaggtgtgtgccaccatgcctggctaatttttgtatttttagtagagatggggcttcgctatgttgcccaggctggtctcgaacttctgacctcgtgatctgccagcctcggcctcccaaagtgctgggattacaggcgtgagccaccatgaccggcttatctttatatttctattcatgaatatgaatagtattctacttatctatttctattcatgaacatggtatatttcaccatacattaggtcttctttaatgtttttctgtaaagtttcatgaaggttttatacatcttatgttatatagagacttctttttatatattttttaaatttttaaattttttgtagaaacagggtctccctgtgttgtccaggctggtcttgaactcctggccttaagcaatcctgccttggcttccaaagtgctgcgattacaggtgtgagccactgcatctagcctagagacttctgatcttccatgctttgccaccctcccccagggttcagctgagctcttgtgcacacgcactgcagacctgatgagggaatggggcacccagaggtgagaggatggaggagcccgctagccagctagtcttctagtgggtgcaggtcaggggtgagcaccaggtatggtgctcagtgctcttgcctagcaaggggggcctagtgtctgtgttcatgtcccgcacctgccatctgtcttctgatcagaacagggtttgtagaggaggcaggctctccagggactatgagaagggtgaaaaggagagggctcgaggatctggaggatggaagatgtacaacgtgggaggatgcctatccggtgaagggattgtggacaagcagagggagtggggagggtggagaaggagaaggcaggaaaaacatggtgatattggaagccagagaaaggggctaatgcaaagggtgtcaaacagatctgtggagcgctaggaattgcttgggtacagcggtgtgctggttgcagaagaccccttttagcaatggcactttggatcatgcggggaagggcattaaagaacgccaggtggaggaaggtctggaggacatgggactgtggctgggcgggcaacctggggagtctgtctgcaggggtctctaagcaaacggcagttgctggcggtgaggatcctgtgccttctgttctctgtacagtgagggcgggtgtgttctgaagcctcactctgccccctgccctctcaaggggggcttcccccgcttgttggcaagagctcattggacccaaatcagagcgacagcttgtcaggccgataagcctgggctctgggcaggagctctttatgtctgagccatttaggacactcatcgtgaccagtccctggggctcagaggcctggttggggaggaggttcagggaccctcaggagagagcaagggtggagggaggaatgctgatgtggtactgagtgcacgaggtgctcactttgttcccatttatggcagctaaagagagctgcagcgaagcccccctcccccttccagccccccttcacctgtccctttctcagcctgcctgctgggaggaggggagtctgaaaagtgcatatttcacaaaagccactccgtagagggctgtgggtcttactcaggagctgtgggaggaatattgacaagattctctgcattgccgattagctttctgtcttcccacctaaatggagacttctcacaacttggggcagggaggggctgggctgggtggccacccaaacagcctgcgggatcctggggtgcctggccatgcatcctgcatttcctccccactcctacaaatgcaggtgtgcagctcttcttggaagatgcatgccagttaactctcgcttgtatctgggatcaaagtggcagagtggaaaagagcagggagttgatcccagagacctgggttctagtccccggcatgcttgctaactagccgtgtgatcctgggcaaactgcttctgtctctgggcctcagtttccacatctggaaaatgatagacttggaccagctcatctctgaggtctctctgggccctgacattctgtggttgtatatgtttcttttgttccctttgtcttt

SEQ ID NO: 8775 - DNA, 2300 bp, Homo sapien
ggagggatagcattaggagaaatacctaatgtagatgatgggtgtagcaaaccaccatggcacatgtataccaatgtaacaaacctgcacattctgcacatgtgtcccagaacttaaactattaaaaaaaaaaaaaaaaaggaatgaggctgggtgctgtggcccacgccggtaatcccagcactttggaaggctgcggcgggcggatcacctgaggtcaggagttcgagactagcctggccaacgtggtgaaaccctgtctctactaaaaatacaaaaagtagtggcgcatgcttgtagtcccagctgcttggaaggctaaggcaggagaattgcttgaacccgggaggcggaagttgcagtgagccgagatcacgccattgcactccagcctgggtgacaagagcgaaactctgtctcaaaaaaaaaaaaaaggaatgaatctaggaagtttcttcaaagagaccttactagtagttacctgtaacagctaccatttctgaagctgacaccgtgctgtgccgtggcccaggctctgaacctgtgctaccttatgtctgactgattccaaagacttccgtgctcttaaccactattttgccctttactgtcccaggctggtaacagaccgaggtgtctcactgggagtaaagcaccctcagggttaggcgtgggtctagggtgcatgggtgggcaccccagaggctgaccgtcaccttcctgactctccagcggtgcctgcatagtctgcggcacagcatagctcacaaatattggccgagatgcttctttggagcaggcagaggtgaagcttcgtcgattctgctgcacccgggccattggctgggaggtggaggcatgggagaggtctgcagaggaatccgatgttgatatgttttcctgggacccactggaggacccaagcccggaggcttagtcctgctgccctggcctgtgggggatgttactggtgtgctgggccggggctgtctcaagataatatgagacctgtttcctgtgctgccggggaagagtgcaccacaccgcccagcacagagggctctcggtgggaaggcgggcccaaggagggctgtcatttctgggttcttccgttcagaggacagggcccttcctatcttagaccttggatgaggaacacattggcctttccctgtgaggtggttcctgactctggggccatccttcatccgttgctcttttccaaagatgcagagagatatttccagtctccttttatggctcggtgactggagagccctggagactcagcatcaggctgaacttttgcaagcctgctggctgttggtacggggaggaggggagagaagccacagggaccgggagactgggtcgccaccctcagcaggtggccaagactttccaggctgtcctgactgggcagtcctcttgttgggaccacactctaggttttgcacccatcctttactggtcccttcccttattcatttattcattcaaatatctgcttatactgggaaagacaaaagcaaggatgaaacagtctttgccttgtcatggctagactgtgcaacatattacaacagtttattttccattgaagataagttattttttatttaaaatatttttctcttttttttttttttttagatgaagtctcattcttgtcgcccaggctggagtgcaatggtgtgaatttggcttattgcaatctctgccccccaggttcaagtgattctcctgcctcagcctcccaagcagctgggattacaggtgcatgccaccaagcccgtctaatttttgtagttttagtagagacagagtttcaccatgttggccaggctggtcttgaactcctgacctcaggtgatccacctgccttggcctcccaaagtgctgggattataggcgtgagccaccgtgctcagcctaacaaattttttttgagatagggtctcactctgtcacccaggctggaatccagtggcataatcacagctcactgcaaccttgaactcctgggctcaagtgatactcctgcctcagtctcctaagtagctgggactacaggcatgtaccaccacgcccagtgaatttttaaattttttgtagagatagggtctccctgtgttgcttaggctggtctcaagtaatcctcctgccttggccttccaaagtgctaggatgattggtataagccaccgtgcccagcctaaagagaagttttaaagatacctgagcacctaattacagctttcctttcgatgttgtaaaccatgttgtttaaggaacacggg

SEQ ID NO: 8776 - DNA, 2300 bp, Homo sapien
ggtcactctctcaggctgctgtagtcaagggtccaagggaggggagccaggaaggaatcctcagaggtgagagcccccgcaagtgtaggctgtccttctagaaggggcccagcagtcctgctgtcctacccagcccttccccgtccagtgctatgagcaccgtctagggaagaggaagagtagtgcttaggcctcagaagacctgagtccagtcctggctttgctcctgtgtgacctcgagctacttaacttccctatccctcaacccttcatctgcaaaatgtgaataatttcttcaacctcctaaggtctaaataagaataaggtgatgcctgtgacccacttacagcacatggcacaaatgaaagcctccgtaagcctttatccagctgtccgcagacttcagaggatttccgatacttcctctcactgggtccatacaacaacctgagacccaggccagacaacgagtagcgttctcactttacagatcagaaagttgagacccagagaggcaacttgcccagggtctcaccccctgaaatggcgccccgatctcctgatattggcccttcgctttcgcaaactccctaccccgactcagaggtctgtgggaaagagaagcaagggatggtggccttggctggcttggagagactcccagcatagggtcctttcagatgatggtgccagctacccacatggtctgtgggcctggagggtccagctacagcctaacatgctgggaggagggtctctagcctttggagggacactcaccttggttctgccacctgcaagttgtgtgacctagggccatttatttcatctctgagcctcagtcactgatttgtgaaatggggctgaccggacctcatctggtagctggtgatgggaattagcaacacccatggaagtgtctggctcactgctgagcagatagcaggtgctcaacatgtgacaccatcatttgtattctctctgcaagggcacactgtctctcaaaaaaaaaaaaaaaaaaaaaaaagccccagtttctccctggccagaccagcctgctccccttcatcctcactcacctgcagggccagggagcccaggtggcgttagcattgccgctcttttgcacctccccagggcaggtcttctgtcccatgtgctgaaccccagaggagtcaccactgggaactggggcagggctgctctgtgccactgcaccaggctcagctgaggtttccagaaatctgtgactccccgtgcagagggggcctgctctgtatggactccgaccaagcctggcccactctgtctatttcttcctgacctctccagccccgagagcacatagaagctgccagatgagggcagtgaggccgagggccggcagtagggctgcagatgccctgagccctaaggtcaaggtggatggaactgctgtgtaagtctgatgccgaggagaccaggtcgttgggctttcaggtgagtggacgctttctccccactcacaacccccaccatgcagtctctgctcctccatggtcactgtggaatggctcctgatggcgctcaaccccttgccctgttttctcccctgcggtccactgagccagccctgcggccgccaagtctcaggttagagctccctctcgcggccgatgctgggcactacattgcccaagacccaggtgggccgaagtcttgagaaagggctcgcagtcatcgtcgccagcaggcagacaccaggcacctacctccccgacatacccagcctggtacctcgaagaccagtagccttgagctacacttgggattcccaatacagtttcaaaaccgtctagctcatctttcaggaaccttccagggttcacattctgatttttcagtaaggttctcacctctgtgaccaattaccttgagactgatgtcctgcaccatcctggagtgttgggatctgcaggtcgtgaaaagggaaaccaagcaatcactttggaatgacttcctggaacttccctggcccctccttcgtgttctctgatgacagccaggagctgactcagaaacctcataagaagctgaaggcatgacgacttccctgttaaaaaaaaaatgtcccacgtgtggccgagtgccacacccaggcagctgccgaaaaaaagcaccagacaccatgcagctgggccccagggcccggcccaacccggttggccttctccggcacctgcagggaacttgtcctgtcttgtctctgctcgccccctgctggctgcctggagccattccgtgctggtttcttcgcgtct

SEQ ID NO: 8777 - DNA, 2300 bp, Homo sapien
ccaagaacagggcagcctaaaggttaggaaaagtcctgaggcccagagaggtcagagcctctgaccaaatccaaacacaaattcaaaccacctgcacggtcctttaccttttaatgcaggcacctggtgttcctcgctagactccaagcctagaactgggccacagtcccgttcttcctctccccttctcaccctgtgttttgcccagcagagcaggaaagctgagaatgtgctggaaatgcttgttgaggccgacgtgtcaggcagcccatcagtgcaggatggagcctcggttgcagagaactgcagggaggtggtgtggaagctcattggctgtaagaactgctccgctgcgacagtgctgctggaggtggtggtgaacaggtacacccactgcagcctggagaggtggatgttgacgcaaagtctatgagtctcttgtgcagccagctcaaggctggctcttcaggatgtttgtgtcctgcttcccaaagagccttcaggcttcagaggtcatcttctccattcccctggctctaccacacaagccaccctggatgaggagaggttcatgccagagaggggtcgggattctccaagccctggctgcaggagaatttttggagcatgggggctgtcatctgaccaaagatgaaaataccacctaacagacgaggcaaggcccaccgtggggctgggtggctggtggagcaacagaaaggaacatgtgggtgagaaatgaggggaggatgcagtccagttcccgggtccagggacccaggttcccccgaacttcccaccagtcccagcttctttagaggatgtggcccagccaaggctgtgggggtctgggggcagtgggcccaagaataactcttacttatgtaggtctcttctcaaaggagcttggccatggtgacggtgatgagaatgttcaccagagccacatttttacaatctttatataatgtggtgactcgtttcctaagacctgaaaatacttcctccttatcctcacacctcgtcccagataaaatggcaatgccaaagtggcaaagcagaaagcagtgacttacctgaggccccagagcaagctgggcaagctccatgaaaaccagcttttcagcctgagcccagatattatctttgatcctggaccccattgccctggctgaccaagcctcggcatatttgatggaagtgttgcaattctggctcccctcattttcagaaattagtttctaggacttcttactttttaatccatcccctgataaagacccagttaagtctgaaccatccatcatgatgttcatttggcttaagatataaaagttttcagagcccacattcaaaactctaaaaatatcttcctcttttgatctaggtggcatctgtcctggtcatcggcctcgggtccagatggcctgaattatctgtctctctcatgcagtctttgctaaaagagaaggtctggtgtaaataatttaaaccccattcccttcccctctctgcagatttctgatgccaagctgatcatcgtctcagcaccagcaaagacatgctattcccgtccctgacgagcatttccttcttgagaaagtgattttgaggggctgcagatgtacttggaggaaggtttgggccgggacagatgacgtgcccatgtgggagctggacggcccctctctgggtagctccctgggaactcccatgtccgcctcccgctgcctcctgatccaaggtggatgcacttcatttgaggcctggtctttcgtccttccctctcctcttcggggaccactttgtctagtgctagactcattgtgcttcccccttggggcttccttcagccctcagccgattcaagacttcaaaaggaagttggacatggagaggaaaaaagaaatgaaaccaggaaggaaccgccaagaagcacacaacgcgtttatgctgccttaaccacacgcttgactctaaatgggtttaaaaattcttacttgtgttagcccaagaaagtttctgcagccgtctttttggtttaaacaatcaaatactcaataattctggggctggtgggccaggatatgggttactcagatcttctgcttcaccccatgctcggtccctgagccagttctgtcattggttctttcagaccagggcaggaaaagtcaagaaagcaaaagcggattctaggctgtggggtttgctgtttgctagccccctggcagagatgcctgtccttgcagtcctgaactggtggccaagtgtgcatgcatgcacgtgcaggtgtgtgc

SEQ ID NO: 8778 - DNA, 2300 bp, Homo sapien
gagggacgtgcagagggagggaaactgcagacagtagcgcccaggcccccacaaatccctcagcttactaaaaacccatggcacccagaggacgctgcacccagtctcttgtcagggccgactgcagaatgacctccaaacaccttctgctcgattgcctggccacccccatccatcgccattcttgacaggcttcctttttttctcctatatctcttccaccaccctatctctcaaactaaattgaagaaaaatgggttttgtctttttttaatgagaagactaacagtcttaaattaccttcttcaaggtctgcaaatagaaatcccaaataagacagccaccttttcttttctctcctcttctctccctgtctccatgagcccataagcttgaaataaaaggcagagcagtggctcagggaagtaatttgggctttggcccagcaccagccaaagaggcaagagcaagcggggaggagggcctgatggggggttgggaatgatagaggaagagaaggtcatgggcaaaaccaatgcctcattgcgtatggttctgaaataaaagagcttcccaaaatggggacaatttcttaaagagcaactactctgtgagtgtgcaggtgcccaggggtacaagtaggtccaggtgaagaggaaaccatagaggcttcagacttactgaggttcagactgactaagaagcaaatgcgattactgagtacagtgggccttctctgcctttatcaccaatgttgactttccctagaaagtccattgacgggtgtccggacaagagacagagcatggtgctggggcaaagagtggagttttaggattggggtcgtaggttctagtaccagctctatggcatgtaataataaaagctaacattaaatacttactatgtgccaaggactatgctaaacacgtcacatagattatcccattcaatcttcaaaacaaccctgtgatgtaggtatcattatccccatttacagatgagaacactgagagatgggaagtcatgtcacttgcccaaagtgtcacacaccttgtgacagatcagggtttgaacccaaggagttaagactccagaggctcttagacttcttctgccaaacagtctgggcctgtctggacctgcttcctcatctgggaagtcaaggggtgtagaggccaggtaaggtagaatgggtcatcattgaggtctttccggcacagatgctctgatatgggactcctgccacacctgtggatgtgcagtacaggtttccactgcaaagcagccatgctgaacgtgtgtgtgtgtgtgagagagagagagagagagagagaaagagtgtgtgtctatgacagataaacttgtgtcctgcaaccctgatgagacagggaaagagaataagaacacaacaaggccagggaaatctgtggaagatttgtgggttagacctttgtcaagagaacaaaaccggcacctgaaggtctggaaaattctgcccaaattcacctccactaaggcatccagtagcctttgcgattccctgatctttactctatgctgcacacccacagcctcaaagatccctggcaagacaggcaaataagcccttcaaagggaacctggctgaggcgccctggctcctggaggggtgaggtggctctcggtaattccccagcccagcctgtgtgccttctctagactcagcagccatggcccattacaagaccaagcaggatgactggctgattgtctacctgaagtatttactccttgtcttcaacttctgcttctggatgagtgaattctgcacacacatcccctttcccgagcactgaatgagtcaagccacctttgttttttgtgagtcaccactttgaagttgatttcttccaaatcaaagaccacccatgggcaaattctgcctactttaaagcaaatgtgtatgtttgttactgagggggaagaaaagaatccagtctgcaggttggcgtggagtccgtaccacgtggcgtctgaatagaagcacaaacatcacaatgagctttgtgttctggccccgccgtacaaaggctcggcttctttcttccctgctaacttgttgcacaagtgccttgtgggaaatgtgactgcctgaaatagtggctaataatggcttgtttccaaccgaagcccatttgcctttcatggttaacattctccaggcccagggcagggaaacagaagtcccggaagctcaggctgctgctgcctgtgatggaaatggtctctatggtgactccccgcaggaaacctgcctg

SEQ ID NO: 8779 - DNA, 2300 bp, Homo sapien
caaagggagacgtgtctgtgcttggggagaagccaagcaaagcaaaagatttcaacagcgaaaggaggaaacacacccactgaggttctcatagcaacataatcacgcacaggcagcagcctatttcggtgggagcttgtttcagctcccctcctccctggttagtcacagaaggcatgcacaagcagaagcagtgttgggtgggggcagagtgtcggactgaaagtcaggaggctggggagctgggtcctctgcttgctgatggaccatgggcaaatgtcctcctctctccaatcttggggtccttatttgtaaaatgagaggattggaccacagagcggtgaggatcatttcttttctgatttcctttgattgcacaaacactgagacacttttggtagggaattagatgtctctcagaatcttttgtctctgagaagatgcctagagaaaagggaattcaataggataaaagtcattctccagattcacatttattttcctaccactttctgcatgttgacagaacgggaggaacgactgggtgttgtcaaggattctgctcactcacccccaactctaacccaggtctgtgttctgagaagggaaaaggttaaggaggttaaggtcatctttttattcaagttttcacacacacacacacacacacacacacgcgcgcacacacacacacacacactcaagcctcttgctacattttcatccttctcattcttcatcctctcctgtctctatccctcacttctcacctctacttagtgcaatgtatcctctctttgcccgaggaccagatgatggaggcatgtttcctactgagaatgattctagaccttttcttcaatggactctggggttagttgaggacagtcaggctcacacttcccagttatcgaaggtgatgataaaaagcaaatagggcatttgggagggacctccccaaacaagtacagagatgaagtgaagacagccgggtgctcagggagcatcttataggtctcagtccttgactcgtaggttgaaagcttaaaagtacagctgttttaaggagtcagcctgagtgtcctgttgcaaagggagaggcagaatggggtcccccgcttttgttctatctcccactgcccgacagatggccagtaaaacagagaaaaagaagctctcaaagtgaagacaggaatgcattgtataaaaattcacaccccctgctgccgcccaaactcccttaaaaaaggatcaagagaatcctgacgggtacgtgacatcctccctctctcccataaaagggacttcaaaatctggcgatggtgggggaagggtgaggagggagaagagaaatgcgtgggcagggggctgccagggaagactggagtgggggggggggcactgcagtctcgcatttgactttctcccaccctctttcccaagccactctggccgccacctttgcccctccctctcagcctgaaaggggcttggagtcccaagggctttgggtacaaagagagagagagagagagagagagagagagagagagagagagagaaaaggataaagaatgacaccacacttacccctagagttgaaggagttaaggaccctcccccatccagacacccaccccttcgttccccaaatcgtaattcgccgaggaaggatccaggaactggcagaggagcgggagagctggggtgggccggggtggggagggtgcgagttaactgtggcccggtctcgcccggacctcgccctaggtgggagcacgcgcaccgggtctgagaacctgcaagagcctcgcccggcgccggctttctctgggccccccgcgcgggcctggcctccacgtaagttgtgtgcagcgccagggagtggaggcggccgagaccctcggagactaggggagggggcgggcccgggggcgctgggggccctcggtctgcgcccagccgccgccggctccagcgaacctcctaccccgcccccactcacccggctcagcccctaggagagacgcgcaggaagcgtgttgcttcgcccagcggatcggcagaagttgagaggagttggcggctgcctccggccggccggactttgcgagcagcctggagaggatccgcgaccgccgccgccgccgccgcggaggcttcggggctgcttccctcgagcttagcccgcagcgcgggtggagaggggcggggagggggtcgggggcacgagaagaacttgaaaccgtgtgaaggaatccggagcagatgagaagggaggaaaataaaagaaagtggag

SEQ ID NO: 8780 - DNA, 2300 bp, Homo sapien
tgccaggggctgtcctggcatttccttatacccatacctgccctattccatgaggagaatcagctcaagttaacagagaagggaactgaggtcagagcggttgaagagtgcccccagggccacccattgccaacagtgtccagcaagcacgtgatgttgatgctctcgtaccctagctgggtacttcgctttgtggagggaggctttggtcaaaatgtaagtagttttattcttcacttgctcccttcctgcccaatggttagagtatctctccgtagctttagcttttgaacgaacactttctcccatccttgcccacctccatcactgcatctctcccttccaaagtattcctctctgcccactcctcatctactcccattcacacatggcatcttgttagaaatagcaagggcagggcaaacagcaatgaatcagaagtgggggcagtctgtgtttcagggctgacttaacccaccagaagactttcagcaattgcttgacctcagcctcggtgtcctcaactataaaatgggtataagaaatgaatactaatctttgcttatctcacaggattgttgtgaggatggaatgagataaacaacaaaaagcaggaaaaggtggctacaggattatccatcatagttgtccatgagactgtgagcccctccagaggagggaccaggtggtcctcatgtttggaacttgggtacctagctttcctggtacagagccggtgcttgacaaagaggtgtggaattcagaactaggaccactaccacgctccccaccacccactgacacacgtggaggcgtgctcctgccgctctcatctaccataaatgcaggcaagtccacaacaccccacttttggaagtgctgctctagtcctggcttattccaaaaacagccagttcctggagggaaaccaagtgattgtcacgctgcctggatgcctccgctaggcacgtttgaccaagtctgggttctaccccttctccagggaagttgctaagaaccgatccgccaacctggctcacacccctccaaggagccccagctgggtctgtccctccccgcaccgccttggtgccccgcacgcgacgtggttttttgtttgtttgttttgttgttgttcgcaggagcccggccgcccctactgctgttttcattgatgccttcagcagagctggcatgtgcaactgctgagaagggggagcgcggagcggcgggggaagcaagtaaaaatagactggcgcgcggcgctctgcctgctccggacgcctttaaccctcgccgaggctgggagagcgcagcagccgccgctgcacactgcggaacctggcaggggtctgcacccagaccccgcgcggcagcgggggtaggaggcaaagggaaccgcaaaaactttttcttagaaaaatgagccgggggtggggtgaggtggaaatgcagggaggaagcgccttctcgcttccagggctccagccacctggcagagaccgctacgtgcccgctcgctccacacttcacagaagcgcggccttgaagccctgggctatttttagaaaccctttcggcgggtgggcgatcagagggcggagggtgaggggaatggtaaggatggctttctgctgggaggctagccgcctcgcactacacatcattccgaatgtctgctctcaggtgggggctggggaagaggaagtggtgaggggacggcgggcacgcaggctttgccctaactcaaggagacagcattcgctactgaatgccccgctgcgttcaagtcccggagcgtgtttgttttgaaattgacaattgtcagatgcatgctgcttctagtctctcagagaagggggatttataaagctttgctgcctacgccgtggggtaggggttttagcgcagagttaagaactcgagggaagaagaccaggaagggtctctctacctttttgcattccggcaagacagagggacaatccccgcgccacacccccatccccgccccccgctgcatatgggtaaccatatgtgaaatgtgcggcagccccaccagacacccagctattaatagagcctgggagtttgctctctgtgtctttttcctgccactgagtaagggatgatcttcacacacatgccccactccgcccccatctcggcgcaccgtttctccaggaaggtaagggggctgcccacgctgatccccttcgtgactacaggtgcccagagcctacggaatagtccggttgttgtaatgacagcggggtcagagggaggcgagggatcacagc

SEQ ID NO: 8781 - DNA, 2300 bp, Homo sapien
tctactaaaaatacaaaaaattagccgggcgcagtggcgggcacctggagtctcagctactcgggaggctgaggcaggagaatggcgtgaacccgggaggcggagcttgcagtaagctgagatggcgccactgcactccagcctgggtgaaagagcgagactccgtctcaaaaaaaaaaaaaaaaaaaaagaaaggccaccgctttactttagctaacaagagatgatatttcacaatacagtgacaaatggggccctaattgaggaatttgttaacagcccttccccttatagtggcattagcccaatttggccttagctgtaccactcacacagcttatattctgcaggatttagcgccaagaagacggggaatttaactcaataattaaacctccaaattgtcatgtcagcctgtgtatctctctctcctacctcctatccatgcctcagtttctctcggtaggagcacaggggaaagtcaccaatcagtccagtaatcaacatgtaggaattgagcaaggcttgagtggtgtgtcaagcctgagagaagcctgagacagcgtgtctatctcgagggagcctcccgtagagaatgaccacttctcttccgtgcccccattccctcacacctgtaggaactccatgaggcttcattttcatttgatagatgtggacaaacacctgagttctacatcccaaagctgggagtgagcctggagtgcggtaggcagcctgtgggtcacgaggctccctgttcctcctgtaatgggcccttcacatggcacagtggacctctgggcagggaagctaaagagcactgtcttcagctgctttcttgactccacctggctaacctgaggatgaattgcctgaatcaaaggtgccttccctcaactgttctgctcccgtctcttccagtgccgattccacactgtcacaaacaaggccctgtacttatctgttctcctttcatatactgttgggtaagcccagattactaataaagctaatctttcttgagtatttaccatgtgccagacatgtgctttatgtgaaataactcacttagtccctatgataaccctatgggataatgcaccactacccatacatatcatagaggatgaatcccacacacagataactgcagtaagcgatgcaagctaggaagcagcagagctgagcttgaacccagctagcagccccacactaaccccagagcctgcacaattaacccccacacagaactgctacaggctgagaagtcggtgggcctacatgttttagttatttattgtccttcctgccctccagaagagcccttcaaataagctgctgatcagcgcccaagtttaccactaaagtaattcctctgacaactacaaagcaaaaccgctaggaagatgaggggatctaacccagggagcctattacagggccacaagctccaatcagttataggctcgtttccacacgtggaagtgtatcttccaaatctccaggtgggtaggagctggtgtggagcaaaggttaggacaagcctggggttgggagtgtggacaaaagagaggaaggaggccatgtcaacagcagagagcattccagctctgctacttactggctccataatgttgatcaggataatgaaactctgcaaatttcagtttccttaattgcaaaacagaattaataagagttgctttgcaatgttgttgagtaaattaaataaggcaatgtttacaaagtgactgacacagcacccaacccataatatgtatgctaaaatggtagctcttgctatagtgattgctactgcacaaggaaaaagccatgataaagaccctgggaagccagtgggtgcagtgtgcagctgagtgagaagcaggaaagagataagggagagagaccactttctcggacttgcaactattctgaggccattcatcagccatttgctatatggcgggcaccgtgttgagtaacatcatgggttgaattgtgtcatccaaaaacatgtgtcgaagtcctaaacccccagtacctgtgacagtgagctcatttaaaaatagggtcttggggaggaggagccaagatggccgaataggaacagctccggtctacagctcccagcgtgagcaacgcagaagacgggtgatttctgcatttccatctgaggtaccgggttcatctcactagggagtgccagacagtgggcgcaggccagtgtgtgtgcgcaccgtgcgcgagccgaagcagggcgaggcattgcctcacctgggaagcgcaaggggtcaggg

SEQ ID NO: 8782 - DNA, 2300 bp, Homo sapien
tgtttctttcacagggctggcacagtgccttgctgttgtagaagttcagcaggtagttgtagaatttaaaagcatcaccccatgtagctgaatgttcagggatcacaggccacggctgcttcccacccactcccagccttcagggagagggtatgcctgtcagccaatgggcagagtgccaggctgcagaccagggtctgggccagtcatttatttgtccccatgacctgtggctattgaaatgaatgcccccaaatccatgcatccttttgcctcctgcatggcacacggcagacacttcataagctggctgttggggagagtctcagggagccccatggaaaagagaaccttggaatcagagttgaatgacagcttatgggtgctggaggcccctgtgaccttgaccgtgcacaatgcccaggccagctaggactttttcctctccttaatatatttaaatggagtcaatactggggtcagcttcatgcacacagccttcttcagccctagaggtgaggtgatctgcacagcttcctgagcagggtcctccctggtggctgaggtgtggagggccccagccaggctggatggaggttgactttgtttcggagcccttgcttggacaccggagtgcaatgctcgggccacacatccttggaggaagggcagcctggaagtggtggaacaatctgtcatgatcatatttttgtgtaatcaaacactcttcccataatacctttaatggccgcatagtgttctattgtgtggctacaccacagtttaatgtctcactttgtggaacatttcagttgactcctaccttttgtcactaaggacagcattgtcatgaaattctcaacagctacatcattatgatgatccatgattctcttcttatggtaaagtccacagaacttcaattgctgggttaacggatttgtgctctttaacacttcaagtacattttaccaaacggcctttctaaaagtcttgacctattttcattcccactagaaatgtgtgaaaggacctatctctctgcaactcttacatatgcagagctgtggttgttttggtgggagaagagcttatctggtatttaaaagctgtaagttttctatttgaatttgaatttacctgatttctaatgaggttaaacatttttgttgcacatcaacctgccatttgtatttcacatgtacttgcctcatgtggacagattatccaatcctttccccaatattacattgtgggtgttcatctatttttgtattggcttgtaagagctctctacgtattaagggcattaacctttgtctgccacatatgttaaaacgtacttctcggtttatcatttgccttttaattttgtttatgatatttattgtctggaactgcattaatgtcttcttgctagacatcttctcttatatgactcaatgacatttcaaactctgcatatccaaattgaaattcattatttccccccaccccaacctgctctgcctgctgactggcttatttttgttaatgtcaccaccatttccctagtcacccaggcttgaaatgttgaagtcatctttgattccagctcctctctcttcccctacattttgtcagttgccaaagcctgtagagtctatttctgcactttctctggcaggcagcccctcggacaccccagtagttcaggctctcattatttcttgactggactttgaacatagcctccaaagttcatactttgcctctcttccattcccttcttttccttggcccctcctgtgtgctgctaccacatctatcttcctaaagaggagcccaaacacagaagtcactgcttccctggttacaaaccggcaatagctccccgttgtcttttgtatttaattacgacctcttagcctggccataatttcctttcaactgaatctctcactgtctcagccaagctgctcccaaacaaactcactgctctcccgccttttggttgctcaagccgtctcttcctccacctgccaaaatccgttcaaaaagctcccacctcaccccacctcctgctatcccagggcttcctgactctctgcattaaagtgaattctctttcctgtgaacctccagaacaatttgcttgaacttctcttgtagaacaaaccttattccagcatctatcagagacaataagggtcttagaatctagaaaacagggtcctgggagggcacagttcccacacgtctatttcttccacaggacctgcacgctgccttgctgttggagatctgtgcagtaggcagtt

SEQ ID NO: 8783 - DNA, 2300 bp, Homo sapien
acattagggaagaaccttcaagaaacgtgcaaagaaaaaaaagtaagggaggccattaaagacaatttttaagtttacaaaactaaggcaagccaggctttgcatgcaaatgattaggcaggtgagtcatgcatatatttgtcagttctctttcaaaataagaaataaattaggcacaatgtttgcattttaaaaaatcctttactttgccactctatgaattttcttagtgcaccctgggccctgctctcagttgagttcctgccctggggtctctgagacccagagaaacttcaacacctacccctcccactcccaccaaaacttttggagaatagctcttcctgctcatactttttaatggtaggggcttttgagcagtaaccagtcaggagggccacccaagactgaacctcactgtagagtgaccagggtcaatgcatgtgtacaaagtgtcttactccttgtagagcaggctgtatccaattaaagcttgattaaataccacatagtggagagtaaactgttattagaagctgctaatggacactccatcacctgcattattcactgtgaagaaactaaataaagccagcaaacggtgtgctctttgccatccaggagcctcagtccaaattaattttcatgaaactcagattctaggcagatgtggttcttttgatttttactcctaagtacaggccattgtttgtttttcccagcaaagctcaggcattgtgtgagtttttttcagaggatattgcagaatgagagtttcagagcatgaatatatgtaacctttcaaaggaaatgttcagaaagaacaaaccaaccaatacatcagcctgccaatttaacagtggtatctaaactagcttgctcagatctttacagcaacaaatacaaaaagggactccaaaattatgtgtatgtctatgtcagtttatcaaaaactcaactaagaagtgtctcctcccacagaggaaactgaagttcttgaaggtgactcataagaagaagccactggggacaggggctttgaccctggccctatctgcttcccctctccatctgtggatcaacaagcaggaatatgtcagataatgtccaccttctgttgagctttagctatgggcctggcactccacatgtgttatttcatttgatcaatacaatcaccctctaaattgatattgcttttcatggttgttcacttgggaattggagtttagttaggtcaagtaacttgtctaaagtcgtacagctaatggtgagaagatctggcacttaaacctaggtttccctgactgcagagcccatgctctcatcaaaatatcaatttcctccctcacaaacactagaagggcacccatttggtattgagcctggctgtgaacaaatgcaaaagcaatagaggaggcatctatgctttctttgagtttgaattgtcatggtaacctaacataggggtgggggccttgagaagagttttagagtcatgtcatatcagatctgggctctgtttccactgctgctactcaacctctctaagcctcggtttccttagttgtaaacaaaaataacagttgaccccgactaccacaggggttaggggtgccaatcccccacacagttgaaaatccaagcataatttttgactcccacaaaagtaagctactatcagcctactgttgaccagcagtcttgctgataacttggtcaattaacacacattggctggctgtggtggctcatgcctgtaatcccagcactttgggaggccgaggcgggtagatcacctgaggtcaggagtttgagaccactctggccaacatggtgaaaccccgtctctactaaaaatacaaaattagccgggcgtggtggcacatgcctgtaatcccagctacttggaggctgaggcaggagaatcgcttgaacctgggaggcggaggttgtggtgagcagagatcacgccactgcactccagcctgggcaacaagagtgaaactccgtctcaaaaaaaaaaaaaaaattaacacatatctggtatatgtattatatactatattcttaccataaagtaatccagagaaaaggaaattgttaagaaaatcctaaggaagaggaaatatatttaccactcactgagtggagtggatcagcatgaaggtctctgtcctcattgccttcacatggaataggctgaggaggagggagaggaagggctggccttgctgtctcaggggtggctggaagaggtggaaggggaggcaggcacacttggtgtaaataaaaaaaaa

SEQ ID NO: 8784 - DNA, 2300 bp, Homo sapien
ttaggaagagtcctggttctccaggggtattatttatgtagtcataatagtataaacatttatttaatatcatatttgggagttagcatacagagttttaaaacaatactaattatagaacacagtgtcaatggcactagtcccatttgtgagggctctgccttcatgatctaatcacctctcaaaggcctcacctactgatgccatcatgttgggggttaggatttaaacatatgaatttgtaggagatataaacattcacaccacagcagggagcaagctgccacagggatgggaggtcaccacccatttctcagtgggcctcttctctgcagggtgcagagagtaatgtctataccacaggggcattgctagcatgacactaacaaatatcacttccgaagaaaatttctaaaatataatgcttgttatacaagcacagataattttattctttatcctgaggattcctggggagccaacaggaatctgttggtggcagattgtcaaggtgcagatgactgtaatggacaagcaaattttggaaagagctcaagagaagtataggcatacagataactttatcctcataaaacgagggtcataagcgattttccataatcaggttaaattaattaaatgtgaaatatacattacataaagtctcaaagtttaacagagtaaaaaatcaaaatgtaattatgttgaaaggatggaaggaggtgaaggacttatattttcaatagctggaaacttgaaagattaagacacagagtgaatatttaagtaacaaaagactttgagaagacaatgaactgagctagttattacatcttgttatatagatgtgaaaaaagtgttggaaaatacatatgtgcccattaatttaaaaaaatcaaaagcctgattgtttgcgggataagatttatatttattctctactttgctagaataaagtttaattgataatttataataaactagcctgtgaaatttcacttgaactctactgtttattattatataactttcaaacttgatgctataacactctactgtctgctagctgtgagaaattattaacttttattgaattaaaacctatcctctttcagatttatgtttaacttagcttgatcattggccacagattttttagtttccccagaaagggagaacagggtccaccatgtgtgtctcctcctcattccctccctgggtgtcagcctgagcccctgtatctctgtcactgagctgtgtacacacgtgcctctgtgcctttgtctattggcctctgggtctcccaagtctctctcgccttgtctttctgtgtgtgcgcatctttcagacttgctccttcccttctttttgcctgtcagtcatccctagtgccactaggccacagtggggtgctgcatattctcttcccttcctgcagtgacaattgctttctgccatccatcacatggcacgtctttacctctcagcagtgaggaccatccttcctgggggcaacgagctctctgctttagctccatagtgtgtgtccttaaacgcactgggctcctgtcctcctgtcttcttcctggcatttggagatgcaccagagcatgttgctgtgcacgcccagccccacgagcccgtcgtgaaggccacgggagaacagaagcagcagagcgaggtggggaaggaggccaacaccggagtcagacagccctgagctggacccctgactccatcagtgactgctgggtgatcttagacagctcactccacctctcttcacctgcttcgtcatctgtaaatggggtaattgcagctcctgccttgtagggttattgtgaggacgaaatgagctgatatccttgaagctcctcacatgcagcaagcattcggtccacgttagctactgtcatctttataatgattctgacggtactgtttctggctgtcagtttcctgtctgggaacctctgtatttcccgtgaagcctcatctccacacttccacatgagcgtcccttctcttgcagtgaaagtgatgtcaagcagctctggttgcagctgaagaaggaggaacctcatttactgtccaactttgaagacttcctgaccagaatcatctcccagctccaagaagcccatgaggagaagaatgaactggagtgtgccctaaaaaggtgggtaccccagtgtcagccgctttctgtaactatgtgtgaaaaagagagacacacggtgcactttctcttagatcttctgccaaaacatcgtgcaatgcctccttttgctgtctgccaa

SEQ ID NO: 8785 - DNA, 2300 bp, Homo sapien
ggtggagatcctcatccttcccatggtccaggctagctccatagcctggggccaatcagtgagtatcaactgtgcctcagtttcctacatccatacattggaagaaccatcttttccctgtcgcttttctgccacgggccaagagtaaaagaggcacgaatgtacaagctgaacttgcagcagttaatgtgatggctctgtgattctgaagggcaccatgaggcgtggtgttctgttaaagaaaacgccagcaaattagagacatccccatagaagccagaagatgtggttaatgtttgcaacatgaaatgtctaggtgttctgaggtgggctaaaggacagttgcttttcttccctattaaataggtggttagactcagacacaagggaacaggaagcagaatggcatcagagacaaagatgactgcatggagtttggtgagaaaccatcctcaaagcagcaattttttggatgagtctcagcctttctgagcctctgttattccaactgtgaagtgatacaattaacaataacaaaaatttgataagagcaaatacatttggcatttttaatgaacctactactattctaagccctttaaagatacacatttatttcgattcatagaacaccccatgatgcaggagctgttactatccacattgtactgatggagaaagttccagtaacttgccaaggacgtagctggcaagttggagcactgagattcaaacccagggctttggcctccagagtctgtgcactaaccactgtaatacctctgagactgtaaggggcaaatgaatgacaacgcattgatttagaagtgaaaggcgatctaaacgtgcaagtattaacactattaaaaacaacaataacaatggtaggtacctccgatgcctctgaccttatctctctggtcacagttttctgctctgtaaaatgggtgggcaggctttacactggataatctctgaggccccttccacttctcagattctgataatgaaatgtccttctttcctcacataaggctgagagaaggtcaagccaccagcttgcagaccttgggagttgacacagggaagcatacccaggacagagccagaaaagccaaggcacgcagtagggacacaccagagggcaggcctcagagcccctgacagccttctgaaactctggcagggtggagggaggttgtgggctagtggctggctgggctgcaaggagaagaaaggactccacagagtaatttataacagctgctcagtaagtgctaatttgtttctctccaccttggaataggacttagcgcgtgtgagagggggatgctactacataaaccagtaccagaaagatgggcttgccaggaaagaactggggcactctgcaggggcagtgtctggggaagggttctccaaaaaggtgacatttcagaggggcctggatggatgagtaggatttcaacaggcagagatgaaaggggagggtgttccaggcaaaaagaagaactcccagcagccatgaagaacagctggtgtttggcaacagctagtgtgtccagagcgaaagtgttgtgtgtgtgtgagggagagagggtgaggctggaaaattaggttgtggccggagagggcagggtgggccttgccttgtgcgctaagctgaggggttatcctgcagccggagcacctcgggaggcctttgaagatttactcagtgctttattaacaaatacgtattgggtttttggtgttttgttttgtttttaacgattcatgcccacagtagaatatatagaagagtcagaaaagtataaagaataaggatcccctttagtttctgctcccagaggtaacagccggagtgacgccgggctgctgccgggttttcgggggtgcactcccagacaccacctctccagtgagccagcgagggccggactgatgccccaccttgggagcctgaatcggggcaaggggcctagggagcagcgggaccccggaagcccgaccagtcaggccggctaagtcggcagccgccccgccctcgccacccagcctccctggcggcctcaggtcgcgcctgcaggcccggaccccaccgcttggcgcgcgcacgtcccggagggcgtccagggggcgccgcttcccgttcagctccgctgaggggctggtccagcccgcgcggctcggagcggaaagagtcgggcggagcaggcggctgcttgacagctgagagccgagcgggcggcgcgggcaggtccacgggaagcctacacgcccaaggtaacgtggaggaa

SEQ ID NO: 8786 - DNA, 2300 bp, Homo sapien
aatccgttgaaggcctaaatagaacaaagagttggagtaagagaattccctctctctgcctgtcttagagttgggacgtttttcttctacggccttcaaccttggactcaggctagaagttatgctattggctctcctcgttctcagttcttcagactcaggctgcaagtgtaccatgagctctcctgggtctccagcttgctgatggcagatcttgggacttagcctccatagttgcatgagttaattccttatccttcccacctctctctccccacccatacacacatatgtgtgtgtttgtgtaaagagagatgtgatgtgacgtgtgtgtgcgtgtgtatgcatgagagacagagagagagatgtgtgtgtgtgtgaaaaagaaagagagagagaggtgtgtgtgtgtgtgaaaaagaaagtgagagaggtgtgtgtgtgtgtgaaaaagagaaagagtgagaggtgtgtgtgtgtgtgtgaaaaagagagagaaagagtgagagagagatgtggtggggtgtgtgtgtgtgtgtgtgtgtgtgtgtgtgtgtgtgtgtgtgtattctattggttctgtttccctggagaacccagactaataaaaagttcactgtaatttttatctctgttcctctataggcgagatgtcctcccctcacctccgcccctcatggcttctttcaggattttcttggtctttggttttctgaagtttgaatatgatatgcctagttgtagatttttaaattttatcctgattgatgttctctgagcttcctgaagtttggtttctattattaattttggaaacttctcagcgtttgttactcaaatttctcctgcttctttctctctttcttttccttttgatagtcccattacacatatgttttaccttttgtgatcatcccacagttcttggatattctgttttttctttttttttttcctctttgcatttcagtttgggaagtttctactgccatatcttcagcctcactgacactttcctcagctgtttccagtctactgatgagcctgtcaaagacattatttattctacagtatatttgatttctagcactttctttcaattatttcttagaatttccacctctctgctcatgatctatctgttcttacatattgtctactttttccattacagcccttaatatattaatcataattatttttaattttcttacctgataattccatagtctgtgttatatgtgagtctggttctaatgcttgtctcctcaggttgttttttcttgccttttagcatgctttgtaattttctattgaaagcagacatggtgtattgggtagtagaaactaagataaagaggccgttgtgtgaggttttatgttaatctggctacaagctgggctatgtttaatgtttaccatagctgtaggtgccagagagtttagttacctgcagcatccttgctttcctccctctgtcctgttgtcattgggttcccataagaatcccttcttttcttttttttgagtcagagtctcactctgtcgcccaggctggagtgcagtggcatgctctcggctcactgcaagctccgcctcccgggttcacgccattctcctgcctcagcctcccgagtagctggaactacatgcacctgccaccatgcccggctaattttttatatttttagtagagacggggtttcaccgtgttagtcaggatggtctcgatctcctgacctcgtgatccgcccgcctcggcctcccaaagtgctgggattagaggcgtgagacaccgcatctggccagaaccctttcttaaatagaacttgtgtttttcaggtctttcagatgtaatctgctatactagagctctgttgatataataaggtgtgatggttaataccgagtgtcaattttattagactgaaggacgaaaagtattgttcctgggtgtggctgtgagggtgttgccaaaggagattaacatttgagtcagtggactagtagaggcagacccaccctcaatctgggtagttatcatcgaatcagctgccagcgtggctaggataaaagcagggagaggaaggtgtaaggactagactagctaagtcttctggcctccatctttctcccgtgctggatgcttcctgccctggaacagcggactctaaattcctcagcttttggactcttggacctccaccagtggtttgccaggggttcttgggcctttggccacaaactgaagactgccctgtcgcgttctctatttttgaggttttgggattcagactggc

SEQ ID NO: 8787 - DNA, 2300 bp, Homo sapien
agactccagctcaaaaaaaaaaaaaaagaataccaactagcactagcaccaaatgggcacatgcttgccttactgcattaaagctggatatccattatcttgtcctgtagtcttaaacatttttctgatgttttgaccaatgcaataggaagaaagaaacgcattatttgcaggtgataatgattgtctgtgtacaaattcatagagatgagctgtcaagctattagaactaacaagacattttttcatagtgtggtaggatacaaggtaaataaacaaaagtcaatagctttcctaaattacagcaataagaaatatctcacttacaaaaaaactataaaatatctaggaacaaacttcccaaggattatgcaaacctatgtgattttttttttttttttacagatgctgatgcagatctgaaaaaaaattgttaatgcatctaaagatacagaaaacaagtatttctgaatggaaagacccatgatattgaaaattttgaaaaagaagagaattaggagaggttcctttatgaaaaggcaaatatattaaatatgtaatgattataactgtggcatattttaggaataagcagataattaatagaggagaatgttcagaaacagatatatacgtgtatgtatacctatgtatatgtatatgcaaatttaggttgtaattaacagtggcacttcaaagtagtgaggaaagaatattcactaaatgacatgggggcaactggtcaaccatttggcaaaaataatctcttagtaaactattttatttccaggaattaattccaagaagtaaatggacaaatgtgaagaaatgcctgttgaaggatttttttgggatagtgaaaaatagaaaaccactcaaacgtctattcagtagattatttcaaatgtgtgtgtctatttgtgtgtacgtagtatacgcataagttatggaatgccatgagtctactttaaaatatggccgggtgcaagatggctcacacctgtaatcccagcactttgggaggccaaggcaggtggatcacctggggtcaggagttcgagactggcctggccaacatggcgaaaacctgtctctactaaaaatacaaaaattcgcgggacgtggtggcgcacatctgtaatcccagctactcaggagcctgaggcacgggaatcgcttgaactcgggaggcggaggttgcagtgagccaaaatggcgccactgcgctccagcctgggcgacagagcgaggttctgcctaaataaataaataaaatgatgaaacagatttaaacttaatggaatggaaggatagccacataatctttaaagtgaaaaaaaaatcaggttctaaatctataggtattctttgattacatttttttcaatgtgtagaggcatagaaaagtccagaaggatctataatgagctgtttaattttcatttcctatggggtagatcctttgttgcatggaagattatttcactctgttagctctctttacatcagtaggaatacatcctcatggttttaaacatcttgagggagctttcctgacactctactctaggtaaatatgctcgcatagcactctctattcaccatattacctataaatcatattgcactttttaacttttctaaactactttttgctttcttttctagattataaaatcttgagggcagggatagtatgtaaaggttcccttgtgagcaaataaccgtcacttattgaactctgtgtgccaaatactgtgctaaatgctttcaataatctcactcatagggagatattactaccatctccattttgaggatgaagatattgaaagattatgaagtttctcccaaatgccattgccaggcctgtgtgactcttggtcgttacacggtgatcaataaaaatttgtttcataggaaagaaatacagccagccgtggctttaagatcactgggtgatacagttggaccagaaaccctttaaactccttcgtcagacacagactcgcaagccccgcccaggacgaccgcccgcgcgcgtatggataagcgtgcaggggcggggcgagcttgtaggagtggggcggagacagatctgactggccaacgtcgggcggaagtcgggaggttgggtggtctgtaaacgctggcttgtgacagggagggggaggaggaaggccttcgtaaaggttgcatctccgtcccttcgctcccggggacccgcgggaaaaaaaaaaatccaacacccaggccccgcggctagccccttcccacaggctctctccgctcgattttgt

SEQ ID NO: 8788 - DNA, 2300 bp, Homo sapien
ggaagcccaacgtgactaaaaccaataggtgattgttcggggccgactgtgtgcgggtgtacacggtattcggcccgggtgtcatccgcggcgctggactgtttcattttgagtttgcaacttgggtttttcagcgagctttttttcttcctgaaagctaatggcttccacagcaattagacattttcctcgcccgccccttccctcccctttctttacatataggagatgggatactcattcccgctgctattgataaggtcggaggcggccgggcctctccccagctttcgcccgccccagcgcccgctctccctccgccctcccttggcttccttttgatgtagtggggaacgcgtcctactaaaaaaaaaaaaaaaaaaaaaaaaaaaaagtaatctgcccggtaacaatcagcgcgcagtagcaggagccccagagctattggctatgcaaatagagggaggggagacggcgccccaaactcttcctcacccttttaaagcgatatcccctcctttcccccccaccaccccttccgccccaccctcgtttaaagaggctggctccggggcctgagttaatcgcttgcacctctagtttattcgctcccctcctccgccttgcagggaacctagtgtacggctcacccagcccgcgccccaccccgccttgctggctctccgcgcccctgcccgggccccctctctcggtgagggaggcactcagtcggcctcggtgtgcccagagagctcgagccacgccatgcccgctgcacgtgccagcttggccagcacatcagggcgctggtctctccccttcctcctggagtgaaatacaccaaagggcgcggtgggggtggggggtgacgggaggaaggaggtgaagaaacgccaccagatcgtatctcctgtaaagacagccttgactcaagcatgcgttagagcacgtgtcagggccgaccgtgctggcggcgacttcaccgcagtcggctcccagggagaaagcctggcgagtgaggcgcgaaaccggaggggtcggcgaggatgcgggcgaaggaccgagcgtggaggcctcatgcctccggggaaaggaaggggtggtggtgtttgcgcagggggagcgagggggagccggacctaatccctcactcgccccctccccctcccgggccatttcctagaaagctgcatcggtgtggccacgctcagcgcagacacctcgggcggcttgtcagcagatgcaggggcgaggaagcgggtttttcctgcgtggccgctggccgcgggggaaccgctgggagccctgcccccggcctgcggcggccctagacgctgcaccgcgtcgccccacggcgcccgaagagcccccagaaacacgatggtttctgctcgaggatcacattctatccctccagagaagcaccccccttccttcctaatacccacctctccctccctcttcttcctctgcacacactctgcaggggggggcagaagggacgttgttctggtccctttaatcggggctttcgaaacagcttcgaagttatcaggaacacagacttcagggacatgacctttatctctgggtatgcgaggttgctattttctaaaatcaccccctcccttatttttcacttaagggacctatttctaaattgtctgaggtcaccccatcttcagataatctaccctacattcctggatcttaaatacaagggcaggaggattaggatccgttttgaagaagccaaagttggagggtcgtattttggcgtgctacacctacagaatgagtgaaattagagggcagaaataggagtcggtagttttttgtgggttgccctgtccggggcccctggcatgcagggctggatggagggagaggggtggggggtggcgggggaccgcgtttgaagttgggtcgggccagctgctgttctccttaataacgagaggggaaaaggagggagggagggagagattgaaaggaggaggggaggaccgggaggggaggaaaggggaggaggaaccagagcggggagcgcggggagagggaggagagctaactgcccagccagcttgcgtcaccgcttcagagcggagaagagcgagcaggggagagcgagaccagttttaaggggaggaccggtgcgagtgaggcagccccgaggctctgctcgcccaccacccaatcctcgcctcccttctgctccaccttctctctctgccctcacctctcccccgaaaaccccctatttagccaaaggaaggaggtcaggggaacgctctcccctc

SEQ ID NO: 8789 - DNA, 2300 bp, Homo sapien
tcctgacctgccttggcctcccaaagtgctgggattacaggcgtgagccaccatgcccggccatatttctcatctctaaagtgaagataatgtagcctatcctgtctaccttagaattgttcagaaggccaaatgtgatattacatgtaagactgttttgaaatgtgtgcctatgaatctaagtatctcattcatctcttctctaaacacatcttttcatatataagtggggattcaaggaaataaatgcattatgaaatacaagaatttaggtaacagtgcatggaagacaatgtcacctagctaacattattgttacttgtgtcacattgctaggtactgctatcccagtttacctgtcacaaaacccagggttagagaagctcatgttataaataaactttcagtgccacaaaagaaatagcactcgaatataaaattttctttttaattctcagcaaggcaaggtacttctatagaagggtgcgtccttacagatggagcaatggtgagcgcacacttggacaagggaggggaaggggttcttatccctgacgcacgtggcccctgctgctgtgtagtgccccaccgcacaggctaaactaattccgattggctaatctaaagagagtgatgggggtgagtggtttggcgggaaaaacagttatgacagagcaggtaatctgagtcagggtggcgtaggtaatgggaaggagtcagggtggagtaggtaatgggaaggagtcagggtggagtaggtaatgggaaggagtcagagtgcagcaggtaatcgaaaaaggttgtggccgggcgcggtggctcacgcctgtaatcccaccactttgggaggtcgaggcgggcggatcacgaggtcaggagatcgagaccatcctggctaacacggtgaaaccctgtctctactaaaaatacaaaaaattagccgggcgtggtggcaggcgcctgtagtcccagctactcgggaggctgagccagaatggcgtgaacccgggaggcggagcttgcagtgagccgagatcacaccactgcactccagcctgggtgacagagccagactccatctcaaaaaaataaataaataaataaaaaagagaaggttgctttaggaggaagttaagtttaaaagtaaaaagcaaagaattgaacatactgacatattgattctttgaaaagaaatttagaactcatatctaacatgaagcaactccctcaacgttctgaaggctattaaagagaaattattcatctgaggcttgttaaaaacggcaagactttactcaagactactgcaataggtgagagagactgaattcgactctagaatacaaccgggaccagtggagatttatagccagggggcgggatggaagggatgaaagagaagatgggaaattaccagaacgtggtaagctatctgggggagggggaggaggaactttactagatatcaagggccttagaagagagcatcaacagtgaggtctctcttgataaacaggcttagcaggattctttggtaaaaccaggctcagcaggccgaggatgccgtctagtatagaaaaggcctcaaaggagcccgactaaagtttggtcacggagggcgtctgtcccggcggagttggggtgggtgggtctaagtctacagacctggccgacgctacgtccctaaggttagggactaacagacctcatagaacacagtctgttggtcgctgtacacccgtgaggggttcatcacagtggccagctataagacgaacggttgcattccagcctcaatcgcaacaaccacaaatcagtgcgccggcttccttatctgccccgaacgcaggctgccggctatcgagggaaggaatcctaccgcggactccgcgggcggggcctcccgcacctgccgcgcgccaatcacaggccggcgcgcaggggcgcaagcgccgcagccctgggcggggcccccgtggctccctcgtctcccccgccccgtcggcctcgcccggccctgagtggccttcggggatgacgtgcgaggccgcctcggcctatggcggcggagccggccggctgcttggcggaagtggtgtgggggaggtagcccgcagtgcaggggcagcgcggcgcggggccaccgacgggacgcggctccgggaacatggctcgcttcgctctgactgttgtccggcagtgagtatggctgtggcaggatgtctttctctctctcttccttgagtgtgttggagcgggtgaagggaaaacgggtccaccaccctctcccctccctgctc

SEQ ID NO: 8790 - DNA, 2300 bp, Homo sapien
aggagttagtcctgctttgtagtcctacaccctccctttcatctcttacatggagaaggttctcaatggctgctgattgccttataattacttcccatctctttacctttcacaaccagaataagaaatgcagggcaaatgttcctaagtgatttgcatctcaattctgaaagctagctatttcttcaattagctaagacgtagcattatatttataatccattctgtggctattagtaaagaagactgttttacatataaacatttcatgtcatacttcttccactcaaccctggggagacaagcaccatgtgtcctagagattcatcctgggtaaaagcctgggtttttagagaataacagaggactgctttgccacctgcacttttttaccaagctcctggctctcatggctttagctctaacatgttgtatgggtttggacaccttgaaaagtgcttaggaggtcttggggccagacctggattcaaatccaacctcttccacatgttacctttctatctctaggcaagttacttaaactgtgtgcatagatcagtttcctgatctatataaagaaaataacagcatctcctcaaagagttattctgaagatgaaatgggttactacaagtaaagcacttagagcagtaagtggaacagtaagctctccatgagcgttagttcttgctgtgattctttggagaagcagcctagggaaggagaagaccttgtcctggctctaccatttatttgctttgtgcctttggacatggaaacactaagatttccatttcttcatgtaaagtattaaaatcttgataatgcatggagtgcctatctcacagagtggcagtgaggttcaaataagctaatagatgtgaaaatgctttgtaaactataaaaaaaaactgtacaaatgtagggtaacaaatgccatctctttctgtctatacctgtaagcttgcactcattttgtattatagttacttatttttatctgcctcctgcattagatttgagctcctcaagataggaatcacatcttgctgtctcctatatcaacctgtacatgagtctagcttgatgcctgtacatggcatatactcagtacagggaaactggaagaatagcaaactccttgtgtgttttttcgggtgtgtgttccagtagcttgctcccctttagactgtatgtgccaggactattccacccgacatcaggtgtagcttcccagagggctcactgtgaacagcatctgcaggcaggcatccaacaccaagctgagcactcatgtacagacactaaatgtggggacaccctgtcctgaggctcggatccccagtgctcagccagcagctgttccaatccccatgaggtctctgaatgagtctccttactactggagagactactagtttagttgccctcgatagtccaaactagggaaattgagaaattgaaccttggcatattcagtgaagtccagactaaggaagctgagaaactgaaccttggcatgttcactgacctcaaggccttacttctttttcttccatttcaaaatcttcccaaaatggcaactttggcttttgtgcccctgctcctagctcccatctttcatgaagtgggtgttcttagaggatgccatctgcctgatggtgtcatgtatctctatatcctgcaagctacccaccaaatcctgctcacagattaagcactggatacatacttgctgattggaatttaaagaaaaccaaaataagtaaactcgacaggagattaattgcctaggagtcggttgactgcttgactgaagctggattttttttgggaaccgctggctgccttcacatttcctgatggaagtgggacaggtcaacagacagcccagagtggcagataacttttgcccacacgtcattcattttttggagcgttggcttgaaattgaggggtgtgtgtgtctggaaccgacgtgccttccgtgcgcctccggggtctttgcactttctttcaatgggctgattacaacacagaggatgtggacagtggagtttttcctgtttgatgtcacactgctaccctttaaaagtctgacggcaaaaaggagggaatccagtctaggatcctcacaccagctacttgcaagggagaaggaaaaggccagtaaggcctgggccaggagagtcccgacaggagtgtcaggtttcaatctcagcaccagccactcagagcagggcacgatgttgggggcccgcctcaggctctgggtctgtgccttgtgcagcgtctgcagc

SEQ ID NO: 8791 - DNA, 2300 bp, Homo sapien
aacagttttccaacaaaggcctacatagtagactcaatctgagcctataaggcatcatctttcctcatgggaaatggcagtgctggtgatgatgagattgggtatgggacaacggcagtggaagggagaggaagccaatggggaagtcagggggccgtggtgacagtaggaacaagtggtgcctatgtccctccccattcagtttaccagctgagggtaaagacagacatctgggcttcacaggatttcagaaggcatgtctagggcaacactaaacacatggcttgacagaaatttgaaccaaagcatcgaacccagtgaacgaggcagaagggcagagagaaggcaggtagaagccacagaccagaggctgggacccagggcacagcagaaggtttagaatcagagggaaggcggtggtgcctcagtagagtccttgggccatggaactcaccccaggagcttttccaggctgcctgcagcctgcaatgtgggtgtagagtgtggctaagggagctgcctgctgggaccagctctactgctcaggacactcaaatccatctgtatgccactgtcatcaccccacacatactctctccaatcccggcaaaatcagtgctaatgtctcaccaacagattaaggcctggattgaagtacaagaaacaggatttttaactcaagttaattcaattccccagcgacccttgttaacttattcaccctcagagacgtattaatagttctgtcttatattgtatagaaatttgtgcagtgagttttctggtagctttacattttttttctcacttcagttagacatgtaatctatttaaaagtaatatgggaataagataaatcagtgtaggaataacttcctggcagaaatatttttactagtttctgagtgtaatatcagcccagcaaaagttatctgcaaatatagaagttctcatgtacatcaaagacactcaagttttttttaagaaataaatcattttatgctactgaaataactctgtgatgtgctattggcatttaaggagctaaacagactctatgggccagccaacttctactgcaagcattagacatgcacaggctttagactcaggcacaccttagaagttctggctttgctacttattagctatggtaactcgggcaggtcatttatcctctctaagcctcaacttcctcatctgtgaaatgggaataatatcagtcacatgccagggataaatccagggagaatggccagggggctgtgtcaaaggccagacacaacttccaccccaggtgaatgtcgggaccaggacagtgagcaggcaaaccttgcccttgccctccttccctccacaatcttaaagctccttgaacaacccccatccccaccccctgagaatgtctgtgccctcctgctgaaagggtttggcctttcagtgttcccctccaccatgagctgtttccatgaaaagatctcaagggtgacttgaggctacggtcatcactaccacaagccttttcccatccctgcctctacctattgccctctaaataaggaagccagcgctgccaggcaaagaacttctgcccaatatgggtcctgggtggcctctcgcctctctctttccctgggcccccagccagctcccccctcccccagagatgctccctgctcacttcattcctgcctcatagttggaatgacagtggctcccagaacccctggggagtgtggagggtgatgggggtctggggaggcagccaggcccaagagcaggttaatgttacagccctggataagtgagctgggcgggttgacgtcagggcgatgatgggtggaggggagggccgggctgctgaagcaactataaagataggtcaaatcaaatatcatcaactagggacggagcaagcgggcgagctagagagcgtccccgagccatggtctctaccggccgcggctcagcctgggtccctctgctctcaacccgagtgcccgatggaggctttggtttcatgtcagcagccttcatctgccttccaaaaataagcccctgccgccatgccggagggagaaaaacaagaagggcggtatttttagggccattaattctgaccacgtgcctgagaggcaaggtggatggccctgggacagaaactgttcatcactatgtcccggggagcaggacgtctgcagggcacgctgtgggctctcgtcttcctaggcatcctagtgggcatggtggtgccctcgcctgcaggcacccgtgccaacaacacgctgctggactcgagg

SEQ ID NO: 8792 - DNA, 2300 bp, Homo sapien
gtctctattaaaaatacaaaaattagccaggcacggtggtacacatctgtaatcccagctactcaggaggctgaggcacgagaattgcttgagcccaagaggcagaggttgcagggactgagatcgtgccactgcattccagcctagatgacagagtgagactctgtctcaaaaaaaaaaaggagaaataataaaatactgtgtatgcattcaagccagacaagaggatgtttgtgattttacatctatgatacatgaaatataagaaaaacacaacttaaaaaatatttgaaatgactattaccctaatatttaggtcctggggggaggagccaagatggccaaataggaacagctccggtctacagctcccagcatgagcgacgcagaagacgggtgatttctgcatttccatctgaggtaccgggttcatctcactagggagtgccagacagtgggcgcaggtcagtgggtgcgcgagccgaagcagggcgaggcattgcctcacttgggaagcgcaaggggtcagggagttccctttctgagtcaaagaaaggggtgacggacgcacctggaaaatcgagtcactcccacccgaatattgcgtttttcagacccgcttaaaaaacggcgcaccacgagattatatcccacacctggctcggagggtcctacgcccacggagtctcgctgattgctagcacagcagtctgagatccaactgcaaggcggcagcgaggctgggggaggggcgcccgccattgcccgggcttgattaggtaaacaaagcagccgggaagctccaactgggcagagcccaccacagctcaaggaggcctgcctgcctctgtaggctccacctctgggggcagggcacagacaaacaaaaagacagcagcaacctctgcagacttaaatgtccctgtctgacagctttgaagagagcactggttctcccagcacgcggctggagatctgagaacgggcagactgcctcctcaagtgggtccctgacccctgacccccgagcagcctaactgggaggcaccccccggcaggggtacactgacacctcacacggcagggtattccaacacatctgcagctgagggtcctgtctgttagaaggaaaactaacaaacagaaaggacatccacaccaaaaacccatctgtacatcaccatcatcaaagaccaaaagtagataaaaccacaaagatggggaaaaaacagaacagaaaaactggaaactctaaaacgcagagcgtctctcctcctccaaaggaacgcagttcctcaccagcaatggaacaaagctggatggagaatgactttgacgagctgagagaaggcttcagacgatcaaattactctgagctacgggaggacattcaaaccaaaggcaaagaagttgaaaactttgaaaaaaatttagaagaatgtataactagaataaccaatacagagaagtgcttaaaggagctgatggagctgaaaaccaaggctcgagatctacgtgaagaatgcagaagcctcaggagccgatgcgatcaactggaagaaagggtatcagcaatggaagatgaaatgaatgaaatgaagcaagaagggaagtttagagaaaaaagaataaaaagaaatgagcaaagcctccaagaaatatgagactatgtgaaaagaccaaatctatgtctgattggtgtacctgaaagtgatggggagaatggaaccaagttggaaaacactctgcaggatattatccaggagaacttccccaatctagcaaggcaggccaacgttcagattcaggaaatacagagaacgccacaaagatactcctcgagaagagcaactccaagacacataattgtcagattcaccaaagttgaaatgaaggaaaaaatgttaagggcagccagagagaaaggtcgggttaccctcaaagggaagcccatcagactaacagcagatctctcggcagaaaccctacaagccagaagagagtgggggccaatattcaacattcttaaagaaaagaatcttcaacccagaatttcatatccagccaaactaagcttcgtaagtgaaggagaaataaaatactttacagacaagcaaatgctgagagattttgtcaccaccaggcctgccctaaaagagctcctgaaggaagcgctaaacatggaaaggaacaaccggtaccagccgctgcaaaatcatgccaaaatgtaaagaccatcaagactaggaagaaactgcatcaactaacgagcaaaatcaccagctaacatcataatgaca

SEQ ID NO: 8793 - DNA, 2300 bp, Homo sapien
ttttattgctatcacttcatctattttctgattttgcctagggctagccctggtataggatgtattatatattttaaaatacaatgtgattttaaagtaataagttaatcgcttcatttaatcattctcttaggctgctaaaagtgttaaatggcaatatattaattgacattataatgattgaaaataataatctgctttatttattgtgaggaaatgaaagaacaagtgggaattttagaacctgttggtgcttacctgtcttacttgtcaccatggattaaggatgagtttaggaaaaaattaagcaagactttcagctgttcagttttctctcattataaagctttcctttaagaaaagtttttgacaaacataaaagtatatcaataattttattacttttagtgaggaaattaaagttcagccaagtcagttcagagaatctgtagaagcaattggaaggatttatgaggaacagagaaagttagaagaaagttttaccattcacttaggtaagtgtgttaatttttttgcagttataatttattgtaacttctgaaactattttttaattattatttttttaaaataatagagaaaaggtttcgctatgttgcccaggctggtcttgaacccctgggctcaagcaatccacccaccttggcctcccaaagtgctaggattacaggcatgagtcaccgtgcctgaccgctgcaactttttttatatgctgtaagagaaaaattcctaacatgtgagtagagtgtacctatgttatttttaattccaaattatgttttactttaagaaagactatattttattggctttaagttttgtatatttatataatgttttttgcagatagattaaactgaaaaagtcattaaaatgggaagttgcaaggcccatttttaattattttgtggtacagatttatctggattcttgccatagagatttgcatcttgttatactggactttctgtagctgcttaagtatctttcctggactattgcctacccccaggagcccagttgaagaccatgcataatttgagattgctgagagcagatatgctggacttctgtaagcataaaagaaatcatcgaagtggtgtgaaacttcatcggctccaaacagctctgtcactttattctacatctctctgtggcctggttttactagtagataatcgaattaattcatatagtggtattaaaagaggtaagttaacatcatacacatttattttgttaaatttcatcctgtaacaccattcttacaaagaaaggaattacagggaaaatgaaaaaaaattttaatcaccttgacatccaagtagaccaaacaaacatacccagccatagttattttatttcaaactgtagcatcgatagagtgcttcatatttatttttcttaaaatgctattataaataatgtttttatagaattctcattacgaggtaaaacaaaaagagcaatcacatgttttcagtttagaagcaaattctggcttggtgatttttagctcatccatttgtctctctctctctctctctctctctctctgtctatatatatatatatatatatattttaataacctacctcttaaatttgctaggtaaaattctaccttccctcttagtacaattcactttttatgattatttctaaatttgtaaatatataaaatgtagaatatataaaatatatgaaacgtatacttgtttttgaaagaagcttaaatagaatttatttcccctcataaatataagaaccttcttatattttgtagcaccttttggggtggattatgatgaaagtattatttaaagaagacctggaattacattaacaaagaaatgtcaatataattaactcttttgagtgttagagaggttaagtctctaatcaaaacaaaattgctgtgccctaacttaaggcataattatttaaaagacaagtataagaaatcttattaagaaaaataagtattattttctttttctactaaatctcattgtaagtaaatactaaatatttgatagttcgcatttagaagtttgtaaatgttttgggtcccttagattttgccacagtttgccaagaatgcactgacttccatttcccccgaattgaagagcaattagaagttgtccaacaggtggtactttatgctagaacccagcgcaggagtaaattgaaagaatcacttggtgggtaaaactcacttttattatattctgtctataatcactgtaatagtatgtggatcagtattaagatca

SEQ ID NO: 8794 - DNA, 2300 bp, Homo sapien
gaagaaaatctagttaaaggcagtaagaatcaacatcaattaaagatttatttattcatcagccttgtaactggacttcctatggctaggctttctcccatcaaatcagttcttacattattttctacactgaagttatagtaatcttcctttttaaaaaaggaatatacttatctgatcatgttgttcatccgcttaaaaactttctatgacattccattgctctcaggataaaatgcaaactctttatcccagtttacaacacccctgcttatatttccactcttctctcagaaactgcacctctccttcctaatacacaaattcacaaattttattttccagccattctgaacttctgtcaacaccaaacttctccttccatgccgaatctttttgaatgccttttcctttgcctagagcactcttactgatcttaatttcattggataacaattgctaattcttcaggtctcagttaagcctctaggaagacttatccaactccctaaaactggattgggtcccgacaggctctcatattagcctagacttatttgaatcatggcacttatcacgctctatttcttactcttggctagaaaacagtcttcttgaagtggaaggaatactgtcttgtattccatgtattaggcaggatgttgcgaatggcaagaactaataaataattgttggattgtatggcgtttttattttatggtgctcactggaaaaataaagaacaaaaaattattcatacggttatttaaaaagatatcacctgaaatataaaaaaaactcaaaggacttttgtacatgtcgtggggcggggctaagttgaattatccagactatattttcaaatctgtatgtaggctatacacaaaaatcttcgtctatttcaccataatgcaaagagatagggtatttgttttactcagaaagaattaaaattaaacgtaaagcaatacaaatttttataatgttagaaaactaccaaaactacataaaggtatattctatgatgtagaaatttcattcctaagtatatatccaaatacacacacacgcatatgttcgctaaagtacacccagaagaatgctcatataagttttatttataataccccaaactggaaacaaccaaaatgcgtattagtaggagaatagtaaacttgtttattttatgagataaatactacacagcaataaaaaagaatcaaccactgataaatgcaaaaatatgaatgaatcaggaatgttgaaaaaaaaaagagaaggcagacacaaaagctctggttcaacatttagacttgtgtttcaagaaactgataactttagttctttctcctctcgctctttttttagactaatggtctatcctgaagcctgggttcagttttagcaaccgtgaaatccaggaaggtttcccataagaaaatgggatggaaggtctggaccgaacacacacagccaacagagcggaggctctgaggctcacattaatcagggaaaaggaagacagacggtcgagctgagaaacttcagccgggtgaggggactaatccctctgtaacggttgtcagtctgaaagggcatcctcactcggttctgggctcacctcgtctagttccgaagtcctgggcagtccgctcactcgagctgtcagcgcgtcctgcactgggaaaccagctgacttgccgacatactttttccacaccgcggatccgcgaacgtagattcgccacatccttttctatttcctggcatcttgtagaaaatttctcagtccaagtgcccctatgtcccaacctgtttcaatttaacaatttgaaaggtgcaataaggtgtatttctattgttattctgtatttcagagacagggcaaatccgccgttgtgacgaaagtgcagggacaaagcacaaactcggctctggtggaccggatacggaaaagcggtgccttggggagggcgggagcaaattcgctttccccacagcgcgtgcgccgccgcaagcatggctggtgatgattggacgactggtaacagggggcggagggctccgaagtctggttttgggcgggaattgaaaccgccgctgaagccaacaagaatttgagaactgtaaataccaagccttgaaagggaccatggtgcggcctgtgaggtgggtagttcctgacattcgtcgggggtgggaggaaaactaagggaaaagacatgagactaaggggaaaggatcgagtaagaccggagggcagcgatggtggggttaggatggacggttatcaagaaccc

SEQ ID NO: 8795 - DNA, 2300 bp, Homo sapien
ttccactacttcatcaagcatattcttaactgaaatgatttttttttttttttttacttttaagagtatggcagtaaacattgcaaagactagtagtacaatttagtgccactgccttaattgttctgaggtgccagcagttttatcggggtcactgcagtgcaaatgacaaagcagcgaaaaaggcaaatcatatcttagtattgttatgaaaggagttttgacctcatagacctctagagaagtttccagggacccacagaggtctgtagaccatactttaacaactgctgttccttacaaagggattatgactccactgcctggatgcttaaaacccatttcaaattcagcatgttcgaaacagaaatcttgatccctcacacctcctaaccttccttttcctagtcttccctatcttaatacaaagatcatccatcctgtagctcagaccaaaactattgtggagtcatctctgattctttctttcccttacctgtacatctacttcatcagcaagttctgtccacagtgcctccgaaatacatcccaaattcatctgttccattccatgcccactaataataccctatcccaaaccgctctccaatgatataatacctgattttcctgctcccgttctggtcaccctatccatcatttattctccaccaacagccagtgacctttataaaagcaaacttagattcctctcccctacttaaaaccctccactgacttcccattgacttaaaataaaacctaaactcctttctaagacttacaagaccctatctgttctggcacctgcctatttctctggcctaatccccctacgattctccccactgcttgttaatcctatagcattagactgtccctaaaatatggtcaagtatggggccttggctcctattccctctaccctgattcatgactcagtgcatgcattatcgcctcagagtcacatattaactactatatttaaagtagtgctttcctctttcgcactctcatatttcgaggcttattttcggccccctaacctcacctcccactggaatgtaacctccagcacctcgtacactaaagaagtgaatatattcaataactttattaaatgaatggctaactataggcttccatggcactcaactgtgtaaatagaagaatcgtttctaataccacgatggaaagcacagaggatcttgagtgagatgacttaggtttgagtattgccctgccacttactgggctgtatgactcagataacttaccctctatacgtagaaatgttaaatcaatacaacaggaatgcttactctttctatatcaaataactacagtgataaacaaataaaataacacataattgggcgctcggtgaaatgtaaagcgctgttcaaacgctaacaaggtcttggtaaaagaaacggcgacggttgtgaagggaggcaaagagaaggaaaaagctacgatgctaggatacttctgagcaacgggtggctctcactggagactgggttcttgataaccgtccatcctaaccccaccatcgctgccctccggtcttactcgatcctttccccttagtctcatgtcttttcccttagttttcctcccacccccgacgaatgtcaggaactacccacctcacaggccgcaccatggtccctttcaaggcttggtatttacagttctcaaattcttgttggcttcagcggcggtttcaattcccgcccaaaaccagacttcggagccctccgccccctgttaccagtcgtccaatcatcaccagccatgcttgcggcggcgcacgcgctgtggggaaagcgaatttgctcccgccctccccaaggcaccgcttttccgtatccggtccaccagagccgagtttgtgctttgtccctgcactttcgtcacaacggcggatttgccctgtctctgaaatacagaataacaatagaaatacaccttattgcacctttcaaattgttaaattgaaacaggttgggacataggggcacttggactgagaaattttctacaagatgccaggaaatagaaaaggatgtggcgaatctacgttcgcggatccgcggtgtggaaaaagtatgtcggcaagtcagctggtttcccagtgcaggacgcgctgacagctcgagtgagcggactgcccaggacttcggaactagacgaggtgagcccagaaccgagtgaggatgccctttcagactgacaaccgttacagagggattagtcccctcacccggctgaagtttctcagctcgaccgtctgt

SEQ ID NO: 8796 - DNA, 2300 bp, Homo sapien
tgctaaacttcagtcatttgagggccagctttacagtttttgccatgcctacgcctacatagtcctcacactctgttttgttttattattgttttttgtagagacaaggtctctatctgttgctcaggctggagtgcagtggcacgatcatagctcactgtaacctggaaatcttggcctcaagtgatcgtcccacctcagcctctcaaagcactgggattacaggtgtgagacaccatgcctggccttacttttttttttaacttaaattttaatctcatcctacataataacaaccacaacgttacaagttcaatgtgcttgttacagtttttcaaatggatattacagtaaatccatacccattagatagctctttatctgcgtactgtacacattacgtcctcttcctctgcggggtgcttgccgccctctgggacacactgctctagtattttggtcttcttctcctcacccttctaggcgtgaagtctcttctgatcagggcactggtgtccaggctgggtgcctgtgttccactgggtgggttccactatgccaccttcagagccacactcagggcgaaaagacttccaggcaaggcaatggccattttcttttctaaagagcaagagcagctcagctgttactccttaccgtaagcagggtctctagttaagattttgttggaagaaaaggccatattgattttttttaaagcatgaaaaccataggccaagcccatccaggatgaacactttgggaaagatcatttgtttggataatcatccattcatacattcattgagtacttattggagcctctcttggctcttcccagctaaggattcaggagagctggcctcaagcatagtttgtttattgtaatgtaacaaaaatatacagtgtgggataaagccatgccaagcattgttcctattttcttccacttgatccaggttggaagtaaactttcggttcagatccagaagccaccttccaatatcaagaactccagaatgacccaagtctttcataaggtagggagtgatggtcagctccttttctctaggagagaatgaggagaggtgggtggccagggtagctttgaacagacagttttggccaatttatcataaaatgtatcataacatgatgacagcactctatccacgtcaccacaccccatctccacatcaccacgccccatctcctccacatgatttttaaaaatgtttttattttaatttttgtgggtatatagtaggtacatatatttatgggatacatgagatgttttgatgtagatatgcaatgtgtaataatcacatcatggaaaatggggtatttgtcccctcaggcatttatcctttgtgttacatacaataaaatacaattaaattactattgattatagtcaccctgttgtgctatcaaacatgaggtcttattcagtgtacgtttttgtacccattaaccatccccacctctcccctgaccactacccttcccagcctctgataaccatccttttaatctctgtctcccttaattaaattgtttggatttttagatcccataaataagtgagaacatgtgatatttctctttctgtgcctggcttatttcacttagcataatgatctctagttctatccatattcttgcaaatgacaggttctcatccttttttatgactgaatagtattccattgtgtttaagtatcacattttctttattcattcatctgttgatggacacttaggttgtttccaaattttagctcttctgacctctctcctgattaatcagtcaatcagtcagtgcaggaggcagggatccaagtgagtaggtcaagtcaataatgtagtcatagaggaaattgaagcttatgttgcactgaggaagatttgtgtgatataacaggaagaacttccctgcgttagggtggtaagatattggagtaataataataatggccagcacttacagaatactctctatatattgactcatttacctcacaaaagccttatgaggtaggccccatttttgttcccatggtagtgatgaaataattgaggtttcgagaaagagtcagtgtgagctgttgaaagcctgcagctagtaagtagtagagcagggactcaaacccagagcccatgtgtttgttgactctgctgctctggaatctgcatttcttgccaagaactttaagaataggtttaggtccagattggggttaggctcattcttgttggggaattgggaagggaggctggaagaaatgacccctgga

SEQ ID NO: 8797 - DNA, 2300 bp, Homo sapien
atatcccataaagtagctattattctaattaggagaaccatttgggagaattttgaaccaagcacaatggatcttaactccgacatgataacaagccacttaaaccagtcctgcagacaactagcacaactgcttttcttttcttttcttttctttccaagtaatcaaagcacagcaggatattgtagacgtggagcgcccagattttagaatcagaattgcatctgaatacgaaactccaccatggactagctgtgagatgcctggcaaactatttaacttctctaagtctctgttttcttacctgtgaaactggaagagtaaaacctatcttactaggcgaatatgaggattaaacaaaatagtgcctataaagcatttagcacagagcctggcaaacattacgagtacttcacaaatagtaactagtaactatatgacacttggtaataaaaataccgaattgttctttaaaggtgggtaatatctgtggtcattcccagatagacatatgaactccaataattacagtgattctttacatttgataataaataggagactttcatatatattatgttattttatcctgtgtttcagagtttttcccacatgcagattgtacaatttacaaacatataaacatgttcatatgcttatcacagctagcgtccatcaaagaatctaataaattgccaatacatattaactcctgaattataaatcggattgttaaatgatgtcagtccattggaagccatttaacatatccagatagtgtttgtgcagcctggcaaagtgattaattatccacaattttccctgaattttctcatttttttggaaactatacttgtaataagatcgaaataaaaacaggtaaaccatagaaaatagcaattaatattaaaacaagaaaaaatctgattcagttcaactgctaactcttctatctagctgatgactgtcagatctgttttttaacttttattttaagttcaggggtacatgtgcaggtttgttacataggtaaacgtgtgtcatgggagtagttgtacagattatttaatcacccaggtattaagcctagtacccattagttatttttccttgtcctctccctcctccctacctccactctccaaaaggccccagtgtgtgttgttcccctctatgtgtccatgtgttctcatcatttagctcccacttataagtatgaacatgtggtatttggttttctgttcatgaatcaacataaatgcccatcaatgatcaactgggtaaggaaaatgtggtatgtatacaccatggaatactatgcagccataaaaaaagaatgatatcacgtcctttacagggacatggatggagctggaagtcattatccttggcagactatccaatcttaaagatatatgtcattagaagcaacatagtatactagctgagagcatgggctgtggagtcagactgccagggctggaatttctgctccatcaatggttagctgtattatttcaagtaagttacagacttaacctctcacttcttcaatttcctcctctgtaaaaagaagataataagagagctaaatctcaggtttagtatgagaaataattaaatgagataatagactttaaatacttggaacaatgtctgatacacagtgagtacttaataaatggttacttttattgccaagatggagcaagcttgagagggctgatgacatttgtaactgaactttgaggttgtcttgaatatcccatatctttactttgttatagtcagatgaatccttgtctatttttaaggacacctccacggatcctgtcagagtgctcagctggctccgcagagacctggagaagagtacagcagagttccaagatgttcggttcaaacccggagaatcatttggtggggaaacgtccaactcaggagacccacacaaaggtttctctgtagactattacaacaccaccaccaagggcactccagaaagattgcattttgagatgactcacaaagagattccttgccagggccccagggcccaacttggcaacgggagttcagtagatgaagtttccttctatgctaaccgcctcacgaatctagtcatagccatggcccgcaaagagatcaatgagaagatcgatggctctgaaaacaaatgtgtctatcagtcattgtacatggggaatgaacccacacccaccaaaagcctcagtaagatagcatcagagcttgtgaatgagaccgtctctgcatgttccaggaatgctgccccagacaag

SEQ ID NO: 8798 - DNA, 2300 bp, Homo sapien
taccctggtacctcaaaaggttattatgagaatcgggtggcgtaatggatgcaaagatgctttgtcacccgtaaagtgctatatgtaggtccatgcagtactattcaaataccactgaagtatcaaaatcatagaatgttagagctggaagagattttaggagctcagcaagccccattatttcaaagacgaagaggccaggtgcggtggctcatgcctgtaatcccagcactttgggaggtcgaggcaggcggatcacttgaggtcaggagttcgagaccagcttggccaacatagtgaaacccagcctctactaaaaatacaaaaattagccgtgtgtggtggtgtgcacctgtaatcccagttactcgggagactgaggcacaagaatcacttgaacctgggaagcggaggttgcagtgagccgagatcgtgccactgtactccagcctgggcgagagttgagactctgtctcaaaaaaaagaaaaaagaaactgagatattttgacaaatataatttgactagtaggtgcactttctgtgaaaagaatacaaaagctcttgagacaatataaaagatcatcaatggataaataacttttttttttttcaagtctcactctgtcacccaggctggagtgcaatggtgctatctctgctcactgcaacttccgcctcccaggttcaagcaattctcctgcctcagtctcccgagtagctggcattacaagcgtgtaccaccatgcctggctaattttttgtatttttagtagagacagggttctgccatgttggccaggctggtcctgaactcctgacctctagtgatccgcctgcctcagcctcccaaagtgctggcattacagacgtgagccactgtgcccagcgataaataacttttttgaaggaaccctgtgataaaccagccgcttttgaatctgttgcaattttcatcattatctcgtggccatgcttggaatttctttttgctccatggaaactatatactagtcctatatttaatcattaattacagagtagctgaggtaacattttcagagaatgtagtaataaagcatagaaagagtagctaaccaaatgcctcttggtgtgatttttcccactacagtttctcaggtcaggcattgcaaatgataaaatagggttattgtatctctgaagatctaagacaaattataacccagagatggtcagtttaggcaaaatatcctaaaaataatttttttacagaaggcaagatgcttataaataaaaagagtcctggctggatctgacaaaatgaagtgattccatgggatatgcataaaatttagaccctcaattcttttatttctcattctcctctgccgtcctctagatttgttaatacataatacttactctgctgctttaagtggaatccattggcaaaatgtccccttcccgtattcccccacctatattaaacactctaaagcagaggtccccaaccctcaggccatggaccggtaccagtccatggtcttttagaacctggccacacagcaggtaaatggtgagcaagtgagcaaagctgagctccacctcctgtcagatcagtggtggcattagattctcataggagcttgaaccctattgtggaaagtgtacgttgtgcactccttatgagaatctagtgcctgatgatctgtcgctgtctcccaccatccccagatgagaccatctagttgcaggaagacaggactcccactgattctatattatggcataatagtagaaatagagtgcacaacaaatgtaatgtgcttgaatcatccagaaaccatactcccaccccactcccatccgtggaaaaattgtctttcacaaaactggtccctggtgtgaaaaagtttggggaccactgctctaaagagagaattaatcagaataaagcccagtccttctaaactaaacatcagccccttggagtatatcttcacccctcctctttgtcctgttgaccattcattttctggtagcctcactactgttgctatagagacagtgatatcaccaattgtgattctgatgtcactctccagtcccagcaagggggaggtacatggaaggccacaggaagaaacaagatcttgagctgagcaagaacatcccagcatcttcattgactttaaaagtatattctggagtcttccgtggttcactattccagtactacagaggtaggtaatcttactggactgataaaacagcccattttctgatcctctgtggttggaagggagaattcaatgacaag

SEQ ID NO: 8799 - DNA, 2300 bp, Homo sapien
tcctgacctcaagtgatccgcctgcctcgacctcccaaagtgctgggattacaggcatgagccaccgcacctggcctcttcgtctttgaaataatggggcttgctgagctcctaaaatctcttccagctctaacattctatgattttgatacttcagtggtatttgaatagtactgcatggacctacatatagcactttacgggtgacaaagcatctttgcatccattacgccacccgattctcataataaccttttgaggtaccagggtaggttttatttaccctgttagacaagtgtagaaacttgtccaggtcacagctaacgaatgacaaaactggggatgggatctagtattctaggtgttaaaaatcggtgttctttcagttgggcacagtgactcatgcctgtaatcccagcacttttggaggccaaggtgagaggaggtcttgagcccaggaatttgagacaagcctgggcaatacagtaagaccccatctctgaaaaaaaaaaaagtcagtgttcttttaattacaccatgcaaccttgaaactagaactgagaacatgaggcagtgtttaacttagagattttaaattatataattggcagtgttatacaggagtaagcaggttgctgatgacagtcaggatctgttgatccgaacaaggaaagtatgttagtatccatattggtcccaaaatcaagtattagcaaattgtgttaagtgaacataggataaggccaagaaatatgacagtgtagcgttactactaagcttctccgatgaaattcaaggtttttttctctcttccaattcaatttgttaggcgacacttcagtaaacagtaggggcaagatagagtggaaacagccaagatttcaagcctagtaataagcaacttctacatccctactcatcacaggcctttttgtctatcccagaaacacatacttttcctgaaaaaacaaagcactggaaggattaccaagtctagaaagaacccgccctccccaaactaggtggttttctgataagcctaaggtatgtttcacaggatcactggttgccatctcctacccagcaatctggagaggttgaccagaataaagtattttaaaatccaagcgcttagtctaacctggaatttcctcagtttctagatggctctttgtagaacaatgcagattctcaaaggtgaccacagttaaagaaaaaattacaagccattgcgctagagagagccatctgcagtttctccttagacagatgttcagatggcacacatggccactaaatttgcataatatttcaggaagttcacagatttcccgaagcccactcatgaatcacacttctggttaagaactcctagattcatatgctagttggtgataagtgctttggtatataaacttaaaccaaaaattggtggaataattaccaccttggataggatggtcagagaagttttatccgaagaggtcacttttgagcagagacttgagctggtgcagacacctgagtgtgcattccaggaaacgcgaacagcaggcgcaagggtccctatgagagaatgtgcttggcgggctcgacgcacatttatttacttgggacacaccctattttggtttctcttctccacttttcccctcgttcttgtccccccttttctctctcctgggccctggatctcctgagcgcggagggctacgcctccttcttcctccggactcaccagggctgccagcttagcttacattttcagggaacaggaaactgagagtcaggaaaggtgagctcttctacctcgggtcttgccattttgcatgtcctgagtcagtcactggttaactctgaacttcaggttcctcggcaattagagattataaatagcctatacagcctattccagatctgagattccaacagccaaagtcttttcacttcctttcttccccctctccttcactttcccagctttcttcttaaccaacaatctacccgaaaccgtcgtttcttggttagcgcttgcgcagacaggcgagaaaggtaagttttgacccagcttagcagccgtagtcagccgggagtgctgtcgtgggggattgtgggaaaagatggcggctgccgcacaatcccgggttgtccgggtcctgtcaatgtcacgtaagtgttaccgggaacggcggcccctggtcgggattccgagacggggatttaaggttttggaagtggcaccgtgctgcagcggtcacgccaacttcctaggcacactctggtttctctaggtttggagc

SEQ ID NO: 8800 - DNA, 2300 bp, Homo sapien
ttttctacctctaccatggaaatcatgtcatttccatcagcacataaatgttaactcatatttaaaacaaacaaacaaacctattcctgtccttgttttctctagttccatttctcctttttcagaaggattgtgtatactcctcatctacttccttgcctcacagcctctcttgtttgctccagtctggctttcagtcccactaatccaataaaattgctcttatttatgccacctacagccacatcctccagcttctgtggtcctctgtcctcttcctacttcactttcagcatttggtaaagttaaccattctctccttgaaacagtttcttattttgggtttttagattctgtttccttctgagtttttctcctacctcatgggactgctttttaatctcctttactagtgctttgggctagtcactaaccttatccataaagtggtgataaagatagcattaaaaaagataatacctatgcagcacttagaataatgctggacacctgccaagagctctgtaaaggtagctgttaatatgatgttattattttgttattatgatgtgtggtccatgatgtttacttttaatttctgtcactatcagtgagctaggctatttctccaattcaatacttttggatagggaagaacaatgacctttgggcagaatgccacctgaaagtcatccctagaaacaaacacagattttctaaagaaagtcctgtttgtgtctttcacctctcccaagtgtacaaagcacgaatgctaagctccgaagtttgttgattggagcagaagtgcgttagcactttaaacctttttgtttctacttacatgaaagttgagcagctaactctaaaattctattctaaggagttagcaataacttgaaaactggaatgtatccaaaagagattctcattcctgccatatgaagaatatttgacaggacagggaatgtttaacctggagaagaaaatatttagtggggctataattgctacacttaattgtagaagagggattagacttgttctttgtcattctggaggaacacagggataaaaacttctgggaagcagtcactgattccccttgtggtagaactttctttctgttagaatggctcaaagcagaatgggcagctacaggaagtagtgagtttcccaactccacaggtgttcaggcaaaagccagatgatttctttgcacacatgctgtagagaagatgtaagcattggtacatgaactttgagggttcattctagtaccaagaacctcagtcaatgaaaaagaaatggtggaatgtttgacaagtctcttgctgttaaactttctaaaagtcagaatatcttttctcaagcacttcactccttttatcattatttgtgatgttcttcagtggttttatagtaagtctgaactattgaactgcattctttttttttttttttaatgttctgtactaataatcatctgcttccgaccagtatcatcaaccttatttttcattagtcaccagtttcagattctgttccaggagagtcttttgctgttgccctgtgctgtaggcttattcattctacctctgcattgtgatgtgttcctcatgggattctgtcctttcttttttttttcctcttttaagacctttctcaaaacattttatccaggaatacttcctcatggtaatgtgatttattgctcatttattacatattctcagttccttttaccgtataggcttatgctttcctactttgtgactgtttaatatgttttttaaaaaatgtgacttatcttcttaggtaagttacattgtatagggtagggagtatatttcctcatgtcctctggattctgtgtcgtagtagtttgtgtttattattgcccttgatacttaaattgctaaagtactgattgcaaaataatgttacaagtttttagagaaaggagctatttgtgttgacagttttaaaaatattaatatttgccatgcttgtatactttggggttttgtttaaggttctgccattactgcaatagccacatctgtgtgtcacggcccaccctgtcgccagcttcatcatgccctcatgcctcatgggaaaggtggacgttcctcagtcagtgggattgtggccactgtgtttggagcaacaggattcctggggcgatatgttgtcaaccaccttggtaagtaaagttccttaagttcatatgctccattgccattgatcaggattgcctgatgagaagcatgagctatgtttctcttcattttaacagtatt

SEQ ID NO: 8801 - DNA, 2300 bp, Homo sapien
tcagcctgccctgttctctctacctttcagagtcttcttaggtttgttttacatatcatgtgtactttttacttgccttgatgggaaggaatagagaagataaatgtaggtatttcttcttgtcccagaagcagaagggttatgcttttttgtttgtttgttttttgtagttgttgttgttgttgtttgagatggagttttgttcttgttgcccaggctggagtgcagtggcgcgatctcgactcactgcaacctccgcctcctgggttcaagcgattttcctgcctctgcctcccaagtcgctcggattacaggtgcctgccaccatgcccagctaattttgttatttttagtagagatggcgtttcaccatgttggccaggctggtcttgaactcctgacctcaggtgatccacctgcctcggcctcccaaagtgctgggattacaggcgtgagccactgcgcctggctggatcatgcgtttcttatgttttgagtctaatttgcaagtgggaggctgggagacattttctatccctgcgaaacagaagaagtgattccttttcattttgttcattttcatcctgtttttcctaaagccacattactttcctttaatccacatgtccgcctcagcacatgtcaccatgtgctgtgtttgggacgtagtaaatagtccaaagagccaggccggggtggaagctgtgattttgacgggattgacagtagactgagaactttgaacttttagccttggggaacaattttatgtgtttattctacaatgatgatcactggtgatttgtccaaaacatattataagtgtgaggtgtggaggcaaaggagttactggaagctggggcagggcagaagcccagtgtatgaagttgtgcagaggacaagcaaaggacagagaccagtgaatcggagtcatcccctgaggctcaaccccgggcaccgcctccagctcttctccacctgcttctaggcagtgaagtcctaggaactagcaagaaagtctgtccttaagtttgtgggacaagcatttgttgcacacctactatgtccaaaaccctgtagagttaggtaaaaagacatcttagatcccagctctccaaaaaagcaaggatctaagtgtacagagacttcttgcttcgtgatttcttcttcatcctatttatccccttcttatacccacaggaccagacctcacatgccctatcagagtctcccaggtggtttttccagggagagagaacattaaacatcaaacaaacatatatagagaaaagcctctcacccaggcagcctgagctagctgcaggagcaagcattcttctgacttctgagacagtacaaggtgtgtccaggtgacttacctgtcactgggcagctgccatgcgcactcctcacacctgacgctgctcagggagaagccaggcagctataatagtgttcttggccggagaacatctggcctagcaggcagggtgtcatctatgaagctgggtggagagaaagctgttggggaaaccagccccacaccacccagcggataccccgagtccggcggagacaaaggagttagaaagagacagaacaagcgtttaaaaggcaggtccaggggaccagagcgttggaggcttgctcacggcccagagctctgggctccacccaatttattggtttacaagctctttgttcttagggcagatgggaaggggaggaagggatgaggaaaaggattaatcagtgagtcattcgataagatgtgtaacagtggcggtttctgtgaatttccttgagcaaaggcgtgtgtctaaactacttaagatctttaatgactgaaatgggtgggagtgggtttcaggaggagccaagatgtttgattatactcctctgcttcaagggagtgttatctccctgagcaacctgtggaaagccgctgagcaacctgtggaaagccgctgagcggttatcctctcggggcataaagacaaagaaggcaataaggagactttgctcctcagaggccacccgtggcttcccatgggtgtctcacacaggggagaccaactcaactggcacctagaactctctttcccacaaaagctaggctggttctgattcttaacctgctccagcagtgacacactcagtcccacagggagtggacgacccccaggaagaagatgatgttttggaggaaactccccaaagccctcttcattgggctgactctggccattgctgtcaatctccttctggtattttctagcaaggggactttacaaaacctg

SEQ ID NO: 8802 - DNA, 2300 bp, Homo sapien
ggcgtggggaaaggaaagagagatcagattgttactgtgtctgtgtagaaagaactagacataggagactccattttgttctgtactaagaaaaattcttctgccttgagatgctgttaatctgtaaccgtacccccaaccccgtgctccctgaaacatgtgctgtgtcgactcagggttaaatggattaagggctatgcaagatgtgctttgttaaacagatgcttgaaggcagcatgctcgttaagagtcatcaccactccctaatctcaagtacccagggacacaaaacactgcggaaggccacagggacctctgcctaggaaagccaggtattgtccaaggtttctccccatgtgaccatctgaaatatggcctcgtgggaagggaaagacctgactgtcccccagcccgacacccgtaaagggtctgtgctgaggaggattagtaaaagaggaaggaacgcctttctgcagttgagacaagaggaaggcatctgtctcctgcccgtccctgggcaatggaatgtctcggtgtaaaacccgattgtatattccatctactgagataggagaaaaccgccttagggctggaggtgggacatgcgggcagcaatactgctgtttaaggcattgagatgtttatgtgtatgcatatctaaagcacagcacttaattctttaccttgtctatgatgcagagacctttgttcacgtgtttatctgctgaccttctctccactattatcctatgaccctgacacatccccctctccgagaaacacccaagaatgatcaataaatactaagggaactcagaggctggcgggatcctccgtatgctgaacgctggtcccctgggcccccttatttctctctacatactttgtttctgtgtctttttctcttccaaagtctctcgttccacctaacgagaaacacccacaggtgtggaggtgcaacccaccccttcaataggcctaaggacaggtctatggcccttgggattcttattcttctcgttgcctgcacatatgtagatataatgataatgcatgtgcacaagcccacacacgcatacacacacacatgctcacctcccccatactgcttgctctaatttccacttctactcacttcattctcaatacccatctcccatttgaaggcacagaattcagtgtcagatgcttcaatgagcgactgagatgaaaatgtgacctctcacccatttttccttccatatccctttttcctaagtgccccaaacacacacacccacacacacaccttccaggttagcattgtaaacttactcagatcctgcaattccacctccaagtgggagagtctctttatcactgccccgtagcgtttattcagatgtaaaggaagctccctgtggagaccacccgtaaacaggttttgtaaagtccccttgctagaaaataccagaaggagattgacagcaatggccagagtcagcccaatgaagagggctttggggagtttcctccaaaacatcatcttcttcctgggggtcgtccactccctgtgggactgagtgtgtcactgctggagcaggttaagaatcagaaccagcctagcttttgtgggaaagagagttctaggtgccagttgagttggtctcccctgtgtgagacacccatgggaagccacgggtggcctctgaggagcaaagtctccttattgccttctttgtctttatgccccgagaggataaccgctcagcggctttccacaggttgctcagcggctttccacaggttgctcagggagataacactcccttgaagcagaggagtataatcaaacatcttggctcctcctgaaacccactcccacccatttcagtcattaaagatcttaagtagtttagacacacgcctttgctcaaggaaattcacagaaaccgccactgttacacatcttatcgaatgactcactgattaatccttttcctcatcccttcctccccttcccatctgccctaagaacaaagagcttgtaaaccaataaattgggtggagcccagagctctgggccgtgagcaagcctccaacgctctggtcccctggacctgccttttaaacgcttgttctgtctctttctaactcctttgtctccgccggactcggggtatccgctgggtggtgtggggctggtttccccaacagctttctctccacccagcttcatagatgacaccctgcctgctaggccagatgttctccggccaagaacactattatagctgcctggcttctccctgagcagcgtc

SEQ ID NO: 8803 - DNA, 2300 bp, Homo sapien
caacttttgtgtggagtctaaatggcttaattacatagtctgtaagtgagaaaactccgctggatgactccatgtacttgctttctctcccttcacggaaacatgcaaggtgagagaaaggagtggaaatgagacaggcaagcatgagatgggcaagctggctgctttcctgttgtgatgtggtttggagaaaaaagaacaaaagccctttactcaagctgtaactcccagccagtcagcatcaaaggcccaagaagctattaaccacaaattaattaaccccttgctttagagaactaaggacctttctgaggccctacgtgcctagctaggcttaactttcacctcatcatgaacttttccttattttagtactaaaaatcatgcccacaggtggagatttaagatgctaatgagacatatgttgtatgaagcagcatcttaagccaccgtacatgtgcccgaaaaacctcacctctacatgccctgacttccccttactgcagacctccacaaagggaacccacaccttgactttggagagcaacccacttcctttcttggtgtttggtcccttatgtccataagctttcataaaatctttctctttgctactgtatgctgtgatctcttttgatttctatcctgggggatcaaaaaagcccacagggcgttggtgccagaaatcagctgtgcaagcacagaaagggagcagaggctgttgcctggctcaactggtgaggagcaagactggagaatgagcatgcagtgagttctaatactagcacatttcttacccactcaacacctgatcccttcccgacacatccaggagccttggttctctccttcctccaactctctgagagtgaatgctgctgagaaccactgtggttttaaaatactccgtgcaatacaaagaactctcagatgcatcctgtggtttgagagcacctttatgtgtcattctcatcattaacctcaatgaatgcatactaatgatctaatatgcaccagaagctacacaaaaacactttgtagttgttagccaattcattttggctacagccagccagaaaagaggaaactgaggcacagagaagcaaatgtcaaccctacctggaagtgtcagtctgaaaagatcagttgagtcttcctctaccagaccccaacttgtctggtctcgtgaagaaagacagaaatggatggaaaaccattcttatcaccttcttgctggagagttagggaagagtcagctggtccctaacaacaaactttgccctactccagtactgccaaaggggtctttgttgtaacatggcctacaaggagaggacatctttctgggaaagcacctagaatgtggctggcacatattcaatgcccagtaaatgtagctattattttttcaatcaacactcttacataccccttttccactcaccctcttctccctttttttggtcacccaataagcagaaattccagatgcatccttcggggtggttgggagcaaaggatccccagggtgcactgtgccctgggctgaggtatctctgaggtgcttccatcttctgggtccttcctcactggggttgttgcctcaggctctcaggactcccctggaaatcttctgatgggaaaggcattgattgacttgccaccctttctctaccatccctttgcaattctgggagagttgcagccccgccctcccaggcttgcaaaggtagacggagaattatattggaatttaaatcggaagctctcaaggcatctcaaaaatactttctctattttttttttcctgtagatattggagaggttggcaaacgggtcttcctgaagacagaagaatgtatgatttaatgttttctttagatttctgtatgagtggatgcacagtgctccgtattgtgtggtggggcggggtgtgtcttcttattgatgaaatacactgcgcaggtcaactcggtaaattgaaatgagaagagccgactgcgggggtggagggggtgtggtattagggtgccggcgcttgtggaggggggcgcgaatgtgaacgtgtgaaagcgagaggcgtgccaggagagcgcgggaaagcttactggtgaggcaagtgtgcgtctatttccatggcgccctggctcgcggcagcccctggctgggcgaggggtgtgatgtgggagtggggtgggagggggcagcaggcggggcctgccacgtcacttggagagtgtgtgttgggaaggaagggcagagcggagagccgagccgctgcagctgcggcggcggcagcg

SEQ ID NO: 8804 - DNA, 2300 bp, Homo sapien
aaactttaccacttggaggacacggggttagtccaggaccaaagaggccaatggatttttcaaagtgtgccccagcacaagaggcactggtgttcggtctacatttagttctccccactctgatcccctgactctccagcttccaggaaggttccttctcagagccaaatactctttgtgcaagtgccttcctgagcagaagaactggagaaagggaaccacagagccaggaggaatgtctgagcagagtcaagcaactggcttgaccacagtctgaagcaaggtgccacttaaacagatactgttttctcaaaggggcagaggaatcgtgttgcagatggcagccttttctccttcattttccccacattttctctggccctctaccttgcttcctgggagtttgatttaggattgctgttgaaggcttcctcaggcaaactccagcttaaagccctagacaggtaaaagcacacattggatggcagcatgggtttcttcccattttatgggcatgaaatatgtggtttagaataaggaacaagcattattcctttgccaacagcctcactctaagaggcttttttgctgagtcaagcaaacacttgcctgctctgccccttggagctgcatttgacctgctctcactggtaaggtgacttggtggcgttcccacttgatttagccattttcttccattgtgagaccactgccatctatccacctgcccacctccccttttgtttctcagtaacattgccatttgttttttgcctttgataaactgtgatgtactgttctgagatcttttgggtgcagttctgaaactgaaaggactgttaacatgtttttaattttatatctatgctttcagactctttgatgataattttttttttaaaaattattctctcgaagagcaacttacgagaggacagccttatgagggtttgcttgagaggcagtgtggcttctgtgactgccagctctaaatctcgatcttgccataactttacagggtaacttgggtccacagtcactctttgtgcctcagtttacccacccattaaatgggaacattactgtcttcccctccctacctcatggggaatgtctgggaagctggggacattgctatgcaaatgtgtgaatcttagtcatggatttgatttttagttatccccatacccccataggcaaggccttcccccagagttcctgctttggatccaaagcctgagaataggccattatggaccattggctccctaaatccctccttggcctcttggactgagcccctcagcctttcttcttacccttcagaaaggagagttctctttagatatgttcagggggatccttccatggctggaggtcaccttgactgggggcttggcttctccaaacctgaaacacagtagaagatagagatgtttatgatgcaaaaacctgctctgaggtcagaaagtgctagttttccaaatctctcccattgctgctggctatctggggaaagaagagaaaagcccattccagaggcagaagggaagctcccagccgagggtaaaagttgagacctgtatgcatgtatctctgtatatgtgtatgtaatcaccctcatcaccatccctgagaaaacattttcttttcaagtcagagcacgcctgaaagggtttgtggagagcccagctcaccagggactctggttgccgtagcaaccttccagactgttctctctatcttctgctttgggcatcaagggagaccaggggactacatcttcccagcttctcaaatgggagcacctcccacatcgtggcttaggggctgggagtgccagggcacggatgtgggacttttggaaaatgtggaggaagcagggcctcaaagcttcctgtctggacttttcttcctagtttccccacccagtcattgaagctgcctcatcttactcctgattcttcagaaatttgaatgttaagcaaccagttaaaccaacgtcagtattaattttttcaagctgtcgaggggagcccttagaggggacaacttcttggagtggcggccaagctgggccttaccaggtgtgatcatagtcttaggtatcatggagttcccatctccgcagaggcaggctcttcccagctccacgagaggcggagaattgcaacttcttcctctctgggaacggcctatctagctcctgggaggaatctcaaagatctttcttcttaagacatcgaagaaaaactgagaggctgtagctcgacctagtttctgtgaagaattttgtcaag

SEQ ID NO: 8805 - DNA, 2300 bp, Homo sapien
aatcggatcgtaagaaaacttcaagtcccatcgtaggttaaagagggacaggctcttagtaccgccgccgcccagtaaaactacatggaacaaacccagggatcctcatctgcacagctctgcccaaagtctgcagctctgcgagtccagccggcgggggaagctgggtgggccccgcagagagcaagggccttcttgggggaggagcgggatggggcgcagagcagtgcgatcgaagagggttactgtgggactgcacaaaagcaaacccgtcggaggagttttgccagaaacaccaccgcctgcattgcgtcggacctgaccatttccaatgtgaaattcccggggaaggtcgcgagccgctaggggccgttcgtgggcggggcggcgggccacaggggaagtagagttagcggtcggcttttctggtaggagaggaaaaagctgtgctggcaagggtgggaactgaatgacaaccccgctctcttccaaaccaccccctcatattttccatccacctcctcgctcctgccctcccccgccctccccaacccacgcccgggtgggccaatcgctgctcggtattccaggcgctttctcaggtttctgctgatcttgcagcgcccagaaatggaccgagcggacccgccgccgcacgcaccctgctccactccaagctcctaagggctcctggcgcgccgcgtagccttggcgaggtccgcgctggggtgcggagagcgaagggaactggagagccatgtagatccaggctctcgcccgcccgcctccttcgggatcgaatcaagggctcccatagtgttaggagggggcgagagtgctgtttatcgtcatttgcctcggagcttcgagagagggtggtattttgcttttccgccccgcatcctccggaactccctgcaccggagagaggacggcgtctccaggttgctggcaaccggtgagaatgggggtagggaaggaacattttcgccgtagctgctccgtaaagcgattgtccaactgagaggggcgtcggacgagtggaccagggcggcgagtttgcccggcgcgtctcggatgctgctgcggcggccgccgcggctcccgccagggcactgcaaagacgacctgccgcattcccactcgggctctccgctgactcagcaccgcccctgcgccaagccagccggccaggtagggggttccccagctcggggatgcagaagcgggggttggggggaccgggtgggggaggccgggggtgcggggatgctgtccgggaccctgagcttcccccggcgtctctcggcgcttttccgatctctagtttaacgaagttgtaaacagatcggctgttgggcattggggaaagtgggatggaagagccccaaacttggatttccgggtgtctgcgtgtcgtctgtccgtgtgtgtgtgatagccctagcaaacgtccagtgctttctcaagctagaggtctgtgttcttcggtgtctgtaggtccgtcccatctgaatgcttctgattttctacccccgtatcactttctatttctctgcagcgtgcatcgatcgccctggtgggagcttagaaggcggcaggcgaagaggggtaggaggggggagagccgaggagaagcagagagggtggcaggcgtggggatctgccgagccggcactgcaccgggtcctaggaaggctctcggaggggaggggaggccagggcgacccccgaagcaatggcccagtccgctagaacggcactgcgttaaggcacctgggatcaggaagaaatatctaaacaacaacaacagaaaaccaacaaacccccaaacccaaacccaaccctctgcaaaaagctgcacccggcccgcaggcgagggggattccaaactgagtgaaaggcagggtggaggggaaggcagcgagaggcaaagtcgcagatctcccgacctgctcgtgttgaagcacctccccctgggcgtgagggagacgcgcgctccggtgggggggccgcttgggtcccccccacccctggtccctggctgcttcccaccccgggctctctcctggcctcccacccccgcgcccggcttccaccatgacggtgatgtctggggagaacgtggacgaggcttcggccgccccgggccacccccaggatggcagctacccccggcaggccgaccacgacgaccacgagtgctgcgagcgcgtggtgatcaacatctccgggctgcgcttcgagacgcagctcaagaccctggcgcagttccccaacacgctgctgggcaaccctaa

SEQ ID NO: 8806 - DNA, 2300 bp, Homo sapien
agttgggcgaggaggccatggagaagttccgggaggacgagggcttcatcaaggaggaggagcgccctctgcccgagaaggagtaccagcgccaggtgtggctgctcttcgagtaccccgagagctcggggcccgccagggtcatcgccatcgtctccgtcatggtcatcctcatctccatcgtcatcttttgcctggagacgctccccgagctgaaggatgacaaggacttcacgggcaccgtccaccgcatcgacaacaccacggtcatctacaattccaacatcttcacagaccccttcttcatcgtggaaacgctgtgtatcatctggttctccttcgagctggtggtgcgcttcttcgcctgccccagcaagacggacttcttcaaaaacatcatgaacttcatagacattgtggccatcattccttatttcatcacgctgggcaccgagatagctgagcaggaaggaaaccagaagggcgagcaggccacctccctggccatcctcagggtcatccgcttggtaagggtttttagaatcttcaagctctcccgccactctaagggcctccagatcctgggccagaccctcaaagctagtatgagagagctagggctgctcatctttttcctcttcatcggggtcatcctgttttctagtgcagtgtactttgccgaggcggaagaagctgagtcgcacttctccagtatccccgatgctttctggtgggcggtggtgtccatgaccactgtaggatacggtgacatgtaccctgtgacaattggaggcaagatcgtgggctccttgtgtgccatcgctggtgtgctaacaattgccctgcccgtacctgtcattgtgtccaatttcaactatttctaccaccgagaaactgagggggaagagcaggctcagttgctccacgtcagttcccctaacttagcctctgacagtgacctcagtcgccgcagttcctctactatgagcaagtctgagtacatggagatcgaagaggatatgaataatagcatagcccattatagacaggtcaatatcagaactgccaattgcaccactgctaaccaaaactgcgttaataagagcaagctactgaccgatgtttaaaaaacaaaggcaagcaaacaaaaaagccccacttagcagctcaaaagacttaaaaaacaaaacagaaaacctagtgactcatgtcacgctttgtagatactttactaagtagacttggaatgctctatttaactgtcaatgcgttgttgcattgaggattttgggggtggtgaaccagaagctttcaagatccatgacaaaataaactattttccttttattaaaaaatgggaaaagagagagtattttctaaaactggcttaaaaagattcagtccacgaactagtctaggtaaaataataatcatatgcttccccaaactgaaacatttttaatgctttggtttctttaacttttttaaaaactcagaacaagatgatcacttagaaatatgaaattgaaattcgcatgggactccagtaaaacatctttgcaaactgcgtagcacattgaagacagtgcatcagatgtattatatgtaacatgatagaccagccaaaatggacaatgaatagatatttttatttcgatcaactgaactgcatattacaaggtgaaaaaagaaaactccgattacttaagactggttcacaaagcaccttataaattggatactggtcctgatctgtagggatttccccctgggcccattctctttctaatccagattattctctaagaaaaagttaactgaattaaattaattgattcttctgcagtgccgctaaatggtctcaactgcagatgagccaaatacaggtcttttctcaccaggcctgcactccgacccctggctttcagaactggatgtaaaaccttagcctccttattgcaagagagcacaaatgaagttaaatgtaagcatgtttgaatctgatacaatttattttataatcgcatgctgagaagttaacccagacaataggggataagcttaagttgaaatcgattcttctaaaaatagatcctttttcatttgcattcaccaaaagtgcactcctccatttattaactattttattagtaaataaagtactgtatttaagtgcatatgttagtcagatgggaacaataactttttggagctcaaagcatgttctcttattcagcattatggcctatttgactaagatgtaccttgaattaattaatgcatgatttcagtaataaaaa

SEQ ID NO: 8807 - DNA, 2300 bp, Homo sapien
cccagaaagcccctgaaagacaagctccagagaattctttcctctggggagcccgaggagaacccaggtgaaccaatgtagcatccttatatttacaagatgcatgaatcagtagacaagactgtcatgggtctctgacctcactgtctgcaagctcagtaagtcccaggctccccaggaaaaatacctgatcctgactggcaacctcagagccagagaagaatgaaagcccactggagatgaagcagggatggcacagatatggggaaaggggatgcaaggccctgtggttaaccagtgatgccttcacatactgattttcatgttcatacccttcctcactcatgcacgtctgcaaagacagccaacaatatgcacagtcacacagaatgaaaatacttacgcacaccaaattcacatccaccttcacatataaactcttaaaaagccatatgcacacatacttctcaaaccttgacccaagtttgtgtgtctatgcgctgctattgcaacacacacttgtgcacccaggaccaagtttccaaatcacaccctttggatagagacattcattgacaagaggtcctaacttcacgcatataaatctgaagcaatatgcagaaacaaaaatagacaatgaaaacagacattcaaaaacacagccactttatgataatttaaaaccaagaaacttctggagactgtgtctggcagttccagacacacaccttgaaacagattcctcttggttaccaatgcctgctaaaaccctgcaggggttgagacagggcaggggaagatttcctagtgtcccaacctagaaagattaatatgttatatcagccatcatcctgccttctgcagcagggaactaaagttctcaggccagatgttggagtgagggagtgcttgtatcaggaaaagggattatgcatttctatagaggagtgaaatataggggacaagggccaaactctgattgtttgagtttgagttccagcatcatcagtttccacctgcataagcctgggtgagtctgtcaatctctctgtgcctcagtttcttcatttataaaatggtgatgataatagtacttacaaaataggttgctgtaggaatacacagagacaatatttgtaaagtgctgagagtgggctggtgcataatgagagccaagtaagtattggttgttattattccattcttgggaatgctccagccttggagattggacaacctccctggctccctctcataagccacctccaccctcagtctccttcatggacctagatgcagttgctcggtccaagattcaccaggcaggattagccctcaccaggattgtaaaaatcgcttctccccttccctgctgtggtttttgcaaatgggattcgttggagcgggtggaggggttctgctgggttgagaccagacagctcatctcctgactaggctgcttgcctgggctgccaccaggtctgtactggaaacaggctagggcatgggaatcctgcagggttccaacccccttgtacatttttgtggatctgtaggaagacgggaagagagatgcttctccattgatacatgtatttcaaggtccgtaactacgtggcccccctcccttctgtaatccttcccaaagaaataccgttatttctccaaaataaaaaggactggtgtctcccgtctctgtctctcatactccgactcagctcaaagcctcgtccctttagcccaaggcacttcgttcctcctggagtccactcggcttccagcgggttcccaggtgaactgaaatccagagctattctcatctggttgccctgggaatttcagcgctgtcggtacaacctgttcctccatcctccccactccttccctccctccgctgggctgcacccttctcagcccctcctttcccttgctaggggccccagctgcgccctccggggagacacccgctgccacgagacccgggaggggaagcgggaggagggggagaggaggggaaggcgggggaggcgccgagggtggaggccaagcgcggcgcagccagagaggggcggctgaaggttgcatctgctggaaggaggcttttcggctgcttggtaacgggctgccagaagagagagaggcagagagcagggcagcggcttcttgacgtcagggccaagcgaggggatcgcgccagcaaccccagctctccccagagaggggccggccgaccgctggagcggagcctgacgccaggcgcccgcggagcgtgagtagggggcgcgggagccggtcagctg

SEQ ID NO: 8808 - DNA, 2300 bp, Homo sapien
taatatattattttgcaatctataaatgcctctcacaagattttcttcaattcactcatcaaaacaagctatgaaataagcagaaccccaatccagaagaaggaggactgaaccaatttcagtgatttgcttgagatctccagctggcttcttttagaggccggcttgaaatccagaagagctgaccctctctacctacccgggctccttgcactctagccctgacccactccccaccccaagctgtgggctgccaggagctgttggtgatgggtgctctgtctaaacccctgctcctccttgccttgctaattatccccaaagctccccgcccagaggaattcagaacatgctgcagttatttgtggagcactttgtctctgggagatggggggcttacacagctcggaaaaagcagcacttgcccacacagacaacactgcctagggctattaatatccaagcacaatagcttcaggacgaggtgaagtgtggctcaccctggccacagggcttctcagccatggagactgttttattttacagcagccctgcaaatactgcagcaatcagactcttgccccaccttctgatccagtgtaaacagcagaagaaagggggagggccttgcatgaaactgcaattgcctgtcctcacggtgtgtcctgggagataaggacaaatggagacttgaagtctcaaaataatatttgattagtgaccccccaacccccgctttttctaaagcatcccaagcattctacatttgttgtctttctcagtcttaaagttatctttgtgcatagggaaagggtcaacacttttatacttattcactcacaaaacttgtattgattatctactatgtgtctaaagcacctgggctctggtgatactaagacaaggatgatagagtgcattccctcaagcttgtagcgtgatggagaaagacagttcatacactgttatatcacagtgtgattattgctgaaataaagctaagcataagaggctatgacagcacaaaagaaggagtgaaaactcagtttcgaagggacaaagtcaaggagacttcaaagatgagaaatgattgcactgggccttagagaggaagttcagcagaacaaggtgggaagggcacgatatcagaggtaagggtatgtgcaaaagcagggaaatattgacccgtctggaggccaagagagggaatccaggtaatttccagagagagagagaggggaagtgtggtagagaagagagaagatggacaggaaagaacagacttgcaagtcattgaatgtcttggggcctcagtttctgaagacaggattctcatgagcccctctgagtgtttttgcactgggtgatagtgacaactacatgtctcgctgtgtgcccaggcctcatagccatgcactccaaaggctctgtgaggggcttcaggttctcctgaagtctagagcactttaagaactagtgtgtctcaaggcagagaatgctttgcttgaagatgtgtgtggctcaatgatggccaaggcagacatgagagaatgaagataatgaaaacccaccagctgtgactaatgaaaccaagcccactctcatctgctttgggagcatgaaggctgggaaggaccctctgactggcacatcagcctgcagggttcccttgcttatttgtaaaatttgggaatctgctgacagactgacgtattattagtgcaaattacccaggttcatctgtagccctagctctttgcttcaaaaaagatcacaaagcctgaggtacttcaagattgaactgtgaaatgtcattagctaaaactcagtcctcacagctcccagaactaattatagagctaggagtggctggggccagacccctctgatataaaaagattttatgaaaggcgaaaggggggaggcaacaataattctcaccctattatattcctttcaattatttacagtaagaggcactgatggtgaacaaatatagagactggaatccagtgacgtcacacaggcgctctggaagccagtgatgcagtatcagaatctgggaacacaatgaggcaatgtttcagctgcttgtgcattcttcacctcccattgtctctgtctctctctttctcctctgcttcccctcaccccacaaccaaagtcaagagcgcagaccccatggtaaggattctcatcttcatcccacagccaggacttggcaatatcttttatcaagggttttaacaggacattcgcagtctttctcctaaccacacggttgggggcgggggtgcaat

SEQ ID NO: 8809 - DNA, 2300 bp, Homo sapien
agcgttctttttgtcctctggcttctcaaattactcctctctgtccctcctccccttcatcctcctccttttcctccttcttctccttctgttcttcttctttttaacttttttttcttttttctgcctttgagaacacatcttctccagggatttgacctaatcattcttcttttctctactccatcttccctcttttctctccaaacttgttcttgacaatctcagccagcttcacagctccagctataacctttatttgaggactcccaaatttgaatctgtaatctttcatttgcagagaaaatgctgcaactgtgcatcctcacccaggtatcctaatggaccagcacctgcaaggtttccaaactgaatttctgatcttccctacaaaatcaactacttttcttctgtttctcaatagaccaccttactttttatttcacaacatggaaacttccaagtcatcttgaactgtgccttctcccttggcttgataaatgatcaattataaacttatctgtaattgattacccaatttaatatctataatagaaaactctcctctccgtcccaactttgatttttgcagctcaggtatttgtcatattccgggccagtgaaatagccttatacctgttttttctccctcacttccaccattttatgtgtgtctgtctgtgagtgtgggtgaagtactgctgtaatcagattcaacccccatgcagccacagtaatacaccaaatacagcctgctatctgacaccaacatagctttccaaatataatttccactgcttctcatcatatgctttttctcaacttcattcatcccatactgatatggtttggatctgtgtcttcaccaaattctcatgttcagttgtaatccccagtgtttggaggtgaggtctggtaggagatgattggatcatggaggtggtctctaatggtttaacaccatgcctcttggtgctgtcatcatgatagtgagctctcatgagatctggttttttgcaagtgtgtggcacctgccaccacgtctgctttgaccatgtaagacttgcctgctttcccttcaccttccgccatgattgaaagcttcctgaggcctccctagaagccactatgcttactgtacagcctgaagaaccatgagcaaataaacctcttgtctttattcaggtatttctttatagcactgcaagaacagactagcacatatgtgatttacttcttttagtatttgacctataattcccatttgctaagtcgttcatgcagtttcatttgccaataatccctactacttcccacttcctcgtgcctgaatcctacctattctttaggctcaaaaaaatgccatctcaagactctacaaagcctttcatgagctcttgagctgaaagttctctctccatgctttcaaatcctctgtcattgtatatgtatatcttaaggcactaactttttccttcctattgtagtaatcaggatacataatttatcttgtgaattaaacctgtcttgttcacctgcgggtccttcagatgataggttctcagtaaacatatttgaagtgagtaaacactatttttagttgttgagtgcatgaataaatacatacgtattagatgtttgagtgttccatataatctatcctctcaccaccatggcggctacacactccacatccacgttccagcctccattactttggacagaattggcaatgaaaagtgaagaaaacaagaaggcaagaaaactcaggcttatgtcaatatattcctttcttgaaaaatacgtaaaacagaaaagaaaaggttaagtttaaatggaactttgatgggtaagaaaaggattgtgaacgttttttgctgcaggaaagatatttttgctcctttaaaaatattaagaatcttattgaaaggggtcaagtgtaccttgtttgagtgtccaacaataggggctttctattcacagcacatttcatacttgctctattgcaacccaactgtttttcagtgaagccatgtgccttgattatattatcactgccttttgaagactctcctgaggctttttttgagagcaaaacccctttcagtttcattccaacatgcaggagaaaaggtaagtgatgtgaattccacgttggggtcattaatatcacgtgctgcactgagtgggacttcacatcccactcagggacttcccttggctgtgtggacagagggctgcacccctgcctgacaatctccagccccagagaccatacaggcaggtcccaatcctcctcc

SEQ ID NO: 8810 - DNA, 2300 bp, Homo sapien
cctttgaccagggcgagaagctggaggaggggggcaagtgcgggaagtgggggagggcagggaggcgggccagatgagagggagaaaagcagaacccgacagagcacgcccaatccaaaccttcatggtgctgtgtggctgggtggagggaacgactcggcagcctcttctggccctgaggaagacgtcgatattttggcacgaggggagccactgaaggactaccctacccttgcgagggaccgcaggaggtgacgcccctgggcctcggtgggcgcttctggcggttttcgatgtggcaacccccatcagccaggataatgatgaggcaggtacaatctatctagtacgcagcccccagactcccccctcccttcccacctccccatccaaccccccagctactctctgcggccggttggtcctgaactggtgggtgcagttccgatgtttaaccaaattctcaagcaatttcaaggtatttggattttttgaacctgggccctaaccgaaacgcggaacggcttgcttattagacacctcgaacgacagggcagggaggaaacgggatactcgctgcccttcccagtcgcgcgtgagtcaaaaggtcctggcaggagatgatgtgaggagcggctgaagtggcagggaggaagggatgaggggcttggagcggaggtccaccacgcaaggactcgggaagcgggcaagtgggcaaaactctgcttccgggctctcgatttctcgttgatcactaagtggtatttttcccccttctctcgatggcaaatgggcgaaatcaagatgacttaacttggtaaatttagagagaacggctcggagcaagtgaggtctaacgggcagctaaaattatctccaaataagagattttgaccccctccccctatcctctcctcgaatgtatccaccggtggggaagtgagcgtcattactttcggggcgccacgaacaggtttgtttgttgctcgcctttcctgcttctcgcgctgtccccgcgtgcagactggtgggtgctgggcgagtgattagctgcagggccccatcctagtttggaaggaaggggtttagaagttggaggatgggtgaaatgggaggctgcgatccatctccctctcccttccacactcaagctcccgcaaacacgcgcgcgcacacacagcccctccctagtccctcggaccacccgcccccacgcccctctaccttgacctcccttgaccgccgacacagcgtcctgggtgcgggtccccgggagcggggagttcgccggggagcgattgtccttgggcgtgttcgtgctgtggggtggggggaggagtggcgggtgggcttggtagggggtggggagagatctggagctggaagggtctaaggtttggaggaggagtttacgcctcagacctgatcctcctgaggaaaaaggcaggaaaaggccctgatgccttgtaaagaaaatcttgaaagaaaaaagatcaaaaagaaaaatttcaagaaaaagaaccactaagaaaggctgaagacactaacatgtaacctgttacgatacatttaacgtttcgttttttcctggatctctaaaagggaactcaagggtgggggttactgaagaatactacagatttggaagtttttgttgctgttgttgtttggtttggttttgtttttcaagaggggccaggagaaatgaccccttccccgccacgggtcccgaagtgagggcggggggggggctctggggcgcgggcgcgcgcggcgcggcgcgggccggcgggggagggcggcgcggcgcggaaggggttaaggcgctgagcgcggagccatctggccgggttggctggttataaccgcgcagattctgttcacgggactcagagttgaagctcctctcccttccgaacagctccgcgcaccgccccgcgacgcagcccggcgcaactactttcttctctctcctttctttcttcctctcctttttcccctgctgggtagtggctgcggcggggtgggggagactttgaatgaccgagctcgcgtccacctttctcttcatgtcgacgtccctggaaacggccacacggatgccatggttacttttgccacggtaaggggaggcggcgggcaccttgggtgggcaggtttggggatgggggtccacgtggggagggattttccagtggactggtgcggggggccccagatccgcatcccgccccacccccatcgcgccgcgctcactcactttcccgggcttgtgtcttccccaaagtttgcgctgggat

SEQ ID NO: 8811 - DNA, 2300 bp, Homo sapien
cctgtgttatgctggggtaacaatgcctgcctgaggatgttgtcgtgaagatgaaatgtgaaaccttccagaaaaaccctttgctcagggattgacccgggcagagtccctacctgccttccttggcagccactatcattgcttggtggcctgacaccacccacctctttctctggcccaggatgagcaaagatttgttgaattccatggagaaaactgttccaggaagggtcatagttctggtaccagccccttgtcatttttccaggcttagaaaaatgtgagtctgagaaaatgagctagtattcacatgaatcattctgggatgggggtgaaaaggcaagggtgagggaaaacccaaggcttctctatgggtctgagaaagaggcatgaaatcacgtcaggcattaacattttgtagtttaaaccatgcagacagatcaggaagatgattagcaaaacagaatactgatcaactgtgatgcttaatgaccctcccatcccaaattcactcagcctccagcttggtctggatcagccttctttttggttcaagaatgcagccatgaagcaaggccagcccctctagtggccgtagtcctgaagcatctggaaggggaagaagcccaagactgcctgctggtgtctgcatcttccccaacccccccggctgcagagcaccattcagggtgtctgggtctcccctacccacacagaggccacaggctagtgggaggcccaggtggacccactggcctggactaccctcagatgccctgggctcctttgggagttgatgcctgacaccaaagtaagctttgggagctattggagagggtagtagaaatgtctttttaggacatttctaggctgacattggctttcttggactttagtcctttttggaaatttgttggttaggccatagattccccccacttccccctgcttctcaagtcaatgccaagggcatgcgtgcctgatgctccagccagccctcgaggtttcacccagagaatgaccacccttttctccatgcgctcctgatcttaacaccacatttctctttgggcaggtttaaggattaccgagagccgccatgggccccgaacccttatgagttttcgaaacagtactggtttattctgtccgcccgtctggcttttgtcataatcttccaggtgagttgctgggatagggaatagcccattcgaatccgggctgcaggagtaaggacactgcactcattgcttgcacctacctccaggttccggtggtactctgtgacataagaaagcttcatgtgtggcaggcagaagtgagggctcctttccgggttgaagcaggaggactcttgagagggctttctttaatgggtggactttgcagacagaggataaaacacagtgtaaggttacaagacagatgtggaataagttgcagggtggagatagattcctgtttaaacctaaggcaaagaaaggaaaagggccattgaaaccagagtcccagcctggggcagacaaacagccccatctcatctctgcagccatgaaagagctcaggtttggaacctttcttcttgcactctgggctccctcctttgttagtgttgttttagccactgagacatctggtgagaagggcccccagagccatcgagccatccctgaatgaatagcaaactcgagcccagtgattcctatctgggacaatagccacagctccaattgcatcgctgagattctctgagctcgagggcccccaattcccactctgggtgcccccggtcttcaagcagggctggagaacgagcccagatccttttctctttggctccctcaggcttttgtattccctgaaggcagatctctggggggctctaaagtatcctgcccccagaccccagcccagaaagtggagaagcccatcggctagtctttcacctaaagaagacagccattcttcctctggagagatggaggcgatatgtttgaatgatcgctcagacatcccctgctgccccacccccaggagtctcctcactttcccgtatgtcacatgtcacatttcactcacacaggaaggagtggattcagaggaagagtgtgtgacttggtgaagcagctcccaagcacccaagatgcccaggagcctctggaagcagcagttggtccccagtgtcttcccctgaacccctaggaacatgtagggttcaagggctcagtcccagtctcagaggggaaaaggcatgtgagcgtgcaactggcagccagggaagtgtatcacaatgggaggag

SEQ ID NO: 8812 - DNA, 2300 bp, Homo sapien
cccctagtccgtctcccaatcccaaccccaaatacacacacacgtacacacacacacacacacacattcactcactcctcaataccctcacctccccagcctcatcaatactttcatcactggtcttcactgcaaaagtgatttttggggaaaagaatctcacaccacattttctaggcccttactatctggcagtgacaatcccagagaaatgggaagtgaaaatgtctacattgttggagaggggtgatgtcatgtccaggttttcccagttacacgatagtagtccctacttagtcctggaggctggtgtttctgccgctccccacccccaccctgcagcagaagaggggcctcacacagagtgtttttcccatctaacctctcctctccccacacccacacacacccaaacacacacagccttcctctacccagagaacgccacctttctcccttccttaccaagggcttctttttcacaacacggcccatagggcaattactggtattttttgaagcctaccaggataaagagctgagtctgccaccagcacaccccaggtaccccccagaggtctgaaaacatccatacctggacacatctgccacccattagcaagccactggagtgtcattcacactgcttgcaaagcactgcccaagccagaggcccccacttcccctcccctttcctcctgtgcctctcctcccctcctcttaccccctccttcctgcctccctccctgtgcatgcgtgtgtgtgtgtgtgtgtgtgtgtgtgtgtgtgtgtgtgtgtgtagtccagcacagcttattttttcagggagccttccacctgctgttttctctccctacgttttctatttagtccttcatagccagtgcccattctctgtcctgcggaggaaataggacctgaacagcttcctttacagaaagagtcctaagaaggaagtcttctttcttgaagaagtcttgacttgactgaagcaaattagaatttgctctgagtggggcatgcacctagcagttgtctctccttcttctatcccctctaagaggctttactcagggcacttgcttctcatagcatccttgtgcttcctggaaatgatccttccttggttgcgatggggacaggaggggacgtggggacagaagaaggaagaggggctgttgggcagatctaggtctaagagagtcccttcttattcttaggttctagagagaggaaatgaggggaacccttagaggtcacgtggctataaccctccttttggagcacagcagctagacatttctctaccaaatgaggaatctgagtcctccatttcaagtcacctagtagagaaatcttacagtgatattttgttcatcttgaggactgagattcctaaaatctcactcctgatgtattccctcttttctcctttgagcaaccttcttgcctctacttatcaagctgtaactcatcccttctcagctcaggtaccttcaatggctttctatttcttctcatgaaaactccattttaaatcccactgtctccacaaactattccctgaccactcaaatttactttctcccgtgtacttggagttccttcagcaattatactcctcatttagcacttaataccttcttgggcattatttactatggtttatttaaaaggagttcatgttatctctttagaagatcaaaagctccctaatgaaagaaattgcgtcatgtgtgttgaacactccacagggtccagcatgttcatccttattgtgtgtgtgtgtgtgtgtgtgtgtgtgtgataaatcatttggaatctgacaaaaattaagacattctcccctggaaaatgcacctccactcagaactctgcctaaaaatttgttacccacccaaatattccagactaataatatctggaatcccttgttacccaacaaaagattccagattaataatatctgataacagcaaatggtactgttggcagagcaaatagtaggtgctcggtaattgccggctgatgtgtacttctctctgttttcccaaacagattgccctgacattctcaatcgtctttggggtgatagtgtatcgaataacaactgcagccgctctgtctctcaataaggctacacgctccaatgtccgggtgacagtgacagcaacagcagtcatcatcaacctcgtggtcatcctcatcctggacgagatctacggcgctgtggccaagtggctcaccaaaattggtactgtgtcaccgagacttctggctgtcctaggccctctttaagt

SEQ ID NO: 8813 - DNA, 2300 bp, Homo sapien
acctgggctccacacatggccctcgctcagctgtgtggcctcaaacaagccccttggtggttctcagactcagtttcctcatctggaaaacaggagtgttgttctcactcataaggtggtaaggataaacaacctcagcctaaaatagggcctgcaagtccttaggtaactgtaaattgctctgtaatcatgtaagaagtggcgagaataacaatggggagatcaaggctttcggtagggaataagagactctaatgttaacagcagagcattagagatttcctttgtggtgagggctggaccggctgggtttctatcaggctttatgcttgatgccaaggtcctacatactccagacatccttcagtggaagaggaagtggtgtagataacaccaaacatcatccagtccccaaatcactaactggtactgtcacttgcagttagagatggtccttccttaaaatgtatggaagaattttcatgtacatgctggcaagatggtggggactcttgctggggagaatacccatgagaaagaaggggatgtcctggattacaagaatttgatgaagaattgattttcattccaaatacttttgacacaggagagactcagctcattgaaagtactggataatggaatcaaaagggacttagacatcatctagtccactgtccctcctccactcctttacaagtgatgaaagcagctcagagaattcaagtgacttgccaaaggtcataactgctgggtggcagggccaggttcagaacccaggtgacttgacacctgcataagaactcccaggccaccccatcagagccacaccatccctgttgcttacactcctcccgtgctgacatggggaccagtgactgctgcacccttaagttcccaccacttctgttactgcctgagcttaaccttaagagaagccacattacaggaaaatggcatagattatgctgagtaggcttggtggggagtttagtggggcagaaggaaggaagaatggatagaagttttatgtaactactcagtaattcaaaggttactgtctctccatccatcaccccactcccaactttgggtagcctctaaggtctctcttggtaggaaaccagatccagggacagggaattaactgtcactcttctgactgatcgcctaacactctagctggggacaaggtgttattggaggcatcagctctggagaaattcagcaggaaggctaggctaccactgcagcataggtggttgattttccaactgcctgtgtcttgctagcttgaacttctcatgtttactgatatgtcattttaccgtcaagaaaaaagctgaatcggaaaactgcatgttttgattattttaaaaaaacccaaaacgatggaagagagctgggtaaaaaggatgcaagaagagaaacttgtggggctagtgtgtgcggagcggtgtctcggcagtcttcttttatttacaggtattccaaaggcactatctgtacctggtttcagggaccctcttttttactcaccctcagaccaggcaagacagagtgccccaaagtggatgttttaaggggagtctcaaggaaggagtatatagacactaagaaactgctggagggaaagaagaaagggaatgaatgaaagagcaatggtgaccatttttcaatcgtttggggattgaaaagacatgataacggtccctggaagtagacagggagaaaggggttgttagggacagaaaggagcagaatagcagagtgttatgccacagactccagggcaggctgcctgctttggaatcctaggatcctcttagaggcaagttacttgccatttaacactgcagttctctcatctgtaaaatgggcacactgcagtgattgcctcatatacttattgttaggattaaaataactaccatagggaaagcactgagaagggtgttgggtggagaggaagtcctgtagaagcattagctggtagtacttgcagtggatggaataaaggcctgggttgggacatcacatcttgtggttttccttctgctctgccctcgactgtggtgtcacttactcccctttgcttccccaggctccttctctataaagtgggatctatcatgaccagcctaccttatcaatataggagagaaaatcttcatgcctgaaggtcagtgatcacaaatggcatacttgaccttaacatagtacttcttcattttgggggtccatggtattaatgaacttgttttacttctgtgcatcttggagttgcagattccatcgtg

SEQ ID NO: 8814 - DNA, 2300 bp, Homo sapien
tcccagcactttgggagaccgaggtgggcagatcacgaggtcaggagtttgagaccagcctggctaacatagtggaaccccatctctactaaaaatacaaaaaattagctgggtgtagtggtgtgtgcatgtaatcccagctacttgggaggctgaggcaggagaattgcttgaagccgggaggcagaggttgcagtgagccatgattgcatcactgcactccagcccagcggacagtgcgagactccatctcaaaaaaaaaaaaagaaagaaaagaatattctaaaaaaagacttaattccccccgccaccccaccccaaaacaagtggagacaggcaaacttccttatcttctaggttgggggatggatttttttcctggtccactgtttggaagatgtttcccttcaaactttcagcttttgcagggatctccgttctagttctccctctgggtcaggcccgtagctgcactgcccattcttgtaatgtgcggcctccagtctggagggttcccagactggcctacgctaggccacccatgggcctaccctgcctcatgctcatttaggctcctcttcctcattgaccctttaagatattccttactttcctcccagatcaactgtggatttaaagaacatttgttgtatttagcacagcatttaaagatattttgtaatgaaagggttttcagattagttatttagtttttttaaataagagctggaagtggaaatcccgatggccttttcttttcttttcttttttttcttgagacggagtcttgctctgtcacccaggctggagtgcagtggctcgatctcagctcactgcaagctccgcctcccgggttcacgccattctcctgcctcagcctcccgagtagctgggactacaggcgcccgccaccacgcctggctaattttttgtgtttttagtagagacggggtttcactatgttagccaggatggtcttgatcccttgacctcgtgatccgcccacctcggcctcccaaagtgctgggattacaggcgtgaaccaccgtgcccggccccccaatggccttttctactgtctcatgctgattctgcctctggtgccatttttcttccttgggagtgtgcatcttcctctcctggggcggtaaagggagtagcagagtgcgaggtatgtgggaagggaggaggttggaacctagtggtttctcaaagtcttagggcaggaggtatcatggagaagcagtgaggaggtcttccatacccagacatgcctcagggtgcttgtctcagtgcctggaatcccagcacgagagtcatcttccccccaccgctgcccattgcatcagttacttattttagtaggaattagtttagcagatggtgttgagaattaggcttttgggaatgggaggctgggaagaagaattgtgtgtgtgtgtgtgtgtgtgtgtgtgtgtgtgtgtgtgtaagatcagggtaccagaagtgggtggaaatgtccttgagaattagaattattagaatgtagcaacagtagaagtattagactcaaaccatcactccccaccttcaccattttacaaaggcttaggcttgtggccaagaccttcatctttagccgatccattcaaccctggccaggatccaaatggactgtttttgtcagggccaggaccggatccttcatacctggggtgcataggaagtgttagtactccccttcctccaaacacagcagcaaaattggctcaggttgaggtgtttttctcaacttccctggagtccagccctggaagctggatcaggaagctgtgttgttctactgtgattccccctggcctgtatcagcttgccctgaaacaaccagcattcctggttatcccacacaggtggggcactctaggaagaccagggatcaagtgtgggggtgtagggatagggggtgtttggggagggcaaggcagttaattaaggcagctgccaggaggtctccctccaaactctacaaagctttatcagcttggaggtacttctaataccatttcctttcattgtttccttttggtaattaaaaggaggccaatcccctgttgtggcagctcacagctattgtggtgggaaagggagggtggttggtggatgtcacagcttgggctttatctcccccagcagtggggactccacagcccctgggctacataacagcaagacagtccggagctgtagcagacctgattgagcctttgcagcagctgagagcatggcctagggtgggcggcaccattgtccagcagctg

SEQ ID NO: 8815 - DNA, 2300 bp, Homo sapien
aactatataggctgaccccaattctttcttcagtgtaaacaataataggaataggagcaacaggcagcgtttctgcagcgcttctgtggcaggcaggttctaaggcctccctgtggatttcctctgtcaacactcacgtttaccctaataagtaatttctattataaacttaaatatttactgaactcctcccaccagtacttgttaacttgggagaagggggagatgcaataaaatctttcttttcctaagacctgtctcccaagatagatggacgcaggcccaaaagggcacaatggaacactgactgttttccggcctccttcccaccctccagggtgcttcacactcctcccctgtgctggaatcatcctggacactggttaggatgtgtaaagtcaagcatcaccaaaattcctctgcttgtcctcttggcattaggctcagtttaggccctgcctctccttccttgtcctccttcctccccatgtaccactatcggttgtttccccagtgcagccagctgcccgcttctgtgtctttgcatatccagttccctcttggaattccctcctccgcattgactactgactccaccttcccaagtcaagtcagctgctgcaatgtcccctgctctggggagcctctcggactcagattgacgtggggatgtgccctgtgcccctacttgttactagcttctgctgctctgcctctgatctctccctccccttcccggcctgacacctcatggggttttgccctgccttctctaggctttatcccattgccccgccttcattcattcttctctcacctgaactactccacagcctcctagcagatttgcacctggtcctcagctcaactttcatctaccactgctcccctcatattacctgattgcgtctccccaaatacaacatctccatgttccatgcaatcccgtaaagcactgagccaaggactggagatgccaacaatggtcctggtcctcaaggggcttcctacctgcccctccggccttcccccacccaactacctaaaacacaggcagagaacctctgaaaacacagcagatccaaccattcccctgcttgaacctttcggtggcccctaatgctcagagtgcaaagtccaggagcacaaggctctttctcaccttcccacaaactaccccgtgactccaggctccagcccagagcccggacagcccctgccccagcctttgcccaggattctcccttggcggcaactttccctgtggttctgcagcatcatctcccagtctgggtcagaggcctctccttagcctcttagcccccaagcctctccccgtaactgcacctatcaccctcaaaccattgtctggctgcctgtctcctcccacactggtccctgagcagaaacaaggactaatccatgtttttcagctcctacccctaatgaaataccctaatagatactgaaaaatgtttttgaaccaatgagacaagtctactgataataaacaggcaaataacagcaatgtgctaacagtggctgtttctggtgagcagaattttgaggtctgttcctttcacttcttggtatttcggttgtttctgtaatgactgtatcttgcttttgtaatcataaaggacagtaaaggaaacttcattttgaaaataatacaaagggattcggggacttcaaaagaaggtgactctcctcgtccactccagagaatcaggaaaggagtgtttaaagacccacagaattcctacaagtgacgttgggggggggccagccagccagggcgcatgccggccagcgagtggggtgggctctgggtccgggagaagtcagatcagtgctctgtacagggccttgagggcaagacgaggaatttcgacttaggtccttgaatctggagagctacagaaagtttgtgagctcaggagaagcgctccgagctcggcatctggagcagttcaaggcagcagcgagcaagtccaaagacgcaggagggagggtggggtggaggagtagagagaaaacagaagccgtctacagaccctttttccctctggggcaactaaacctcaagtgcaggaagcgcttggggactgcccagccctcagctgtgttattattcggtgataggtatttgctaattacttccaaaagcctcccatctgtcatcccacccagactgcgcgcttctaattcctcctaccccacatgctgtgcccaatgaaaagtatggtcagcgagcgaaggtttgcaaggagacagacgagggcgaaattaagccaggc

SEQ ID NO: 8816 - DNA, 2300 bp, Homo sapien
gactggcgggacctggcgctggatacagatgcaggcggctgtaggctggtctccggctgcacttttaaaaagtgccactccttagggcgcgcgacccgctgcggtgcgcatgtgccgggaaaagccgcccccactccccccgccggccacgcctcccgccccaccggccccgcccgggccgcaccccccccgccccccgcccccgcccaggtcggcgagccccggccccagctgccccgcggagcccgaccctctccctgtttccccgcctagtcgccctaacccccacccgccacccactccttcttcaagccgtcttggggtctttgcaggcagccactccctgccacttttaccgcggacttacgtggaggcctcgcccttccggttcccccgcgtttggtctgggcgccggaccgggcgttctgctttgggagactcttccccgggtcgtcagggctaaaggccccttggccaaggcctgctgccagagtgaggggcccttctgctttgcgaggatttaaagggaagccgcctggcttaatttcgccctcgtctgtctccttgcaaaccttcgctcgctgaccatacttttcattgggcacagcatgtggggtaggaggaattagaagcgcgcagtctgggtgggatgacagatgggaggcttttggaagtaattagcaaatacctatcaccgaataataacacagctgagggctgggcagtccccaagcgcttcctgcacttgaggtttagttgccccagagggaaaaagggtctgtagacggcttctgttttctctctactcctccaccccaccctccctcctgcgtctttggacttgctcgctgctgccttgaactgctccagatgccgagctcggagcgcttctcctgagctcacaaactttctgtagctctccagattcaaggacctaagtcgaaattcctcgtcttgccctcaaggccctgtacagagcactgatctgacttctcccggacccagagcccaccccactcgctggccggcatgcgccctggctggctggcccccccccaacgtcacttgtaggaattctgtgggtctttaaacactcctttcctgattctctggagtggacgaggagagtcaccttcttttgaagtccccgaatccctttgtattattttcaaaatgaagtttcctttactgtcctttatgattacaaaagcaagatacagtcattacagaaacaaccgaaataccaagaagtgaaaggaacagacctcaaaattctgctcaccagaaacagccactgttagcacattgctgttatttgcctgtttattatcagtagacttgtctcattggttcaaaaacatttttcagtatctattagggtatttcattaggggtaggagctgaaaaacatggattagtccttgtttctgctcagggaccagtgtgggaggagacaggcagccagacaatggtttgagggtgataggtgcagttacggggagaggcttgggggctaagaggctaaggagaggcctctgacccagactgggagatgatgctgcagaaccacagggaaagttgccgccaagggagaatcctgggcaaaggctggggcaggggctgtccgggctctgggctggagcctggagtcacggggtagtttgtgggaaggtgagaaagagccttgtgctcctggactttgcactctgagcattaggggccaccgaaaggttcaagcaggggaatggttggatctgctgtgttttcagaggttctctgcctgtgttttaggtagttgggtgggggaaggccggaggggcaggtaggaagccccttgaggaccaggaccattgttggcatctccagtccttggctcagtgctttacgggattgcatggaacatggagatgttgtatttggggagacgcaatcaggtaatatgaggggagcagtggtagatgaaagttgagctgaggaccaggtgcaaatctgctaggaggctgtggagtagttcaggtgagagaagaatgaatgaaggcggggcaatgggataaagcctagagaaggcagggcaaaaccccatgaggtgtcaggccgggaaggggagggagagatcagaggcagagcagcagaagctagtaacaagtaggggcacagggcacatccccacgtcaatctgagtccgagaggctccccagagcaggggacattgcagcagctgacttgacttgggaaggtggagtcagtagtcaatgcggaggagggaattccaagagggaactggatatgcaaagacacag

SEQ ID NO: 8817 - DNA, 2300 bp, Homo sapien
ccctacttgttactagcttctgctgctctgcctctgatctctccctccccttcccggcctgacacctcatggggttttgccctgccttctctaggctttatcccattgccccgccttcattcattcttctctcacctgaactactccacagcctcctagcagatttgcacctggtcctcagctcaactttcatctaccactgctcccctcatattacctgattgcgtctccccaaatacaacatctccatgttccatgcaatcccgtaaagcactgagccaaggactggagatgccaacaatggtcctggtcctcaaggggcttcctacctgcccctccggccttcccccacccaactacctaaaacacaggcagagaacctctgaaaacacagcagatccaaccattcccctgcttgaacctttcggtggcccctaatgctcagagtgcaaagtccaggagcacaaggctctttctcaccttcccacaaactaccccgtgactccaggctccagcccagagcccggacagcccctgccccagcctttgcccaggattctcccttggcggcaactttccctgtggttctgcagcatcatctcccagtctgggtcagaggcctctccttagcctcttagcccccaagcctctccccgtaactgcacctatcaccctcaaaccattgtctggctgcctgtctcctcccacactggtccctgagcagaaacaaggactaatccatgtttttcagctcctacccctaatgaaataccctaatagatactgaaaaatgtttttgaaccaatgagacaagtctactgataataaacaggcaaataacagcaatgtgctaacagtggctgtttctggtgagcagaattttgaggtctgttcctttcacttcttggtatttcggttgtttctgtaatgactgtatcttgcttttgtaatcataaaggacagtaaaggaaacttcattttgaaaataatacaaagggattcggggacttcaaaagaaggtgactctcctcgtccactccagagaatcaggaaaggagtgtttaaagacccacagaattcctacaagtgacgttgggggggggccagccagccagggcgcatgccggccagcgagtggggtgggctctgggtccgggagaagtcagatcagtgctctgtacagggccttgagggcaagacgaggaatttcgacttaggtccttgaatctggagagctacagaaagtttgtgagctcaggagaagcgctccgagctcggcatctggagcagttcaaggcagcagcgagcaagtccaaagacgcaggagggagggtggggtggaggagtagagagaaaacagaagccgtctacagaccctttttccctctggggcaactaaacctcaagtgcaggaagcgcttggggactgcccagccctcagctgtgttattattcggtgataggtatttgctaattacttccaaaagcctcccatctgtcatcccacccagactgcgcgcttctaattcctcctaccccacatgctgtgcccaatgaaaagtatggtcagcgagcgaaggtttgcaaggagacagacgagggcgaaattaagccaggcggcttccctttaaatcctcgcaaagcagaagggcccctcactctggcagcaggccttggccaaggggcctttagccctgacgacccggggaagagtctcccaaagcagaacgcccggtccggcgcccagaccaaacgcgggggaaccggaagggcgaggcctccacgtaagtccgcggtaaaagtggcagggagtggctgcctgcaaagaccccaagacggcttgaagaaggagtgggtggcgggtgggggttagggcgactaggcggggaaacagggagagggtcgggctccgcggggcagctggggccggggctcgccgacctgggcgggggcggggggcggggggggtgcggcccgggcggggccggtggggcgggaggcgtggccggcggggggagtgggggcggcttttcccggcacatgcgcaccgcagcgggtcgcgcgccctaaggagtggcactttttaaaagtgcagccggagaccagcctacagccgcctgcatctgtatccagcgccaggtcccgccagtcccagctgcgcgcgccccccagtcccgcacccgttcggcccaggctaagttagccctcaccatgccggtcaaaggaggcaccaagtgcatcaaatacctgctgttcggatttaacttcatcttctgggtgagtgagcgcgactgccgcgc

SEQ ID NO: 8818 - DNA, 2300 bp, Homo sapien
cacacctgtgcccggccacacctctggcttctagactccagcttgccctgggaacctctcctcccagggaggctgaagacaggccctggggcagtagtgggtggagactggacctcaacgcctagagggaagtgaaagggttaaccaccccgccacccaccaccacctgccactgggcccctctagccagctcaccccagagcactgtaagcccaggcttgtctttggtgctctctcaatttcatcttccctcttattcctccttcccactccttctgggagacactgggaggagaagctaggggccattggcaccagctgtctctggggtgtcatttaatactgtccgtaatcaccacctcctctcctggcttattaactctttccctcatggctactcttgtcatccctggacatctctctatctctgtctagctctcaccacacacacacacacacacacacacacacacacacacacacacacacacacacacagtgaatgggaagagggaagggctaggaactaggcacactctggtttcttgccactgcagttcctttcccacctgacttcacccccgaaaactagtcccaccaccagctgggccaggagcaggagacaggctggttcaaggagctggaggaacagaggacacttctgaaccagcagagcaatcacacaacagcaagctcagagaaagagaatcccagagggcagatttgaggatggacacagggaatacaaaattagaaactgcccaaagatatagattcctcctccaaacaaaatagagtcaccagagtccgagtgaggactagaacactctgatcatgtatgcgtttcatagcctagatgggaaaagggaatagaggccttttcccctggcaactcaaggagattctgcttctgaaagtgtttcctgaacttcaggatgctctgaagaagtaaggagccgtatcaatcactgttgagttcattggcaggaaatagaccacagtcagggtgaggggctgggagcctcagacctgccacctgccaactacagggtcttgggtttcatggttgtgagattataatgaccacacatccacaggacacttctatctcaaatatccagtgcttctgtcagacgaggtgccatgatttggagaagtgaaaaggtggggaaaccgaagcaggaggatcgcttgaacccaggagttggagtccatcctgggccacacagcaagatattgtctctattttctttttaaaaaataaattttaaaaataaagaaaataaagtatggtcctttcatgcaatgcccagcatgtgtcagtccttccacagcatctttttctttttctttctttttttttttttttttttttgagatggagtttcactctgttgcccaggctggagtgcagtagtgctgtcttggctcactgcaacctccacctcccaggttcaagcgattctcccgcctcagcctcccaagtagctgggactacaggcgcccgtcaccatgcccagctaatttttgtatttttagtagagtcggggtttcaccatattggccaggctggtctccatctcccgaccttgtgatccgcccgcctcggcctcccaaagtgttgggattacaggcgtgagccatcgcgcctggccccacagcatctattttagcagccaccgcaagggctgggtgaccctggtgtagccgggagtgggcttatttgcaggtgaactgggagggtgcccccacctgagtcttaggtcataggagaagtgcgggtcaggcctcagctgcctatccctggagcaaaggcaaagtccaggatagccttccagtatcaccttccaccaggcaggccagccggtcctctgagagataaggctcacactttggactccacacagcgacggggccccctgcccctccagctggcaggcgggctccctgcctgcttaggggtctaggccgaggcagggggaggaccggacggccggccactcgccgcgaccagcaggagagaggggtgcctgccacaggttgtcaccctcgccgcctcccccggcggcgccccgccccttactcagccctcattactgcagcgcctcgcgggggtctggcccggagtggagggcgcgcggtcccagccctcccgctcggccggcgggtgtcgagttcaggtgcgaccgaaaaggggaaaggagggcaccgccacgtgagctgtcctctccggggaaggcggtggctgcgtgagggcgggggctgctcggtccccagggccccgcccctctgcccctctg

SEQ ID NO: 8819 - DNA, 2300 bp, Homo sapien
gggccattggcaccagctgtctctggggtgtcatttaatactgtccgtaatcaccacctcctctcctggcttattaactctttccctcatggctactcttgtcatccctggacatctctctatctctgtctagctctcaccacacacacacacacacacacacacacacacacacacacacacacacacacacacagtgaatgggaagagggaagggctaggaactaggcacactctggtttcttgccactgcagttcctttcccacctgacttcacccccgaaaactagtcccaccaccagctgggccaggagcaggagacaggctggttcaaggagctggaggaacagaggacacttctgaaccagcagagcaatcacacaacagcaagctcagagaaagagaatcccagagggcagatttgaggatggacacagggaatacaaaattagaaactgcccaaagatatagattcctcctccaaacaaaatagagtcaccagagtccgagtgaggactagaacactctgatcatgtatgcgtttcatagcctagatgggaaaagggaatagaggccttttcccctggcaactcaaggagattctgcttctgaaagtgtttcctgaacttcaggatgctctgaagaagtaaggagccgtatcaatcactgttgagttcattggcaggaaatagaccacagtcagggtgaggggctgggagcctcagacctgccacctgccaactacagggtcttgggtttcatggttgtgagattataatgaccacacatccacaggacacttctatctcaaatatccagtgcttctgtcagacgaggtgccatgatttggagaagtgaaaaggtggggaaaccgaagcaggaggatcgcttgaacccaggagttggagtccatcctgggccacacagcaagatattgtctctattttctttttaaaaaataaattttaaaaataaagaaaataaagtatggtcctttcatgcaatgcccagcatgtgtcagtccttccacagcatctttttctttttctttctttttttttttttttttttttgagatggagtttcactctgttgcccaggctggagtgcagtagtgctgtcttggctcactgcaacctccacctcccaggttcaagcgattctcccgcctcagcctcccaagtagctgggactacaggcgcccgtcaccatgcccagctaatttttgtatttttagtagagtcggggtttcaccatattggccaggctggtctccatctcccgaccttgtgatccgcccgcctcggcctcccaaagtgttgggattacaggcgtgagccatcgcgcctggccccacagcatctattttagcagccaccgcaagggctgggtgaccctggtgtagccgggagtgggcttatttgcaggtgaactgggagggtgcccccacctgagtcttaggtcataggagaagtgcgggtcaggcctcagctgcctatccctggagcaaaggcaaagtccaggatagccttccagtatcaccttccaccaggcaggccagccggtcctctgagagataaggctcacactttggactccacacagcgacggggccccctgcccctccagctggcaggcgggctccctgcctgcttaggggtctaggccgaggcagggggaggaccggacggccggccactcgccgcgaccagcaggagagaggggtgcctgccacaggttgtcaccctcgccgcctcccccggcggcgccccgccccttactcagccctcattactgcagcgcctcgcgggggtctggcccggagtggagggcgcgcggtcccagccctcccgctcggccggcgggtgtcgagttcaggtgcgaccgaaaaggggaaaggagggcaccgccacgtgagctgtcctctccggggaaggcggtggctgcgtgagggcgggggctgctcggtccccagggccccgcccctctgcccctctgccccgagcggtgctggcggtagggaggggccagcccggtccccgccctcctcgcccggacccgcgctgcccggctcccgcgggccgctcgatcccagtcccaggctgggcatcggggctggctggcatcgccggggagccgacggcgacggggagccccgcgggcggggagggcggcgcagggcagcgggtgcggtgacacctgtgggcacaggtgagcggcgggagggctacgcggcccgggggcggggcggccgggacccggggcctggaagccggggcgaaggggaaggaaggcctggc

SEQ ID NO: 8820 - DNA, 2300 bp, Homo sapien
agtgaatgggaagagggaagggctaggaactaggcacactctggtttcttgccactgcagttcctttcccacctgacttcacccccgaaaactagtcccaccaccagctgggccaggagcaggagacaggctggttcaaggagctggaggaacagaggacacttctgaaccagcagagcaatcacacaacagcaagctcagagaaagagaatcccagagggcagatttgaggatggacacagggaatacaaaattagaaactgcccaaagatatagattcctcctccaaacaaaatagagtcaccagagtccgagtgaggactagaacactctgatcatgtatgcgtttcatagcctagatgggaaaagggaatagaggccttttcccctggcaactcaaggagattctgcttctgaaagtgtttcctgaacttcaggatgctctgaagaagtaaggagccgtatcaatcactgttgagttcattggcaggaaatagaccacagtcagggtgaggggctgggagcctcagacctgccacctgccaactacagggtcttgggtttcatggttgtgagattataatgaccacacatccacaggacacttctatctcaaatatccagtgcttctgtcagacgaggtgccatgatttggagaagtgaaaaggtggggaaaccgaagcaggaggatcgcttgaacccaggagttggagtccatcctgggccacacagcaagatattgtctctattttctttttaaaaaataaattttaaaaataaagaaaataaagtatggtcctttcatgcaatgcccagcatgtgtcagtccttccacagcatctttttctttttctttctttttttttttttttttttttgagatggagtttcactctgttgcccaggctggagtgcagtagtgctgtcttggctcactgcaacctccacctcccaggttcaagcgattctcccgcctcagcctcccaagtagctgggactacaggcgcccgtcaccatgcccagctaatttttgtatttttagtagagtcggggtttcaccatattggccaggctggtctccatctcccgaccttgtgatccgcccgcctcggcctcccaaagtgttgggattacaggcgtgagccatcgcgcctggccccacagcatctattttagcagccaccgcaagggctgggtgaccctggtgtagccgggagtgggcttatttgcaggtgaactgggagggtgcccccacctgagtcttaggtcataggagaagtgcgggtcaggcctcagctgcctatccctggagcaaaggcaaagtccaggatagccttccagtatcaccttccaccaggcaggccagccggtcctctgagagataaggctcacactttggactccacacagcgacggggccccctgcccctccagctggcaggcgggctccctgcctgcttaggggtctaggccgaggcagggggaggaccggacggccggccactcgccgcgaccagcaggagagaggggtgcctgccacaggttgtcaccctcgccgcctcccccggcggcgccccgccccttactcagccctcattactgcagcgcctcgcgggggtctggcccggagtggagggcgcgcggtcccagccctcccgctcggccggcgggtgtcgagttcaggtgcgaccgaaaaggggaaaggagggcaccgccacgtgagctgtcctctccggggaaggcggtggctgcgtgagggcgggggctgctcggtccccagggccccgcccctctgcccctctgccccgagcggtgctggcggtagggaggggccagcccggtccccgccctcctcgcccggacccgcgctgcccggctcccgcgggccgctcgatcccagtcccaggctgggcatcggggctggctggcatcgccggggagccgacggcgacggggagccccgcgggcggggagggcggcgcagggcagcgggtgcggtgacacctgtgggcacaggtgagcggcgggagggctacgcggcccgggggcggggcggccgggacccggggcctggaagccggggcgaaggggaaggaaggcctggcctcccgaaggcgggaggaggggagccgggggctgggctgagacaggaccctgggtagggagcagtgcgagggagacagcgccctcagagggaggactattgggaggcggcaggagggacagcgaacgtttcctcctctgctcctgaatcggaggaaggtaagggagggctgaggcaggacctcaggcccacccgg

SEQ ID NO: 8821 - DNA, 2300 bp, Homo sapien
gtgagctgtcctctccggggaaggcggtggctgcgtgagggcgggggctgctcggtccccagggccccgcccctctgcccctctgccccgagcggtgctggcggtagggaggggccagcccggtccccgccctcctcgcccggacccgcgctgcccggctcccgcgggccgctcgatcccagtcccaggctgggcatcggggctggctggcatcgccggggagccgacggcgacggggagccccgcgggcggggagggcggcgcagggcagcgggtgcggtgacacctgtgggcacaggtgagcggcgggagggctacgcggcccgggggcggggcggccgggacccggggcctggaagccggggcgaaggggaaggaaggcctggcctcccgaaggcgggaggaggggagccgggggctgggctgagacaggaccctgggtagggagcagtgcgagggagacagcgccctcagagggaggactattgggaggcggcaggagggacagcgaacgtttcctcctctgctcctgaatcggaggaaggtaagggagggctgaggcaggacctcaggcccacccggtcggggcacaaacacctgcgcagccttcttgagcccaccgccccttaggaggcctctcctcttccaggccctgcccactcgagggcgggccctccctccaggtttaggggggagggatggagccccacgcctggcccccagctccatggtggtattcccagagtctggggaggaccaaatatatagcccgaaactggagaaactctaattctatttggctggtctctaagggcagtggccggacagctggccccactcacctccctgtctgtggtcaggagggttcaggtaggagatgggcaagcctttcagtaaaggccagacagtaaagattagagacttcgcggcctacaccgtctgtcccaactagcaagaagcagtcacaggttattaggagaccagcagaagaggatggattccaacaaaactgtgtttatggacactgaatttgaatatcatgtaatatttacttgtcccaaaatattggtggcttttttgcagggggggcagcagttgtttcaactatgtaaatatgtaaaggcttacaggctgtacaaaaactggtggcagactgggctgtctccagccacccccactcccagcccaccccacccaccatggcctccctccagctttttcccaagctttatatggggaaggggatggggttatatctaggtgcaaggagaaccctcccacctgggtgtatccagaaagcccgagacctgtctgtgacccttgttcccatttgagaccagtgcaggagcttgtaccccaaatatgcacacatgtgagagaggaggtacatctccaaggggcttcctacccaatatgtacctggacctaccctactcccaccaagtcatagatgaggcagccatgttccccccaacaagtgaccaagcccttggccctctcctcccccactataccctccctcccaggccccctaccagccttggtctcccgcctggtgccattcactgattggggatggcccttccattcctcttttctctcttgcagccctaggggacctctttctcctggacattgaagatatggccctttggaggtgacccaggagagaagggatgaaggcctttggtcctccacatgagggccccctccaaggactcgtggcctcccgcattgagacttatgggggccggcatcgagcctctgctcagagcactgctggcagactctatccccgaggataccctgtgctggtgagtccaggctgtgccccaaaagtgacctggtggggcaggagggaagacacctaggctgtggagtctctgtccccttacaggttcagaggttgagctattcctgccccttaccctactcttctttcctgggttgcgggaaagaggagggcagtgacagggccaggctccagggatatcacaccccagtcccagcagctgggcaggagaggcggagccaggagaagccaggccctccgaggagtgctgttagacaggtctcagacaaagagctgcgggtaaggtcatcaaaccccagagctggcgcctcccaggctcccgcctctgcttggcaggagtttgaggccttcctgagatctgcctctccctgagtcaggatgaagatgagcaaaggttcagggtgtccctactcctccagtggtgggtagggacaggagggtgcctgccttggctccacccctggctccacctgcctggctctcctcc

SEQ ID NO: 8822 - DNA, 2300 bp, Homo sapien
gcccgagaacagcaagaaactaaccctctcttccatgccttcgtgcaggtgggagaaggggtgctggggagggggacgggtgcatcttagccggccggtctccagctgagcctgaggctgagttcaccactaggcagggcaggagggagcaaaccctgagccccacccaccttccctgcagtggtgtgagaagcacaagcgctctgggaggcagatgctctgtgacttgcttatcaagccccaccagcgcatcaccaagtacccactgctgctccatgctgtgctcaagaggagccccgaggcacgagcccaagaggccctgaatgccatggtaggtgccccagtggggctgggactctggtgaatcggggactgggaggggggtctctttcttagtgtgtctgtgacagtgtggcgctgtgctgtggctggcattggttgggaggggacggctgagccgtccctcctcccacacccccaaccccacctagattgaagccgtggagtcattcctgcgacacatcaatgggcaggtccgccagggcgaagagcaagagagcttggcggctgcagcacaacgcatcgggccctacgaggtgctggagccacccagtgatgaggtggagaaggtgagagggcaaagggaagggacccaggaaaagcaaggtcccagggatactggtgaaggggagggctgcaaggccagaacaccccgtacttgggtgctacaagggtgtccatcattcctacctggtggtgacagtccaaggggtacaggtcagaagagcaaaaaggaggccctgggaggctttctctagcccatgggggaaggatacaaacagaaaggtgttggtggcagaaccaggagccgcccttggccaggaagtccaggcagactgccgagcgccctgacccctcccctctgtgtccctcagaacctgcgcccattctccaccctggacctgacgtcccccatgctgggggttgcatctgagcacaccagacagctgctgctggaggggcctgtgcgagtgaaggagggacgagaagggaaggtgagggtgctgcggacagagtggaggggatggggcacggtgggagaaggtaagaggcagaaacgccggaagtgggagaagaggggtttggggaagaggatgtggttctggctaagccccagtcatttgtgtgaccctgagccagccactttgcctgcctgtaaagtgagagatgtgaccaaagcgacgcccctggccactcccgcatttgggctctgcgtgtgtccctgtgtgcctgcgcaccatgcctgagcctcctcccggaccagccctgcccctggctccagctgaccctgtctctttcccctacgcccccacccccagctggacgtgtacctgttcctcttctctgatgtgctccttgtgaccaagccccagcgcaaggcggacaaagccaaggtcatccgaccccctctcatgctggagaagctcgtgtgccaacccctgcgagaccccagtacgtccttccttcagggagtcttttcttctccctcttctcagcgaggggaaggaggagctgggacggagatcaaataaaggctggcctcttgaaggttgtctcctccatccagacagcttcctgctgatccacctcactgaattccagtgtgtctccagcgccctccttgtgcactgtcccagtcctacagaccgtgcccagtggctggagaagacccagcaggcccaggtatgggaaagccagcaacggggaggcatgggcaggggtccccggagctcagaaatgggagcacagtggtggatcacacctgtaatctcagcactttgggaggctgaggcaggtggatcacctgaggtcaggagtttgagaccagcctggccaacatggtgaaaccccgtctctactaaaaatacaaaaattagccgggcgtggtggtgtgtgcctgtagtccccattacttgggaggctgaggcaggagaatcacttgagcccgggaagtggaggttgcagtgacctgagatcgtgccactgcactctagcctgggtgacagagtgagaccctgaagaagaaggaaaaaaaaaagaatgtaggaaggaaggaaggaacgaatgaacatgggagcgcagaggggaggaggagagaggctggggtggattcagtttcagactggacaatctgatgtgccccagagagggaggcagagcctccaccatccatcagaagacagaaaaagcctttggccagctactgtgccagccactgggagagcccaagatacagcatc

SEQ ID NO: 8823 - DNA, 2300 bp, Homo sapien
ctcctcttttttttggtttttagtcacagaacaacagccagactctcaccttctccctttcagaatcccaagagctactgaaaattacgggtattttactatgcaaaacaactcagtcccctggtagtctcactccaggctaacaggaaagatctgtcaagatctataaccaagatatgcaccaaggctccctggccttccttagcaaaacaaagaaaactgaaactttgaaatgacttttcctgctattgtctcacaccagattattagggaatcctctctagagccatcagtctttatacactgaagagggcagtagaaactctgttggtccctttcatagagcaatccccagggggcagactattgttttctcaccctggcagaaacgttgacttgcagatttattcctagcgggtctagctgtgatgactcacacttttagagaaagtaagcttctccagggagaagagactgaatcttggggaatgcccagggactgagaagaggaaaaggaacagagacaggaacagaaagagccgtcagagatggcgaccaagaaattaaagcagggagactgaaggaggcagccgaggctaagagccagggtctgaaggagaggcccgagcagctgtcagggagttacttcacctcttggggagttgcagtgcacgcaggacagacagtccgcaagtggccaggcacaaggcccagcactgtatgggcactccataaatgtttgccgttgtcatcattagaagaaaggggtggtctttggggcctgggtagggcctgctgctgactggggaaacgcatccgcatctgttgctcaggaagtcagtgggcacgtttcagagttcggttttagtccggcactggggagttctgggaggagagtgggtgaatctaggagccaccccagagacagcagggaaaggaggcatttcctctccatgggtacaaaggaagaagaatcctgctaggggccctcccttcctcttctcagttttgtaggggggtcacattctggcttaagcgccaatttccttttcctttcccgtcccctctgcccccatgtgtctctcctcttaaccaagccgagaaaattctcccagggttgctggagaggctttgggctcgctgggaggcacctccaagagccccatcccgcccattcccccgaccccctaccccgtactcggggctccccctcgcccccctcccccccccgccgcctcctccagcctcttcctggggtcgggcaaggggcaagtttagcagagatgatggcattgaacgtcccttacagaaaccctgcttccttccagttcttctttcccgtaacatcccttccttggcacccgaaacacaaacctgaatttgggtcctgtggggcaaaagggcaccccagcaggacaagcagatcggcccagcgcctccaccctctcttttctcacttcttccctcccttcacatggagttgggagatgaggcctgggaaagagggagtcctgccccaggtcccggccctggcaggtttcctacccccaggtaccctcccctgctccggccaacagaccacatcttatgagaatgctgtcagccttgggaataagtgactggagagccagaaaaagcagaatgggaactataagcctggtgtcattttcctatccctgttcatccatttcgtctcttgtcctgacccagctgctccccgggtttcttgagaggctttgggaaagtccaggtgcccaggagttgctggctcatatacttcaagctggggagatagtggaaatatttaacaattagtatagcatgggcatcaaccaatcagaaaggagcgctgcactagaggtcctctgctgtgccagaggttatctcccttagttgctagatcatggggatgggggaagtggttgaggcccaggcagcagccattcccttaccagcatggaagacttcaatattttaacaaggatatggccataccagcaagtcctgatatcagtgctgcccacagcagccaccagtacctcccttttgccaaggcttgcctccgcctccaacctcagctctgccaccttctcttccctctccctccccctccccctccccaagccaacaaccgaccttctgtaactctttacccttcaaggctgtccttgaaagtgttgcagtgactgaactaggactcaaagagcaaggccctgtcccagctctgcttctccatacctgtggcaccttgagcaagtcacttcacctctctaggtctaggtttcttgtctgtaaaatgg

SEQ ID NO: 8824 - DNA, 2300 bp, Homo sapien
tcagggtctcactcttcttcttctgcctcctcctgcctccttagtcccacccgctcttcccttcttcccactgtccttcccccacggtctccccaccagccagctgccctgacatcctgcttctgttttctgtttgggggcggcccctggctccctcacatacctcctgcatgaacaagagcagcttatataacctaaccttccatgccttcgtttctttatctccaaaatgggtgtcacagtcttgacctcatactgttgttttgaagattgaatagactgatacatgttaagtgttcatttgatttattaagtgtgcgctctgggctagacactgtgataggtgctgggattacagcagagaacaaaatccctgcccacagctttgacagtccatcaggggaataggttgtagcaaatagaaagcactcaataaagtttttatattgctgtgactagtagtaattactgggtggctacctgtgttgggaaaacagagggtaaaggtagcctgaacaggtaaagggaagtgcctgcgtcctggggtgcttcagcccaggtgggattatgtctcctaagggacagaagcctggcctggagctggaggaaagggaaaacaaagggaatgcaacatccttctgaatttctcaccattcagtgggcaatgcagagctcacagtgtgtgtgtgtgtgtgtgtgtgtgtgtgtgtgtgagagagagagagagagagagagagaagtggggtaggggagtagggaagaatgatacaggagagactgtggcaaagcaaacaggattttgctgctctcaaagagcttacagcctagtaaccaagatggcttacagtgaaaaatgatttcagagcaatcccgaggaaaatatccacaaatgcattgtgatgtggtgtcctggagcaccagttgggaggaggaggaactggggaaggaggtgagccttagtccactgcctttccttgcttagcaggtctcagctcctgcgctcagctccagaaaattcaggagcttccccacgctgcttcagtgtccttcactgtgcaactgcagcactccctgtatagatctcagtgcctacaactgactgtctttgactcaagtgagagctcttgagagcacgagctgtgtattatccacctcagcatccctagcacccatacgggacctgtcacattaactgtgccccttaactatttgctgaaggaattaaggaacaagagatgtgtcagatgggatggcggagggaaagcctcatagaaaagtggatgtggagctgacatctgaagtcactgcctgtcagggtagctataaaggagggaagcagagttggatactgatgtgaggaagaggagaggaatggagagatgggattttgtgttgatgggcagggtggcaggaagccagacaccttggttcgggagtggaaaaaccatgttgagaaacactaagaaatgtgaatgggagaattagagggagtgggggagaggatggaggaagagtgttgaatatggttccaggtggaggaattcattcattcgtttattcagaagctgttctcctagggcacattctgtgcccagactgtgattagaagtgaggtgaggcatctcagatgggtgctgtggttcatgcctgtaattccagcacttcaggaggccgaggtgtgtggattgcttgagtccaggagttcgagaccagcctgggcaacacagcaaaaccctgtctctacaaaaaatacaaagattagcggggcatggtggggcgtgcttgtcatcccagctattcgggagactgagctcgggaggacggcttgggcccaggaggtggaggttgtagtgagccctgaccacaccactacattccgtcctggtggtgaaggttgcagtgagctatgattgtgccactgcacttcaccctgggtgacagagtgagaccctgtttcaaaaaaaaaaaaaaaaaagtagtgaggcatctgtggaagtcttcagatcatttccatgaccatggaaatgctgtttggagccaggccctggagatggagaggaaggttcacacacttgtgcgtgcaagttaaagcctgaatgaagatttaaaaagtgtgtaggacggatgggagcaggagagaggctagaagacacttgcaataacccaggtgtgaggcaacccaggaatgcggagaggaccgagagatcacagggggaggcctcgcaagatgaactgacacatgggatggcggcagggatagggatggggccctggggagagagcgtggcaagttctcagca

SEQ ID NO: 8825 - DNA, 2300 bp, Homo sapien
agctcctgtttcaaaaaaaaaattaattgctaccacttactaaatgcttaatatatggcaaacacttgccaaacactttatatgcttgatttaagcatcaagctagctctgtgaagggtaccagcaggtttcccattttttagatgagcagaccgaggttcttctcgctgcttcatactggaaacttgcacttgattctgaggctcctgcttcttcaagaacactgctttgggttcgcttctcctgtccctggggtctccctttgtgatggtggtgagctgcttcctttctgaatccagcttcaaccctacagttctccagaagctggacgatggggtggagtaaagtcagctccccccgcagtgagggacactgaagctccattctcatctgcggatcacagaggggaagccaggaagagccaggggacggtggacttggggctgggaggtcatctcagagggataaggggtgaggagctctggtttcaagttccaaagccctaggacctccctcttctctgtctgcctgcatttctagcagcctcagcagctgcaggcccttgggcggggctggatgtagggaaggtcattgtaccaagaagatagttgggtaaatgtggtacctttgttgtaggattctcttgggagatgtctgcatcaatgaggatggcataaagtaaccagagtcaggatgtggggtctgactcagtgacagaaaaagtggcagtgtgtctctcatagccaaaggggcccttggaccggcagtcgggagtctggggttctctgttggctctgcctcctggcacattgggtttctggacctcagttttctcctctataaaaccgggcagttgggtgggcacggtggctcacacctgtaatcctagcactttaggaggctgaggtgggcagatcatttgggcccaggagttcaagacctgcctgtgtaacatggtgagaccctgtctctacaaaaaatacaaaaattacccaggcgtggtggtatgcacctatagtcccagctgcttgggaggctgaggtgggaggattacttgaacctgggaggtcgaggctgcagtgagctgcgatggtaccactgcactccagcctgggaaacggagcggaccctcaaaacaaaaacaaaaatgaaaaacaagcaaacgaagaaataaaaaaacctagggggttgtagtcgatgatctgtaaggtgagttataattgatgtattggaatatttaggaaaagggcactgggaatatgctaggaacacctgatggaggtatctttatttccacggcagcttcgtggatacgtctcattgattctcatggcatcactttccccatgtaggtgggcagacattgttacccctgtttaataaacaaggaaccaacagaggcttaggagaggagttgcctgatgtcgcatgattggtggcagagccaggatcaacagtggggcagggtggggggacctggccaggcagagactggatgagacctggggtgaggaatggcaggcacccagtcagggcagaaaacgagggttgggacttactttgagttttggattggatcagtaaattcccaagaaagagggagactaggaggctagtgaagaactctggagtaaaggggaggattactaagggacatggagtacctatcatgtgtcggacgcttatctatatctctcccatctgaacaaatccttacaggaaccccaggagacaggttatctccactctgcaaattggaaaacagatccagacagtttcagttatgtgtctgagaagttcatttatgtgtccaagacacattcttagctaaaaagctaagcattctgaattggaacccagagaatttgactcccagactctggatcttttcactgctgtgatccatctgggaaaggctagtgatgtgggcaaggggcttattgccccttggtgtttggttgggagtggtcggattggtgggttgggggcacaaggcagccagatctgggactcctgtgcttgtgactggactacaaagagttaaagaacgttgggcctcctcctcccgcctcctgtggcctcctcctccagctcttcctgtcccgctgttgcaacactgcctcactcttcccctcccaccttctctcccctcctctctgctttaattttctcagaattctctggactgaggctccagttctggcctttggggttcaagatcactgggaccaggccgtgatctctatgcccgagtctcaaccctcaactgtcaccccaaggcacttgggacgtcctggaca

SEQ ID NO: 8826 - DNA, 2300 bp, Homo sapien
ggtgcaatctcagctcactgcaacctcccaagttcaagcgattcttctgcctcagcctcccgactagctgagataataggtgcccaccaccacgcctggcgaatttttgtatttttggtagagacggggtttcaccatgttggccaggctggtctcaaacttctgacttcaactgatccacctgtctcagcctcccaaagtgttgggattacaggcgtgagccactgtgccccaccacttttttttttcgaagctctatgttttaaaacccatccgtgtttctccaccgctgatggaacttgtgcctgctttccatgggggcagcacccaccattatacttgtcccctctctgtgtgcgaagggctcaccagccttcaggactggccacctctgtagcctctccttcagtccttccctgcatctagcctgggctctagaagtgctgacttcccagtacatcctagaatgtgcaccagtatgtcacgcctctgtgcctttgttcttcaaggccagtggaatatcccggatcacctagttccaatctcctcattttacagaatcatcctacattttacagaggaggagaataagcttagaaacaatgacctgcttgagaccgtacaaccagaaccccaccctttatctctggccagcctcttctccctcttctctttagtcctcctctgctgctcactggccgaagtcccctttccgtctttgcctggctcccgtcgctagctccaagatggcagggtagcagaacacagatcctctctgtgccgtgtggcacatgtgctgtgctacaacccacacagcctccctgttctggaacctgtgatttgctgtgaaattgcagtcctactgcagctgtgttgcctctgtgattgctttctctctgtccccacacctgtcacagatgagttttggacctaccattctgagacatactgatgcaagaggctcccaggaaacacttggtactgatcttcctcccctcagctccgtgctcaccactggtcacactttctcctttaaccctgctcccctcctccccttcattcattcattcattcattcattcattcattcctcactcaacaactatttattaatcatctcctctatctcctagatgacaggatctatgcaactaacccagagatgacacagagatgaatgagatgtggctcctgtcatcaaggagctcatgattcaatggggaactaacacttagatgcatgggcagttagggacatgcaagaatctttgtaatgcaacaagagagaagttacaaggcagcacggaagtcaatgccggtgaacccagatggcctggtgagaggagcctggactagaaggtagatgtgtgaccttgggccagctgtttgagctctctgagccttagcttcctcctctgtgatatgaggatgagactctcacaggctgttggttggagtgactgagggagtgtgagtaaagctctcagcattgtgccagcacatagtaggtgatcaggaaacaaatggctctgaaaggcacaagtcctgtaggagtttaagagagtggacatttctctctgcctcatctccctattccctgcaccacctacactttcctctctgaccctactctctctttcctgataaggaattactctcacttccaccacccgatgtatggaaactgctatactttcaatgacaagaacaactccaacctctggatgtcttccatgcctggaatcaacaacggtgagaagctccctgcttgctccatggcgccctctgcttcagccactcacctgtacttaccttgagctcacctcctagagctgctgggaggggtcctgcctgctgtctctccccaataggtgccacatagtccgttccaggcatgagaggaatcccgtcccaggtcttcctcctgcctccagattccagctcaggggttgccaggtccctttgcgggtcttcctgaacttgcttctcttgcagctttagagactgggcaaggaagggagagtggatttccatctcctaactcttttctaggattcccgcctctgccaactctgctctctctgcacccctaggtctgtccctgatgctgcgcgcagagcagaatgacttcattcccctgctgtccacagtgactggggcccgggtaatggtgcacgggcaggatgaacctgcctttatggatgatggtggctttaacttgcggcctggcgtggagacctccatcagcatgaggaaggcaaggatgctgactgggaggcctggaaggagcgcctcagattg

SEQ ID NO: 8827 - DNA, 2300 bp, Homo sapien
gaacttccagattgttttccaaaatgatcgtatcattttatattctcactagctgtgtacagggtcagaatcttttaaaaatgtaggtctgttcggctgggcgtggtggctcacgactgtaatcccaacacattgggaggccgagacgggcggatcacgaagtcaggagatcgagaccatcctggctaacatggtgaaaccccgtctctactaaaaatacaaaaaattagccgggcgtggtggcacgcacctgtagtcccagctactagggaggctgaggcaggagaatggcgtgaacccggaggcggagcttgtgagccgagatcacggcactgcactccagcctgggcaattgagactccgtctcaaaaaaaaaaatgtaggtctgttcataaagtgcctactacatacggttgttctagggattatttgttagatatttttcttacaagagaattttgcctaccccaaggtcaggaagatatcttccatcttctagagtgtttatggttctgaatttcatgtttacgttatgatccatcttgaattaatttttgcctgtatagcataaggtagagattgagggtcattttttttccaatacagtattcagttgttctagcagaacctgctaacaaattttattttctacactgaattgaattggtgttttggccaaaaatcagttgaccatctatgcatgagtttatttctggactctattctattccattgatctattgtctctccttaccaagaaccgcattgttttgattactgtggctttatagtaaatactaaagtcaggaggaatacattttccaacttggctcttcttttctaaaattttctagctattctagattgtttgcatttccagataagtcttagaagcagtatgtcaatttctttaaaaatacctgctggggccgggtgcagtgagtggctcacgcctgcaatcccagcactttaggaggctgaggctggtgattgcttgggctcaggagttggagtccagcctgggcaacgtggtgaaaccccctctctacaaaaaatataaaaattagcttggtgtggtggcacacttttggtcccagctactagggaggctgaggcgggaggattgcttgagcccaggaggaggctgcagtgagcggcgattgtgtcactgcaccccagcttgggtgacagagcaagatcctgtccaaaaaaaaaaaaaaagctggaattttgatagggattgtgttgaatccatatatatatatatctccacttattctgatctttgatttatttcagcagggatttcaatatatttttcagtcttgcacatcttttgttacatttatttctatgtatttgatgttgtttatgttatttaatattgctgttgtatttctggttttccaattttctgttgccagcatgtagaaatgcaattaatttctttttgagacggaaatgcaattaatttttttttttttttgagacggagtctcgctctgtctcccaggctggagtgtagtggcgcgatctcggctcactgcaagctctgtctcccgggttcacaccattctcctgcctcagcctcccgagtagctgggactacaggcgcccgccaccaagcccggctaattttttgtattttttttttttagtaaagacggggtttcaccgtgttagccagggtggtctcgataccctgaccccgtgatctgcccacctcggcctcccaaaatgctgggattacaggcgtgagccaccacacccggcctaaatgcaattaattttttttgtgtatttgttgtgtaccctgcaaccttgttcagtttgttagttctatatttgttttgttttggtagatgacatccctcaggccctgctactctggactttcatgatggagatggtaataggaattgtattaagaaggaatgtagggatttacagtgagctgtgtttaatttacggtgtttaggccgcacccgaaacacattagaacagtctttggaggagggaggcggggtgggtggggcatcctgtatttttagagttggagattctaaaagttcagttgtgaactcttgatttcggtgccaagcggcactcaagccgaaaggccaccgacactcgcctgcggggatcagggcgggatgacctgggtaccgcggtcacgccaaggccgaggccctcacccttcccctctttgggaaagggcagacaagttccgggttcccttctaggtccgggcgagggggagagcgccccacagacgacaggcgcctcctgcctctctcctt

SEQ ID NO: 8828 - DNA, 2300 bp, Homo sapien
ctcttatgtcttatctctgagaaatctgagatctgcacttttgttagaagtccgttttaaagacaatcttttaaagtgtacaaatagaaaccttatcttattgtattgcaggcctatctcctcccccggtgtgtatcaatgctcaggctgggcctttgtctgctggcttgtggagggaggcaggacaagccagtgaccacattcctgcactctgggctgcctcctgtggggcccgtgaggaagcggcagccttccctgccgcgtgcagggcctgggttgtgtgggtggctctcccgagtctcctccagccctttttgggtctgattctctgaccctcctctctctccttgctcaccacttggcactccactccttatccttttgctgcattaagtttggaaagagattttggagaaaatatagcccatcaacgaatttctcctcctcccagggcctgtctaggcgtgtgccatgcccaccctcttcctttccagcgctggccacatcctccctgcaccttcagtgcctgctttccctgcctcttcctgggctccgggtctgtgtccacagtgtcctgcgtggccctcgcgctgcctctggttgcccacattcctgcaactctgtgaccacagcaggggcgattacacattcctggcctggcagccaacagtgtaaaaaagaacagaatgtcctagggccccgcctagcccccagcttcacctgggcccctcccgggtctggacaaggttggagggggtggcgaggaatcagcaggaaagaggagggaccaggaggaggcagacgcatcccacctgagtgcgctgctcccacttagtgagcggggaggagacctgcagagacctcttctctcttctctgcagggcctgagggtgaggctgacctgtgggtgcccttggagggctgcccacttgctgagcctctagctcctggaagcacacttgggactccccccttgctctccttcctggagacagactccctttggtgctggctccttctatttgcccccaccactgccccccacctgcctctactcactcagtgcccctcctccatccctatctctctgtccttcgctgtccctctctattgtctccctctttctgccctcctgtcctcccggttccccacccaggccctctcagcctggctggccccttctccttgtgttgccctcctagctgtgggctcaggatccttctacttgttcagatctttgcccctcacctgccatcctgtcccccagcctccttgcctgtctgcgtctaaagcccctgcccagagtccgccttctcaggtccagtactcccagttcacctgccctcgggagccctccttccttcggaaaactcccggctctgactcctcctcagcccctccccccgccctgctcacctttaattgagatgctaatgagattcctgtcgcttccatccctggccggccagcgggcgggctccccagccaggccgctgcacctgtcaggtgagggggaggagaggtttggctgccagattcaactggaaaggaaccagtcccagtccagccgcaacctgggagtgggaagctggaggcagcccagacctcctggagccctgcagtcctggggcagagacagaatcaggacacagctcgaggtcagggccagaggctggagctgagggcctagagtgagagggggcaaggcaagggggggagaggaagagaggcaggattagagagaggaggcaggccagaaagaggagagcaggagagacccaaagagaaacagaaggcagatagagagggagtgagaggcaggagctgagacacagatcctggaggaagaagaccaaaggaagggggcagagacagaaagggaggtgctaggacaaaactcgaaaggtggccctatcagggaagcagaggagaggccgttctagggaagcccagctccggcacttttggccccaactcccgcaggtctgctggctccaggaaaggtggaggagggagggaggagtgggagaatgtgggcgcagggtgggacatgggcatggccaggggcagcctcactcgggttccaggggtgatgggagagggcactcagggcccagagctcagccttgaccctgacccttgctctccccaatccactccggggctcatgaaggggaacaagctggaggagcaggaccctagacctctgcagcccataccaggtctcatggaggggaacaagctggaggagcaggactctagccctccacagtccactccagggctcatgaaggggaaca

SEQ ID NO: 8829 - DNA, 2300 bp, Homo sapien
gggagactggagtttctaggggtctctgggatatgtggggcagtggggacagtgcagagaccttttcacagagccaaggagataacccagcacccagagagcagacgaatccacgggctctgtgtgggagtgagggaggccttcccggctttcacatccaggtgcacctgagccccgatcccccatgagtctgtctcaggaagtaaatggcaaaagcgctaagtagatagccccagaggaggaggagaattctgaattctgtttatagctctgctcctattttgttttctaacctcagaaaactgatttatccttgggaagggtcagtttcttcattaggacaatgaagaaaaatccagctgtcccttccaaggggaggtatcatgagcagtatcaaggtaagcaagggaacctggtttggaatcctggttgacaccggctttcactttaagaagtcgcaagagactgccgcaagagaggaagccacagaccaggttggaccctgagcctggagtactgccttttctcttctttgcctgctaaactccttgcttgtcaagattcagcagagatgacaccttctctgggaaggcttcctgagtctcctgcagtgagcccctaggctcccctagcccttggctcttatgtcttatctctgagaaatctgagatctgcacttttgttagaagtccgttttaaagacaatcttttaaagtgtacaaatagaaaccttatcttattgtattgcaggcctatctcctcccccggtgtgtatcaatgctcaggctgggcctttgtctgctggcttgtggagggaggcaggacaagccagtgaccacattcctgcactctgggctgcctcctgtggggcccgtgaggaagcggcagccttccctgccgcgtgcagggcctgggttgtgtgggtggctctcccgagtctcctccagccctttttgggtctgattctctgaccctcctctctctccttgctcaccacttggcactccactccttatccttttgctgcattaagtttggaaagagattttggagaaaatatagcccatcaacgaatttctcctcctcccagggcctgtctaggcgtgtgccatgcccaccctcttcctttccagcgctggccacatcctccctgcaccttcagtgcctgctttccctgcctcttcctgggctccgggtctgtgtccacagtgtcctgcgtggccctcgcgctgcctctggttgcccacattcctgcaactctgtgaccacagcaggggcgattacacattcctggcctggcagccaacagtgtaaaaaagaacagaatgtcctagggccccgcctagcccccagcttcacctgggcccctcccgggtctggacaaggttggagggggtggcgaggaatcagcaggaaagaggagggaccaggaggaggcagacgcatcccacctgagtgcgctgctcccacttagtgagcggggaggagacctgcagagacctcttctctcttctctgcagggcctgagggtgaggctgacctgtgggtgcccttggagggctgcccacttgctgagcctctagctcctggaagcacacttgggactccccccttgctctccttcctggagacagactccctttggtgctggctccttctatttgcccccaccactgccccccacctgcctctactcactcagtgcccctcctccatccctatctctctgtccttcgctgtccctctctattgtctccctctttctgccctcctgtcctcccggttccccacccaggccctctcagcctggctggccccttctccttgtgttgccctcctagctgtgggctcaggatccttctacttgttcagatctttgcccctcacctgccatcctgtcccccagcctccttgcctgtctgcgtctaaagcccctgcccagagtccgccttctcaggtccagtactcccagttcacctgccctcgggagccctccttccttcggaaaactcccggctctgactcctcctcagcccctccccccgccctgctcacctttaattgagatgctaatgagattcctgtcgcttccatccctggccggccagcgggcgggctccccagccaggccgctgcacctgtcaggtgagggggaggagaggtttggctgccagattcaactggaaaggaaccagtcccagtccagccgcaacctgggagtgggaagctggaggcagcccagacctcctggagccctgcagtcctggggcagagacagaatcaggacacagctcgaggtc

SEQ ID NO: 8830 - DNA, 2300 bp, Homo sapien
agctgtatctgtaagatcagtgtaccttacggtttcattgtattatatgttacacctctattaaaagaaagggtctcagcagcataagacagggtggggaaaaaaagaaaaatagaatagagaaagagtccctgtcttttagggtaaaatcctgaaatattttcaaatgaaatgatatgatgtctgggatttacttcaaaataataatgagggatttgaagagtgtgtgcgttggtgggggagggggtatacagaataaatgaaactgacagtgagttgaagctgggtaaggagtatatgggagactcccaatattactttttctcttttggtatattatcttgcatgtggaatttccacagtaaaaagtaaaaagaagagagagaaaaaaggacctagggtcgctacacacacattcctttacgcgtttaagagctcagcagggactctcatcccagcccccagcgctagggccctggaaggctcagcagccccgcgcagtgcatgctgttctgatacttctgccctttccagccatctttggcccatctgtacggtgagctgcctgcaccaggtgaggggagagagcctcacagagtgaaatgcctacagcctaggcaggtcctttcccccttttgtgacctctcctccccatgcacacttcccatcacctgcacctgtccagacatcagacctgaagttagacagaccagtgtaaggacgagtgctgaacagagtccttcagggagggggatagtgcccaagtgacctatctcaagagaggttagcccctcatcccaagggagacatccctgagccacaaggagttggcaggactgctggaatgagttgggacctagacatcaggagacccagattgtagctggctctgcggtggactggctctgtgatgtggccatcactcatttattccataaatacctattgggcacatggtatgtgccagactctgctaagcatggggaacacagacttgaagattcagcctgggccatggtggcactcacagcctggtgggaagcaaacaagacagccaggtacagagggcagtcttcacggggactgtgcaacctagggcagaggttgccttccagagcctcagtgaagcctcaaggacaggtgggagttaggaagacggaaacttggggaccagagaaccacgtgtaaaagggggcagctgcaagtaactccacgggtgggtggggtgttgggttgagggagatgggaggatgaaacagggcaggaacgagaccaggccaccctggaatcccggttcccttatgtatcacccttagcctccctctccatgcttaaggtgagggggctggactgcgtgggctctcagctttctccagttctaaggggtttgaaggttcatgggcaaagaagccagagcagagggactgagtgcccaggtccagcctgctggccccaggactcccctccgcatatcctccccctctctttgggagggaggttccctgaggacagggagcagggcaagctgcacagctctcaagggtctcctaggtgacctgtgcccactcctgtgcggattgggctgggttggtagcgtggggggctggctgatttgctagtcccttgtaatttgtctgaaaaactcccacagtagggcaggacaacgggggaggaacccgggcatctgccagccggttctcctcggtctcagagctgcttctgcggccttgcagtccccgcgccctgccctctccatgactgcccgtcctgggcccctcgctttccagatcccgcacccagctgtcccttgcgctctctggaactccctctgctctccctgcgaggcttgtccaagggctgaccccgggcccgccgcccttccctcggctgggccagggctgtccgcagtccgctctcccgatcgggcttccgaagaagggaggaggccggttccggccccgcggccctcacgtgctttcccggccgcccctcccgccccgcatcgaggcagacaagcctgttcctcttccctgggctgcgattgcgacaggccggcctggctcccagcgctccctgtccccgccccgcggccagctcgctccactcccacttcctgagctccgccatgggagccctggaggcccggcctggccgctcccggccctggggtgcacatcggccctgagtcccgtcccaggctctgggctcgggcagccgccgccaccgctgcccaggacgtcgggcctcctgccttcctcccaggcccccacgttgctggccgcctggccgagtggccgcca

SEQ ID NO: 8831 - DNA, 2300 bp, Homo sapien
ttcccatttgactctttcttgactgtttcctgtggactgattggcttgctagcctagtagatgactattgtttctaatgactgtaacatcactaattggcagaaggttcactgtgtgtgttgggcactctgtaaccactttacatttactaactcatttaatcttcttaatgatgctatgaagtagattctattatcatcctcatggactgaaggaagaaaccgaggctcaaagaggttaagtgatatactcaagatcacccacacaggtggtcactggtgttattagaacctgtactcaggttttcttactccagagcccatgtcataatgcatgcactatagaaaattagagacttcagataagcaaaactaaaaactcacccacagagccactacctagaatatccactcgttacattgtggtatatatcctcccggacattttctatgcatgtttatacatactgggttttgttgttgtttactaaaagtgaagtaattttaatatttcgtaacctgattttttcattccacaatctaagtatttttctgtgccctgttaatttttaactatgtatcaaatacaactggcattttagagctggaattttagagagtatgtaagctaacctcatcctatatatgaaaaactgatgcccaaagaagtgaaatgacttaaaagtcacacagccgggcaggaaaccgtggcccagactcccagtccagtttctccccaggcctcccatcccatattcccttaggctacagatttacatgaatgagaagaggcaaaatgcccagcatagaaatgcgggagtcctcccgcccttccccaggcgtagctgacggacactggaggctccatgctattgctggcagcactggtacccagagaaagagaaattacccactgctacagatcacagctggagaagccgaactccagcctctctttctcttcccctcctagaacctgccctgagcaagggggtggagaacttgcaagccctgctctaccaggcggccacaggcagttccgaagcaagtttccctactctctcacccctgtaaacacccccacaggtacaggtacagcagggcaaccctagctcctctacagcagcccctctgtacaatggctgaggccacagaaatgtggctctagcctgtgtctgtttacaactccaagtcccacccttccctactgtctcccaatcccacttccagaccttgaaaatcaactgcctaagctcccatcctgcacacacaagcctgcccaatcctggtctctgagcaggagggcacccacaccacccccaaacatgcccatccatgatacagtctctcctggctgccaagaggtcctcaagtccaacttagttccccttctctataacccaagggaagtttctctcattctgcctttaggagctgcattgtgtctagaaggaaaaaagctgctcccttttctctgtctgggttgcccagggatctggaaagctcttccttctcctcctcccctctgcccttcttggggctgtgatcaccctcctgtctgctgtcctggcaggaaccatgctgatgctggccgttctgctgccactggccttctttctgctccttgccaccgtcttctcctgcatctggaagagccacccttctctctgcaggaaactgggtaggaaagggttggatgcagtggatggttggcaatgggagccggagggaggaatattcaacttccccggtgcaaccctccacaccctcaagactcccaatgcctacccccaacatagacatccttatcttcatccagctgcttattctgaggctggagatgagagtgacagtggcttgttcctctgggcccccgggtggtcaagttgctacacattgtgctgggatgtggaggctgaaaggctaggtctgaggcctgccggggagcctacacccatttcattctccattgcaggatcgctgctcaagaggcgtccgcaggtaatggcgggggctgagaaggcagcaagaaggggaagaggtgatgagggtacaaggtggagcagacaggaagagagtatgcaggctgactccacactcattcattcattcaactgatgatttactgaacatgccacgtaccaggcactgtcctaggcactgggcgtacagcagtgagcaaaacacagtacctcatttcctggagttcacatgcccatggagcaagaataagttaaactatatatcaggtggtataattgctaaacaaagcagggaaggggtcaatgagtgacagtggca

SEQ ID NO: 8832 - DNA, 2300 bp, Homo sapien
atgacaaaaccccatctctactaaaaatacaaaaaataagctgggcgcggtggctctcccctgtaatcccagccaaggtgggcggatcaacttgaggccagcctgaccaacgtggcaaaactccatctctactaaaaatacaaaaattagctgagcgtggtggcacgcacctgtcatcccagttactcaggaggctgaggcgtgagaatggcttgagcctgggagacagaggttgcagtgagctgagattgcatcattgcactctagcctgggtgacagagtgaaatggagggaggaaaaaaaaaaaaaaggaaggtcccgtccagggagccagcctaggatggggaaggctcaccagaagtggatgcaaagagtgctggagatgagctcattctatttgcctaggaaagaaaaacgtccagaaacctggccttcctcctcttggccgaggccctccaggaaagccaggcagaccctgctcctgctctgaccccctggagaagtgatatgtagaaaagaggagatgggctttggcccagaggacagcagcgttaggctagtgagcagttcccagtcggttcaaggttgctaggctcagcgaactgcaagtccctgttcgacaagtttcttcctaaaggtccccagttcctcatgattcttctgagggtctcatccaccctcccagggcctgcagtcagctagccaccccactgccccatgcctgcagtgaacacatttaccacaacctggaaatggctggtgacagaaaagtcctcacggccacaacactctctgcggtgggaattcaggtgccttgcctgatggtgacaaagctggttttgcataaacagctctctgaatcacacccaaatgtggcttctgacttgagtggacccccatgaagagctgcagagggggctgggaaaagacaagagaatggagaaaatgaggagaaaggaaactacagagtgagatagagaacatatctgacaggtgtgaccacagcagtgtgacatttatgaacagtgtggaaacaacggcaaagcccctaaattaaaaacttcctggggaaataagccactccacatatcggttgctgaggaaagagtggaggaggctgttgacccgtgtgtgtccccatgactcaaagagggaaaagtctagctgtttccaatatcccgaaatcagtcttgctgggagaactgggaaaataaaaaagagatgacccccgtaggaagctacctttaatcccaagtgcccaaggctaggagagaagatgctccaggcgatccaggacaccagtgactgacacagccagaggtgggaaaggggaggataaagatggcacaaaagtgaggagtgagcaagggtctgagagggaaggccatgtgggcagtaggtggcacccacatcagagactgacatgaggattaaaggagagcataggtgatcggtcagagtgtgacagaagagaggcagctctacaccccttgcttgcaattctgagcattctgtagcaaactcgtttggccatcaaaccagacctcaattgagacaaggctatttaagcttcctcccagttggtgtaaatattcaatagttttgctgcagaaatgttgcgtttgattatgagactaccccaactccccaagggtgttttgtggtgctggtttctgtataaacctgaaaaattctgaattccaaaacttatctgacccccaaagtttcagataagagcttgtggacctgtgctcaattctggttctccttccttctttcaactgttgtctgtgaaaggagggatgcaggtatgggagacaggagtcctgcgaattcgtctgtaaactgtggacgggggggtgggtgggggggggtaacgtgggcacctttgtgcacaagtgcatgaataggaggggtgagcaactgtgtgtccatcacctttttgtcaaagaagcaggagtcagtgggctacgtgcttcatgagcaggagaggcggaaactaaggaaggctcatgtgttggaggaagcatgtttgaagagcagcaggtctcacagagtttgctctttaatactctccccagcacacggaaggggaagggggtggaggttgctgctatgagagagaaaaaaaaaacagccacaatagagattctgccttcaaaggttggcttgccacctgaagcagccactgcccagggggtgcaaagaagagacagcagcgcccagcttggaggtgctaactccagaggccagcatcagcaactgggcacagaaaggagccgcctgggcagggaccatgg

SEQ ID NO: 8833 - DNA, 2300 bp, Homo sapien
acctggcccttaccaaggccccctcttacctggctcacacatctggcagcacagctttccctgagcccagtagtgcctctctgggcagctcttgggggctggagtagctgagagccccaccagggtccccagaacgcacagccaccagggatgtggccgtgccatggtccctgcccaggcggctcctttctgtgcccagttgctgatgctggcctctggagttagcacctccaagctgggcgctgctgtctcttctttgcaccccctgggcagtggctgcttcaggtggcaagccaacctttgaaggcagaatctctattgtggctgttttttttttctctctcatagcagcaacctccacccccttccccttccgtgtgctggggagagtattaaagagcaaactctgtgagacctgctgctcttcaaacatgcttcctccaacacatgagccttccttagtttccgcctctcctgctcatgaagcacgtagcccactgactcctgcttctttgacaaaaaggtgatggacacacagttgctcacccctcctattcatgcacttgtgcacaaaggtgcccacgttacccccccccacccacccccccgtccacagtttacagacgaattcgcaggactcctgtctcccatacctgcatccctcctttcacagacaacagttgaaagaaggaaggagaaccagaattgagcacaggtccacaagctcttatctgaaactttgggggtcagataagttttggaattcagaatttttcaggtttatacagaaaccagcaccacaaaacacccttggggagttggggtagtctcataatcaaacgcaacatttctgcagcaaaactattgaatatttacaccaactgggaggaagcttaaatagccttgtctcaattgaggtctggtttgatggccaaacgagtttgctacagaatgctcagaattgcaagcaaggggtgtagagctgcctctcttctgtcacactctgaccgatcacctatgctctcctttaatcctcatgtcagtctctgatgtgggtgccacctactgcccacatggccttccctctcagacccttgctcactcctcacttttgtgccatctttatcctcccctttcccacctctggctgtgtcagtcactggtgtcctggatcgcctggagcatcttctctcctagccttgggcacttgggattaaaggtagcttcctacgggggtcatctcttttttattttcccagttctcccagcaagactgatttcgggatattggaaacagctagacttttccctctttgagtcatggggacacacacgggtcaacagcctcctccactctttcctcagcaaccgatatgtggagtggcttatttccccaggaagtttttaatttaggggctttgccgttgtttccacactgttcataaatgtcacactgctgtggtcacacctgtcagatatgttctctatctcactctgtagtttcctttctcctcattttctccattctcttgtcttttcccagccccctctgcagctcttcatgggggtccactcaagtcagaagccacatttgggtgtgattcagagagctgtttatgcaaaaccagctttgtcaccatcaggcaaggcacctgaattcccaccgcagagagtgttgtggccgtgaggacttttctgtcaccagccatttccaggttgtggtaaatgtgttcactgcaggcatggggcagtggggtggctagctgactgcaggccctgggagggtggatgagaccctcagaagaatcatgaggaactggggacctttaggaagaaacttgtcgaacagggacttgcagttcgctgagcctagcaaccttgaaccgactgggaactgctcactagcctaacgctgctgtcctctgggccaaagcccatctcctcttttctacatatcacttctccagggggtcagagcaggagcagggtctgcctggctttcctggagggcctcggccaagaggaggaaggccaggtttctggacgtttttctttcctaggcaaatagaatgagctcatctccagcactctttgcatccacttctggtgagccttccccatcctaggctggctccctggacgggaccttccttttttttttttttcctccctccatttcactctgtcacccaggctagagtgcaatgatgcaatctcagctcactgcaacctctgtctcccaggctcaagccattctcacgcctcagcctcctgagtaactgggatgacaggtgcgtgcc

SEQ ID NO: 8834 - DNA, 2300 bp, Homo sapien
ttttattttttatttatttttttgagatggagtctcgctcttgttgccgaggctggagtgcaatggcgtgaccttggctcgttgcaacctctgcctcccgggttcaagcaattctcctgcctcagcctcccaagtagctgggattacaggtgtgtgccaccacacccggctaattttttgtatttttagtagagacggggttttactgtattggccaggctggtattaaactcctgacctcaggtgatgcaccagcctcagcctcccaaagtgttgggattacaggcgtgagccactgtgctcggccccaatactttaataacttttaattaaagtataatatacgtacagagaggcacgcatgattgtaaagcttaagaatttgtacaaatttggctcacaggcataaccagcagcagatcaacaaatataaaatagccgggtgaggcagggaattgcttgaacccgggaggtggaagttgcagtgagccgagatcacgccactgcactccagcctgggcaacagagtgaaactccgtctcaaaaaaaaaaaaaaaagaaaagaaagaaagaaaatagccaggtgcagtggcttacgcctgtaatcccagcactttgggaggttgaggtgggtggattgcttgagctcaggagtttgagaccagcctggccaacatggtgaaaccccgtctctacaaaaaatacaaaaattagctgggtgtggtggtgcacacctgtaggcccaagctactggggaggctgaggtgggaggatcgcttgagcccgggaggtggaggttacagtgagctgagatcatgatactgcgctccagcctgggtgacagagtgagatcctgtctcaaacaccaccaacaaaaaacaaaacaaagtatattagggattcccaggggctggggctggggctggggttggttggggggaagaaatggggagtcattgctaaggggtacaagtttctctggggtaacgaaaatgttatagaattagatagtgttgatggctgcacaacctgtggatacactaaaataaataaataataaatagttacttgattacagttacttagcctttattttgtttgtttgttttttgacagagtcttgctttgtcgcccaggttggagtgcagtggcacgatctcggctcagtgcaacctccgcctcctgagttcaagtgattctcctgcctcagcctccctagtagctgggattacaggtgtgtgccaccacacctggctaattttttgtatttttagtagagacggggtttcaccgtgttagccaggatggtctcaatctcctgacctcgtgatccgcccgccttggcctcccaaagtgctgggattacaggcgtgagaatttgcctttaaaatatacattttgctcaagtgtagaggtccgatgctgggtggctgggtgttaattatcctgggggcgggtgtggtagggcactagctgggctgggctgggctcgctggcggctggtttgagaggagggtgattcagaggaaggcagtgacacccagatgtgggacaggctgcaagaaagcctggtgggccttagggcagacacttgtggggacccggggagccctaggtgccctgacaggtggaagaggggtgcagaaagggaggatgtcaaagagagaatgtcaaaggtcataaccaaacctaacaattttcttctacttatgccttttgtcaggacaaggagagggacaaattccttcttggcatccttatggccctgtgacctgctaatgaatgctgactctgagttgctactagaatttggtttccttgtggcttcccaggaattgtgagccatgttggataaggacctgcaagggaagaatgaggaagcctgggacagtgcaggaggggagagcactggtggtagagaggagtgatgacaagggtctccgccaaaagggaaatggaggggttaaagaagctgctggggagggttaaaaacaatgtgttctcactcgtaggtgggaattgaacaatgagaacacttggacacaggaaggggaacatcacacactggggcctgtcgtggggtgtggggagggaggagggatagcattaggagatatacctaatgtaaatgatgagttaatgggtgcagcacaccaacatggcacatgtatacctatgtaacaaacctgcacattgtgtacatgtaccctagaacttaaagtataattaaaaaacaaaacaaaacaaaacaaaaacaatgaggtgctattgttttagtggtgagtatccggagacctggg

SEQ ID NO: 8835 - DNA, 2300 bp, Homo sapien
taacaataataatggcaaaggcattgggggaccgtgagcaaagggcaggcctttgcaggggtgggaatggaaagggaagcacgtccctagaggtgggcctgggatgggggttgggggatgaagcaagtggaccttgaaggtctccacaggtctgagtgtcctatgctccctgggcctctcttcccccaggtcttctcgttcgcaactgcaccatcactgccaatgctgagtgtgcctgtcgcaatggctggcagtgcagggacaaggagtgcaccgagtgtgatcctcttccaaacccttcgctgaccgctcggtcgtctcaggccctgagcccacaccctcagcccacccacttaccttatgtcagtggtaagttccaggcaactctctgtgccatcacgtggggtagcggtgataccccaaccagtactccccactcctacccctagataaggtcagcctgtttctgccttcccatcccatccagcacctctcaggccttcagatgtgccctatggggtcccctgctgctactcattctgtctctgtttttccagagatgctggaggccaggacagctgggcacatgcagactctggctgacttcaggcagctgcctgcccggactctctctacccactggccacgtgagttttctccttaatccccaccgctagagagaatgcatacacgaggggccaggagggaagccagacagaaagctcctaggattagggataagaggaggggaaaaagcagagtccactgtttaggagaggagttggccaacggtggcgggtgggatagaataaggtgggggaaaggggagaggcaaggtgacaggagggctgggctgagggagccaagggctagaccctcccctaacccctgtgtgtcccctcctattacagcccaaagatccctgtgcagctccgattttattcgcatccttgtgatcttctctggaatgttccttgttttcaccctggccggggccctgttcctccatcaacgaaggaaatatagatcaagtaagagacagaacacaggcctccggtcctgcccctgcaccacaccccactggctcaaccccactgcccacgcctggaatctcactgaaacccaccagctccacttcaccagccttggtcctaccccttctctccccttagctggcgtgctcctgacacccctcccccaagcgcacccgcctctacccatctccttctcccgtctccccctgcccccactgctggccaagactcatcggatctccttctgcagacaaaggagaaagtcctgtggagcctgcagagccttgtcattacagctgccccagggaggaggagggcagcaccatccccatccaggaggattaccgaaaaccggagcctgcctgctccccctgagccagcacctgcgggagctgcactacagccctggcctccacccccaccccgccgaccatccaagggagagtgagacctggcagccacaactgcagtcccatcctcttgtcagggccctttcctgtgtacacgtgacagagtgccttttcgagactggcagggacgaggacaaatatggatgaggtggagagtgggaagcaggagcccagccagctgcgcctgcgctgcaggagggcgggggctctggttgtaaaacacacttcctgctgcgaaagacccacatgctacaagacgggcaaaataaagtgacagatgaccaccctgcagctctccagcttcctctctgaaatcccagtcccaaaatccagtttcctggccgcctcctggctcaggtcaggatctggcagaggaggtttctcagccggttatgttggggcctgcttaagggcgggggtgagaaaggtccccaggctactgtggatcctgtgtctgacttcagatccccttttcccacagttatagctccacttttttgggacaggtggggagcaaaagggtgcagaggtcaggtcttgaaatcaccaggggatttccgggtgaggtgggtggtgagaaaggaaacagcaagcagggctctggcagctgctgcagacggcttcacacagggacgcgggctgccatcttgctctaagtgaaagtgaaagaaaagtcggcagcagagggaacagggaagaaacctaaaggctgcaggctgccaggtgtgcttggagagcccccttcttccgccgggcctcgcaagcagcgtaggactgtggagaagggcggtgggcaaggagggaactcgagagcagcctccatgggcacacaggagggctggtgcctgctgctctg

SEQ ID NO: 8836 - DNA, 2300 bp, Homo sapien
cctgggagtcttcatcaccaaggagatgctaggtccccctccagagacctgcatgttggccatgaaccaagctgctgtcttaacagtggtctctgtcatctggagaaagtagcgggagatctcacaggtcacctccttcccactgcagtcagcatggagcaaggcctcggcctggggaatctggaccaggtccactggggagaagcagggcacacacagagggcaaattagcgtgagaacaccagggccaacgggaggcagtatgtgtggctgtaatcgggacctgggctgtcctggtggagggagcccgggaggaccaaggacacaggtggaaggcttttacctgaggcctcaaagataataggtgggtcatcttgggccagtgtgcccccttggaaatcggtgaagtcctccagggagccatcgtccagcactggcacctgcttcagcacaagggaggcccttgccctgtcctcactgctggcgagagctccacggtgcgcaccgtccttcgccaggaagcagtctaggaccacgtccactgcccgccactgcccctctgctgggtggggctctgcagacaaaggctggggtgagcaccgccttccccagaaagctactccacacttgcttcctgcccccgccctcaagctgtggagtcatcaaagggtaaaagttgccatccaagatcctagctgtttctgtgtccctctattctcccgtcatccccaaaccagctttctggagagcacctgctagtccaggcaaatacttcttggtgagagttaaagtcctggatttgccttgctcagaggagtttatgcttgcatttccaactgttgaataaaagactatcttttcagtcaaaggaattctcagaaaacaagcaagtgccaccgcagagagaggagactggacagttactgttgctggggcactgacagcctgcactgctttctcccatttcgggtagccttcccctcccccgccttcaaggtcaccttccaagtgatttcctcacctggggagtcctttcctcttctgaagtgtcagctcccaggccagtgccctctctgtaggacagtggctcctgaccacagccacagaggcagcccctctttagcattttccctgtggagtccccaccctccctccacacacactattggttccttcctttgccagccgctgagcctttcccctgttgggcttagaaggcgatggggtcatccccggcccctttgctcttctggaatctcggggagggtggcaccctggggcttcagtagctcttctcccagccagctctccccgactcccagactcactggtttctgctgctccagatagagccaggcagagcagcaggcaccagccctcctgtgtgcccatggaggctgctctcgagttccctccttgcccaccgcccttctccacagtcctacgctgcttgcgaggcccggcggaagaagggggctctccaagcacacctggcagcctgcagcctttaggtttcttccctgttccctctgctgccgacttttctttcactttcacttagagcaagatggcagcccgcgtccctgtgtgaagccgtctgcagcagctgccagagccctgcttgctgtttcctttctcaccacccacctcacccggaaatcccctggtgatttcaagacctgacctctgcacccttttgctccccacctgtcccaaaaaagtggagctataactgtgggaaaaggggatctgaagtcagacacaggatccacagtagcctggggacctttctcacccccgcccttaagcaggccccaacataaccggctgagaaacctcctctgccagatcctgacctgagccaggaggcggccaggaaactggattttgggactgggatttcagagaggaagctggagagctgcagggtggtcatctgtcactttattttgcccgtcttgtagcatgtgggtctttcgcagcaggaagtgtgttttacaaccagagcccccgccctcctgcagcgcaggcgcagctggctgggctcctgcttcccactctccacctcatccatatttgtcctcgtccctgccagtctcgaaaaggcactctgtcacgtgtacacaggaaagggccctgacaagaggatgggactgcagttgtggctgccaggtctcactctcccttggatggtcggcggggtgggggtggaggccagggctgtagtgcagctcccgcaggtgctggctcagggggagcaggcaggctccggttttcggtaatcctcctggatggggatg

SEQ ID NO: 8837 - DNA, 2300 bp, Homo sapien
aggttggagtgcagtggcaagatctcggcttactgcagcctccgcctcccgggttcaagtgatcctcctgcctcagtctcccgagtagctgggactacaggcgtccatgcccagctaatttttgtatttttagtagagacgggattttgctgcgttagccaggttggtcttgaactcctggcttcaagtgatccgccctccttggcctcccacattgctgggattacaggtgtgagttactgcgcctggccctttttcttttcttttggagatagggtctcattttgtcacccaggtgggagtgcagtggcgtgatctcggctcactgcaaccggaacatctgggctcaagctgtccttccgcctcagccccccaaatagctgggactacgggagtgagccaccacgcccggccccattctttttgtctttgggggcttataattttttgcaaattttcccaaattgtcatttttccccctaacttgccattttgatgtggtttcaggaggagaatgggataaacacatatgatgaatgcattatgtttccaagtgcaattgtttccttaagaagacttgtgacatttggatagataactttggtggactttttagagaatagatgtaaaggatggcaagactggaagcagaatgatgtatcattgatcttaggaggcacttgggttttttgtgtgtgcttgtttgtttgtttttttgcatttcaatatcttctaattgggatgtttcactttagctattagtcagacagcagtcaaactatatttgtcatacctgctcatgagcatcaaagcttgccaaatgggtgtctgaggcttggaagaaaactctagagcctggagaggaacactcttaggaaatgctgcatcaccaaagcccttatgaaatgcacagaggactacattgcgtggaaattagtggacatccaagactgagtcaaaaaagtgaatcattaacaatcagtctctgtgaagttttagggatagttaccatgttattgttttctatttccctttttatgcatgcacaagagtgaaatatagaaatcggtatgtatataaacccatattttcaatacatgtaaaacaaaaatgctaagtggtaaggaaagcatttgtcacagataatttgcaaccttttttctttttttttttgaaacagggtcttgctctgttgcccaggctggagtgcagtggcgtgatctcggctcactgcaaccgtcggctcccggcttcaagcgattctcttatctcagcctcacgagtagctgggattacaggcgcccgccaccatgcctggctgttttgtatttttagtagagacagaggtttcgccatgttggccaggctggtctcgaactcctgatctcaggtaatctgcctgactcggcctcccaaagtgctgggattacaggtgtgagccactgcgcccggccttgtaaccttttttcttagcgggacataaaataatggtgaattttccaactgatggagtccaggaaagggataatagtgagcagaggggagataatcactggaatgccaagaaggaaaaatcaactcgatttggcagattactgggggagaggtaaaggtgaaggggaggaaatctaggatggtttccacgtttctggtctgggcaactgagtcgatgtggtaacctcgactggagcaggtttgggagggagttcaatttaggaaggctatgttgaaagaaacgaatgaacgaaagcttcgtgcttgctttggtgggacggaaccccgcatccggtatctggcaccaggagcttgtggctgtgtctcgaggctcctgcaccctctcagagcgttagttagaggcggggcggtggtgcggagcgagggccagagcagggcaccagggctgggcgcgcaccaggaagccgccgcctccagctgaatgcgcgagtcccggcgcggggtggggcaggggcgggcacggtcttcagtaactgcctagcgattggttgggaggcaccacaaatgcctaacaaactgctgaagcgccctccgaagggacagacctcatctccaccccgccccgtccctccgccagactggagcgcaaactatggtcgcattgatcactgaaggatcctcacagcaaccgctcctttccggagtcggatgagaggagagttgtgactggcaattggcaggggcggggcgggctaggcctgtagcgctgggcgaccgtcctgggcatggattgggccgcggggttgtcaccgttatccgggaggcgtggtcagcactaataaagg

SEQ ID NO: 8838 - DNA, 2300 bp, Homo sapien
gacacctgagtagctgggactacaggtgtccgccaccactcctggctaatttttttgtttgtttgtttttgtattttcagtagagacagggctgtgttagccaggatagtctcgatctcctgagctcgtggtccgcccccctccgcctcccaaggtgctgggattacaggcaggagccaccgcacccagccactttatttttagtagagacggagtttcaccatgtcgcccagaccagtctcaaattcctgtctccaagcaatcctcccacctcagcctcccaaaatgctgggattacatgtgggcaccattctgcccagctgtaattcttaaaaattattattaaaaaagaacaaaacacatagatgccctagactcaactcagctctactgatcaatctttaggggttaggactaggcttttgaaatgttaaaacacccagaaaactgatgaccagtcaggcttagtatccgccatctctaccattcatatggtacttaatgtttcatatttaaatggaaaggacacctcacacttttttgtttttcctatagttcctactcagagaatatgcctaataaatattttatgagagtagtacagaagtatgactccatttttctcttatatttcatttcagtgtggaaggctctttagaaacactattaacataacagcattatgtcaaaaagcgccaataacattctcaccaacttttctttttaaaggaattaggtatagctagactgtaaaaggcaagtggtgtgaagcccaaacctaagatcctaagatctaggatgagtcaagacttcatagtctacatgagtagaggcagcatctagaggaaaacaaaagtatgtggctatcaaattccaaagaagccccattttattacagagaaaatacaaagccgtttcctcacagggaaaagtacagtttcccttctccagggtgacagatgagccttttccgaagttctcagctttctcttctatcgaaacttcccatgtcggttaaagtgtttgtagagatagcggatgcgtttattaaggttgtgcaggtcatcagcgaacattctacttccaaccattttcctctttcggatacaacgttgcaattcattccctttccaacctcgaagccatatgggccccctgatcagttctttggggtgcttttcaaagtttcctgtgtaatgtgagagaacacattagatccaagacaagagaactcatcctacaccagctaagctttcaacccacggttgcatcttgctgagcagcacctatagacaaggaacattacagtacagaacaatagcacagactctggagccagactgcttggggttaaaattctgatgctgccatttattaactttggaaaaactgtttatttttacttatgaagtaaaaattatacgaggggactcagaacagtgccaaacacaatgtaaacagctacataagtgtttgctcttactattgagcacagtaccactctctacacaggaggaaaagatagtcgttacagcctaattgccattctgaaattgtgtaccacgtcgaaggtcaagtcttacccaggatcccgatgttgtcatacactccgaacatggcccttttctcgttccaacgatcaaccactttggggggcgggagagtgagccttataccgatcaatctaggcacacctggggatggggaagggagggaattaatctgagccgcctattatactacgaagcagttatcggggtgcctacatcagccacttaccaagagagaagcttctgcacgccagaggcacccagtcccacaggcgcctacctgccccggataagaggttccctgccatttctctagtctccccccttcaacagcacaccaaataagcccaagaagatgacaggaaccgtccccgccaacttcacacgagtactaaggcgaagacagccatcttgggccttacccaggcagctgtgggcgcaccgcccacctacgccccatccgcaacagccacgagccccgccccccgggttccggcaggaggggcctctaccacccttcccgcctcagtgcttccggtccgcctgccggaagttttggagcgccggacaagctgaggtccgcgactcgtcgctaagattccccaaaactgagatttcaagaaaattcaccctttccgctttctttggcgtccttcaaccgtgaaggaaatgaaggttgagaacctggaacccgcttccaatgaccaagccctttctctgtgcctcacaacagtcttccgctgtagctgt

SEQ ID NO: 8839 - DNA, 2300 bp, Homo sapien
cttttctttttaaaggaattaggtatagctagactgtaaaaggcaagtggtgtgaagcccaaacctaagatcctaagatctaggatgagtcaagacttcatagtctacatgagtagaggcagcatctagaggaaaacaaaagtatgtggctatcaaattccaaagaagccccattttattacagagaaaatacaaagccgtttcctcacagggaaaagtacagtttcccttctccagggtgacagatgagccttttccgaagttctcagctttctcttctatcgaaacttcccatgtcggttaaagtgtttgtagagatagcggatgcgtttattaaggttgtgcaggtcatcagcgaacattctacttccaaccattttcctctttcggatacaacgttgcaattcattccctttccaacctcgaagccatatgggccccctgatcagttctttggggtgcttttcaaagtttcctgtgtaatgtgagagaacacattagatccaagacaagagaactcatcctacaccagctaagctttcaacccacggttgcatcttgctgagcagcacctatagacaaggaacattacagtacagaacaatagcacagactctggagccagactgcttggggttaaaattctgatgctgccatttattaactttggaaaaactgtttatttttacttatgaagtaaaaattatacgaggggactcagaacagtgccaaacacaatgtaaacagctacataagtgtttgctcttactattgagcacagtaccactctctacacaggaggaaaagatagtcgttacagcctaattgccattctgaaattgtgtaccacgtcgaaggtcaagtcttacccaggatcccgatgttgtcatacactccgaacatggcccttttctcgttccaacgatcaaccactttggggggcgggagagtgagccttataccgatcaatctaggcacacctggggatggggaagggagggaattaatctgagccgcctattatactacgaagcagttatcggggtgcctacatcagccacttaccaagagagaagcttctgcacgccagaggcacccagtcccacaggcgcctacctgccccggataagaggttccctgccatttctctagtctccccccttcaacagcacaccaaataagcccaagaagatgacaggaaccgtccccgccaacttcacacgagtactaaggcgaagacagccatcttgggccttacccaggcagctgtgggcgcaccgcccacctacgccccatccgcaacagccacgagccccgccccccgggttccggcaggaggggcctctaccacccttcccgcctcagtgcttccggtccgcctgccggaagttttggagcgccggacaagctgaggtccgcgactcgtcgctaagattccccaaaactgagatttcaagaaaattcaccctttccgctttctttggcgtccttcaaccgtgaaggaaatgaaggttgagaacctggaacccgcttccaatgaccaagccctttctctgtgcctcacaacagtcttccgctgtagctgtttttattacccctattttactactggggaggagatttgaggtcctgaaagtgaagtgacttgctggacgtcacttagcagaggagatggcgaaacctggattagaggcgatgccttctaactcccagcgtggacttgcctcctttcctgggggtgactgaatgcccagccagggacgcgacgtctctggccagcagaaatacggcctcctccccgccgactgggcaaagggggaccttgcggccaaggagggattcgcaggcgggccgggggtgggagcgggggccggagccggagccttggcccgcccccgggcggcgctgtgattggccggccgctccggcgggcgtcgcgattggccgtcctgcagccgttgagatttgaactcggtatttgtggctttgcccgcgcgttgccagactcagaggcggccctttgcctctgcctgccggggattggccggattctccgccgacttgaaaactgccttgctaattggtgcgtgttgtgcacgcgtgttttttccttttcatttcagcctgactgccggaatcagagccgcgggtgagatccccaggtaagatgtggtgttgcaggtcgtaaaagagtaggaaagtcgagtacatggcagtgtgacccagtcttgggcaaaatacaataggcctagtaagtatatccctggggcgcgatgtgtgagaaactgtaagtctgacag

SEQ ID NO: 8840 - DNA, 2300 bp, Homo sapien
gtcatgcatcccatgcaattttaggataaaacagcaaaataggaaaaacatgtttcttgctcttatgatgcttcctggtgtagtggaacagaaatgacaatgtagcaattccatgtgagatggtcctttgaaagagctaggtacagtgacagctatggactcttacctctaagctgtggtggaagatgtttgatggacagtacctcttgcacaacatactgattcacccctccacttttcaacaactcctctggggataatggcagatggaactcatacatttggggagccattctactcctacaggctcacagggctagaaaccaaacagtgaaaaagtcagggtctatattcaagacctgtcttcgtatctggttctattactttcccatccccaacatatataatggcttttagttttatagcaagctagtaacatcatctggttttgttagttccccacccccaacatatataatggtttttagttttatagcaagctagtaacattatcttacgggatctgagattgaccctggactagaaactaattctagtagtgactttggcacttggtcttgacacttaaacctctgggctttatctgtaaaaacagggttactaaactctgattacttcacaaagttgctctgatgatcaaacaaatcaagcagtacgaaggtgtttaaagaactataaagtggcatattaatgtgcaaagtactattatttccatttttatgtgcaaagctccttaagtatagagagaatggtctgatctcgtctgaggccaaaacagtgccccagcatgggctagtgggcttcctgcaccagaatggtaagagcattaacaatgatgatttatttatcctgtgccaagtctgttaggctgtttgcatgtatcatatctgatctaagtatcctaacctcaatcccatgaggtgcataataatacaaatgagtttacagagcggaaattgaagtaagaaagttaagcgatttgcttaacatcttccgttgcggatctgttaagcgatttgcttaacatcttccgttgcggatctgttaagcgatttgcttaacaacttccgttgcggatctgtcagacttacagtttctcacacatcgcgccccagggatatacttactaggcctattgtattttgcccaagactgggtcacactgccatgtactcgactttcctactcttttacgacctgcaacaccacatcttacctggggatctcacccgcggctctgattccggcagtcaggctgaaatgaaaaggaaaaaacacgcgtgcacaacacgcaccaattagcaaggcagttttcaagtcggcggagaatccggccaatccccggcaggcagaggcaaagggccgcctctgagtctggcaacgcgcgggcaaagccacaaataccgagttcaaatctcaacggctgcaggacggccaatcgcgacgcccgccggagcggccggccaatcacagcgccgcccgggggcgggccaaggctccggctccggcccccgctcccacccccggcccgcctgcgaatccctccttggccgcaaggtccccctttgcccagtcggcggggaggaggccgtatttctgctggccagagacgtcgcgtccctggctgggcattcagtcacccccaggaaaggaggcaagtccacgctgggagttagaaggcatcgcctctaatccaggtttcgccatctcctctgctaagtgacgtccagcaagtcacttcactttcaggacctcaaatctcctccccagtagtaaaataggggtaataaaaacagctacagcggaagactgttgtgaggcacagagaaagggcttggtcattggaagcgggttccaggttctcaaccttcatttccttcacggttgaaggacgccaaagaaagcggaaagggtgaattttcttgaaatctcagttttggggaatcttagcgacgagtcgcggacctcagcttgtccggcgctccaaaacttccggcaggcggaccggaagcactgaggcgggaagggtggtagaggcccctcctgccggaacccggggggcggggctcgtggctgttgcggatggggcgtaggtgggcggtgcgcccacagctgcctgggtaaggcccaagatggctgtcttcgccttagtactcgtgtgaagttggcggggacggttcctgtcatcttcttgggcttatttggtgtgctgttgaaggggggagactagagaaatggcagggaacctcttatccggggcaggtaggcgcctgtgggac

SEQ ID NO: 8841 - DNA, 2300 bp, Homo sapien
gagacaattaagtaacttgtctaaggtcagagtggtagaaccaggattcaaatccaggcagcctggctccagtctttaatctctatacctctccaaagcaagctaactgctacaagaccgctcccaacaagtacaaggacattatgaagtctttctggtaatgcaaaaggtgcttttgatcatttacaggtttcagtaggtgactgcactgtacatatattgctcagtgttgcagtggtacatatatattatgggtttttgtccccataattgcacatccaaaaagactccaaaaaggtattaccaaaaacaggtcgagttaagtccgagacattctgaaaaagcgatccactcctataactcttaaatccaccaggacttaattttgacacacagtaaggggtaaagatggaaaataacttttccccaaagagtaatcacatacaccaagactgtttttgactaatccagaaaaggaagttaatgaatgtactctttgggtcatgcatcccatgcaattttaggataaaacagcaaaataggaaaaacatgtttcttgctcttatgatgcttcctggtgtagtggaacagaaatgacaatgtagcaattccatgtgagatggtcctttgaaagagctaggtacagtgacagctatggactcttacctctaagctgtggtggaagatgtttgatggacagtacctcttgcacaacatactgattcacccctccacttttcaacaactcctctggggataatggcagatggaactcatacatttggggagccattctactcctacaggctcacagggctagaaaccaaacagtgaaaaagtcagggtctatattcaagacctgtcttcgtatctggttctattactttcccatccccaacatatataatggcttttagttttatagcaagctagtaacatcatctggttttgttagttccccacccccaacatatataatggtttttagttttatagcaagctagtaacattatcttacgggatctgagattgaccctggactagaaactaattctagtagtgactttggcacttggtcttgacacttaaacctctgggctttatctgtaaaaacagggttactaaactctgattacttcacaaagttgctctgatgatcaaacaaatcaagcagtacgaaggtgtttaaagaactataaagtggcatattaatgtgcaaagtactattatttccatttttatgtgcaaagctccttaagtatagagagaatggtctgatctcgtctgaggccaaaacagtgccccagcatgggctagtgggcttcctgcaccagaatggtaagagcattaacaatgatgatttatttatcctgtgccaagtctgttaggctgtttgcatgtatcatatctgatctaagtatcctaacctcaatcccatgaggtgcataataatacaaatgagtttacagagcggaaattgaagtaagaaagttaagcgatttgcttaacatcttccgttgcggatctgttaagcgatttgcttaacatcttccgttgcggatctgttaagcgatttgcttaacaacttccgttgcggatctgtcagacttacagtttctcacacatcgcgccccagggatatacttactaggcctattgtattttgcccaagactgggtcacactgccatgtactcgactttcctactcttttacgacctgcaacaccacatcttacctggggatctcacccgcggctctgattccggcagtcaggctgaaatgaaaaggaaaaaacacgcgtgcacaacacgcaccaattagcaaggcagttttcaagtcggcggagaatccggccaatccccggcaggcagaggcaaagggccgcctctgagtctggcaacgcgcgggcaaagccacaaataccgagttcaaatctcaacggctgcaggacggccaatcgcgacgcccgccggagcggccggccaatcacagcgccgcccgggggcgggccaaggctccggctccggcccccgctcccacccccggcccgcctgcgaatccctccttggccgcaaggtccccctttgcccagtcggcggggaggaggccgtatttctgctggccagagacgtcgcgtccctggctgggcattcagtcacccccaggaaaggaggcaagtccacgctgggagttagaaggcatcgcctctaatccaggtttcgccatctcctctgctaagtgacgtccagcaagtcacttcactttcaggacctcaaatctcctccccagtagtaaaat

SEQ ID NO: 8842 - DNA, 2300 bp, Homo sapien
ggatggcccctcaacaaagaatcacacggcccacaatgtcaatagcgtcacagttgagaaaacctgctctagaccaagggttgctttctgccgtgtgcctcaccccacccccactcgtgttccctaatcccatctccaaaggttggcagcagaccggcccaggctcgtggaagttcagatcatgatcccctccagctctgcaggagacaagacctgtctcccagcattcctcattgttcccgggtctgcagagggcgtgagctatgctgcaggcgggctgccccctgaagcctgcgcacccctctccagctcctcaagtcttctctgctgagtcaccttcgaaccggaggctgtgagctggctgtcgtgaccacactggtgcctctgctgtcatgacaacagcacactacgtcagtagtgctccctgggcactgagctccctctttgcggggagaagacagtaatgaaaaatgacaagcatgaggcagaggggaagatcacgcttgggtggtgcaggagcatggaggtgctcttaatgctctcaatgagaaagggttaacggtcctggttgcaggaatagctgagtcagaggtggggcttcctccactcccccaccccacccctttcaccattagggaccttcttgccttgctcttgctactctgctctgggtggtcattgtgaaaagcccgcaccaaccatgccagtggcagccagacgaggacacagcctggctctgggtcccagcaggaaaggcaatcccagaaaggcagggtcagggactggagtcctgtgggtgctttttaagcaaagattatcaccaggcaggctaaacttagcaaccggcttttagctagaagggcagggggctggtgtcaggttatgctgggccagcaaagaggcccgggatccccctcccatgcacctgctgatgggccaaggccaccccaccccacccccttccttacaagtgttcagcaccctcccatcccacactcacaaacctggccctctgccctcctaccagaagaatggatcccctgtgggagggggcaggggacctgttcccaccgtgtgcccaagacctcttttcccactttttccctcttcttgactcaccctgccctcaatatcccccggcgcagccagtgaaagggagtccctggctcctggctcgcctgcacgtcccagggcggggagggacttccgccctcacgtcccgctcttcgccccaggctggatggaatgaaaggcacactgtctctctccctaggcagcacagcccacaggtttccaggagtgcctttgtgggaggcctctgggcccccaccagccatcctgtcctccgcctggggccccagcccggagagagccgctggtgcacacagggccgggattgtctgccctaattatcaggtccaggctacagggctgcaggacatcgtgaccttccgtgcagaaacctccccctccccctcaagccgcctcccgagcctccttcctctccaggcccccagtgcccagtgcccagtgcccagcccaggcctcggtcccagagatgccaggagccaggagatggggagggggaagtgggggctgggaaggaaccacgggcccccgcccgaggcccatgggcccctcctaggcctttgcctgagcagtccggtgtcactaccgcagagcctcgaggagaagttccccaactttcccgcctctcagcctttgaaagaaagaaaggggagggggcaggccgcgtgcagccgcgagcggtgctgggctccggctccaattccccatctcagtcgttcccaaagtcctcctgtttcatccaagcgtgtaagggtccccgtccttgactccctagtgtcctgctgcccacagtccagtcctgggaaccagcaccgatcacctcccatcgggccaatctcagtcccttcccccctacgtcggggcccacacgctcggtgcgtgcccagttgaaccaggcggctgcggaaaaaaaaaagcggggagaaagtagggcccggctactagcggttttacgggcgcacgtagctcaggcctcaagaccttgggctgggactggctgagcctggcgggaggcggggtccgagtcaccgcctgccgccgcgcccccggtttctataaattgagcccgcagcctcccgcttcgctctctgctcctcctgttcgacagtcagccgcatcttcttttgcgtcgccaggtgaagacgggcggagagaaacccgggaggctagggacggcctgaaggcggcaggggcgggcgcaggccggatgt

SEQ ID NO: 8843 - DNA, 2300 bp, Homo sapien
aagggcagggggctggtgtcaggttatgctgggccagcaaagaggcccgggatccccctcccatgcacctgctgatgggccaaggccaccccaccccacccccttccttacaagtgttcagcaccctcccatcccacactcacaaacctggccctctgccctcctaccagaagaatggatcccctgtgggagggggcaggggacctgttcccaccgtgtgcccaagacctcttttcccactttttccctcttcttgactcaccctgccctcaatatcccccggcgcagccagtgaaagggagtccctggctcctggctcgcctgcacgtcccagggcggggagggacttccgccctcacgtcccgctcttcgccccaggctggatggaatgaaaggcacactgtctctctccctaggcagcacagcccacaggtttccaggagtgcctttgtgggaggcctctgggcccccaccagccatcctgtcctccgcctggggccccagcccggagagagccgctggtgcacacagggccgggattgtctgccctaattatcaggtccaggctacagggctgcaggacatcgtgaccttccgtgcagaaacctccccctccccctcaagccgcctcccgagcctccttcctctccaggcccccagtgcccagtgcccagtgcccagcccaggcctcggtcccagagatgccaggagccaggagatggggagggggaagtgggggctgggaaggaaccacgggcccccgcccgaggcccatgggcccctcctaggcctttgcctgagcagtccggtgtcactaccgcagagcctcgaggagaagttccccaactttcccgcctctcagcctttgaaagaaagaaaggggagggggcaggccgcgtgcagccgcgagcggtgctgggctccggctccaattccccatctcagtcgttcccaaagtcctcctgtttcatccaagcgtgtaagggtccccgtccttgactccctagtgtcctgctgcccacagtccagtcctgggaaccagcaccgatcacctcccatcgggccaatctcagtcccttcccccctacgtcggggcccacacgctcggtgcgtgcccagttgaaccaggcggctgcggaaaaaaaaaagcggggagaaagtagggcccggctactagcggttttacgggcgcacgtagctcaggcctcaagaccttgggctgggactggctgagcctggcgggaggcggggtccgagtcaccgcctgccgccgcgcccccggtttctataaattgagcccgcagcctcccgcttcgctctctgctcctcctgttcgacagtcagccgcatcttcttttgcgtcgccaggtgaagacgggcggagagaaacccgggaggctagggacggcctgaaggcggcaggggcgggcgcaggccggatgtgttcgcgccgctgcggggtgggcccgggcggcctccgcattgcaggggcgggcggaggacgtgatgcggcgcgggctgggcatggaggcctggtgggggaggggaggggaggcgtgtgtgtcggccggggccactaggcgctcactgttctctccctccgcgcagccgagccacatcgctcagacaccatggggaaggtgaaggtcggagtcaacgggtgagttcgcgggtggctggggggccctgggctgcgaccgcccccgaaccgcgtctacgagccttgcgggctccgggtctttgcagtcgtatgggggcagggtagctgttccccgcaaggagagctcaaggtcagcgctcggacctggcggagccccgcacccaggctgtggcgccctgtgcagctccgcccttgcggcgccatctgcccggagcctccttcccctagtccccagaaacaggaggtccctactcccgcccgagatcccgacccggacccctaggtgggggacgctttctttcctttcgcgctctgcggggtcacgtgtcgcagaggagcccctcccccacggcctccggcaccgcaggccccgggatgctagtgcgcagcgggtgcatccctgtccggatgctgcgcctgcggtagagcggccgccatgttgcaaccgggaaggaaatgaatgggcagccgttaggaaagcctgccggtgactaaccctgcgctcctgcctcgatgggtggagtcgcgtgtggcggggaagtcaggtggagcgaggctagctggcccgatttctcctccgggtgatgcttttcctagattattctctggtaaatcaaagaagtgggtttatggaggtcct

SEQ ID NO: 8844 - DNA, 2300 bp, Homo sapien
gtccggatgctgcgcctgcggtagagcggccgccatgttgcaaccgggaaggaaatgaatgggcagccgttaggaaagcctgccggtgactaaccctgcgctcctgcctcgatgggtggagtcgcgtgtggcggggaagtcaggtggagcgaggctagctggcccgatttctcctccgggtgatgcttttcctagattattctctggtaaatcaaagaagtgggtttatggaggtcctcttgtgtcccctccccgcagaggtgtggtggctgtggcatggtgccaagccgggagaagctgagtcatgggtagttggaaaaggacatttccaccgcaaaatggcccctctggtggtggccccttcctgcagcgccggctcacctcacggccccgcccttcccctgccagcctagcgttgacccgaccccaaaggccaggctgtaaatgtcaccgggaggattgggtgtctgggcgcctcggggaacctgcccttctccccattccgtcttccggaaaccagatctcccaccgcaccctggtctgaggttaaatatagctgctgacctttctgtagctgggggcctgggctggggctctctcccatcccttctccccacacacatgcacttacctgtgctcccactcctgatttctggaaaagagctaggaaggacaggcaacttggcaaatcaaagccctgggactagggggttaaaatacagcttcccctcttcccacccgccccagtctctgtcccttttgtaggagggacttagagaaggggtgggcttgccctgtccagttaatttctgacctttactcctgccctttgagtttgatgatgctgagtgtacaagcgttttctccctaaagggtgcagctgagctaggcagcagcaagcattcctggggtggcatagtggggtggtgaataccatgtacaaagcttgtgcccagactgtgggtggcagtgccccacatggccgcttctcctggaagggcttcgtatgactgggggtgttgggcagccctggagccttcagttgcagccatgccttaagccaggccagcctggcagggaagctcaagggagataaaattcaacctcttgggccctcctgggggtaaggagatgctgcattcgccctcttaatggggaggtggcctagggctgctcacatattctggaggagcctcccctcctcatgccttcttgcctcttgtctcttagatttggtcgtattgggcgcctggtcaccagggctgcttttaactctggtaaagtggatattgttgccatcaatgaccccttcattgacctcaactacatggtgagtgctacatggtgagccccaaagctggtgtgggaggagccacctggctgatgggcagccccttcataccctcacgtattcccccaggtttacatgttccaatatgattccacccatggcaaattccatggcaccgtcaaggctgagaacgggaagcttgtcatcaatggaaatcccatcaccatcttccaggagtgagtggaagacagaatggaagaaatgtgctttggggaggcaactaggatggtgtggctcccttgggtatatggtaaccttgtgtccctcaatatggtcctgtccccatctcccccccacccccataggcgagatccctccaaaatcaagtggggcgatgctggcgctgagtacgtcgtggagtccactggcgtcttcaccaccatggagaaggctggggtgagtgcaggagggcccgcgggaggggaagctgactcagccctgcaaaggcaggacccgggttcataactgtctgcttctctgctgtaggctcatttgcaggggggagccaaaagggtcatcatctctgccccctctgctgatgcccccatgttcgtcatgggtgtgaaccatgagaagtatgacaacagcctcaagatcatcaggtgaggaaggcagggcccgtggagaagcggccagcctggcaccctatggacacgctcccctgacttgcgccccgctccctctttctttgcagcaatgcctcctgcaccaccaactgcttagcacccctggccaaggtcatccatgacaactttggtatcgtggaaggactcatggtatgagagctggggaatgggactgaggctcccacctttctcatccaagactggctcctccctgccggggctgcgtgcaaccctggggttgggggttctggggactggctttcccataatttcctttcaaggtggggagggaggtagaggggtgatgtggggagtacgctgca

SEQ ID NO: 8845 - DNA, 2300 bp, Homo sapien
cagcacttgcccaaacagagctcctggtgcacagcccggaggttccgggaaggcagctggcgagctcgacgcccatcaggaagcacagagccgcgtgacagctgcagttggtcaccagctggctggccaggcattcctgtgccctgctcctccccatccagggaaccagaactggggtctgaggcctgagccagagaggtggggacagggagccatgggggcagggaaggactctgtacctaagctctctccgcccttcccatgtctgtcaggtgggaagaggagtacacggtgcggatccagctgcaagaccgtgtaaatgagctccaggaggtgagggtggcgccccacttgctgctggtgcttccctgggtacccctgtctgcccatgaccctgctgccgtctccctgtccctccttggcatctttatcttcctcccacctcggcagtgccaccaacatcagggtttctcccaactgcaggaagcccaggaggctgatgcctgccaggaggagctggcactgaaggtggaacagttgaaggctgagctggtggtcttcaaggggctcatgagtaacgtgagtgcagccccaggcttcccgagggtcgaagtgaggcttctgaggccagaagagtaggcccttctagtgttggcctgttggcctcccgtccacggctcctccccttctctttgctttccttccctttttcccctagccacccctaactccagagaaagacaagcaacaaaagtctcggtgttgcgtcacagaggtggcgcagcttctgagggcctggggttgcagagcagttagtgagcagcttctggggtggaggctctgcagctggcgccggggcgctgggccgattcctcagcctctgaggcctcacctttggcgtggggaaataaacgcgtgcgctctgcaggagtattgtgagggtggtcatgtactcgggacagtgcccagcatgcagtgttagctggaagagtgttagctgttgcgattattatagtcctttctccactcttataattcccaggagtctctttctctctgggaatgtaagttctaggaggatgaggaccgctagtcgttccagtgagccccctgcatgtcccaggcactggccatgccctccagggcttccgtttggccagggagcagtggcccgagccgccccatgcccagcatattcacacagtgctgtggggaggccaccgctacccaggaagaggggtgcagtcagctcagggagactccacagaagaggcaccggtgcaatgtggtgggaaggatgaggaccttgccaggcctaattcgtccttgtctggagaactgggcgcctcctcactgttccctgggctccctggacagaacctgtcggagctggacaccaagatccaggagaaagccatgaaggtggatatggacatctgccgccgcatcgacatcaccgccaagctctgcgatgtggctcagcagcgcaactgcgaggacatgatccagatgttccaggtgaggacggagctgccctctgctctcaggggtgggtggggcaggtggatgcttccgtggcggctggcctggaacgcaggccctgcctcctgcttggggagccttacctggcaactggggccctcacggggctagactggggggtaaggagcagcatcaggaggggcatcgtggaagctgtctctaacgccgtctctcccttccccctctctctcctctgtctgcttcctctcctctcttcctctcatcttctctcttgcttcctccacagaagaagctggttagtttgatctcacgcaagcttattaatgtcccagtcccagtttctaagctgcctaggcctcctggccctcagtttgggcccgctgggctcttgagcacggatttttttctgccctttcccttttccttgctcttccccctttttctctctatctcttgttctcttgactgcatttctttctctcccttctcccccggctttccagatctggatgtgattcaggttctcttttgtacacattgcacactcatcctccttgcgtcctaaagcttttttttttttagttgagtcatttaatcaaaaagactttttttagaaaaaaatttcctcttgagccatcatgcacatctgactgcagccccagcgagcccttccttccttgtctgactgctcttcttctcgatttcttcttgttctgccttctcggtttgcagccctgacccccgctgtgtgtctggcccttggtgactgtccgtgtttctgttcctgtcattgtaac

SEQ ID NO: 8846 - DNA, 2300 bp, Homo sapien
ccacagttcatgccttcacatcatagatgaagaaaccaagacccagaaaagataagggtcttagctaagaaaacataatctgatgcgactggttcccttagtggcctgactgtatgcatgagaatgccagggaggaggggagaagcacctacgggacacacagggaagggggctgggagccaggaaggctgggagctgggctgtgtggggagccagcagggtggtggctgggctggctgcctcctcctgctctgcccagcagggaggggcagtcgaggtgatgtggaggagttattattaggaatactgcagtgcggctgtgaatgaggagatgggacccagaggctgacacaggaaggaagatggagggaaggggaagaaagggcttcacccaaggcttcagaagctgcccactcagattttaattttcttgctgtcttcttggccccttcctaaccacctttcttgtgttgaagtttctctcttggtgcagttcccctcccttctcgggttgacagaagtgatgagctcacaggaacaggatttgagatgtgctgctacgccagctagactgcagggccctggaatgccgggcgggtcctaagcagcacgttgccctggcttccatctctgtgatggaatagaatatgcactgcctgccatggctgatgagacatgacaaagctggctctgggaagcatgccctacctaggaccctgccctgtggcccagggtgtcgtccggcccacttgcagtcttaatctctgaattctgggccctggaacaggctgtgtctagttctcatttgccgtactcaccgggcccctttacatactctactttctctttccctctgggtttgagtgctagtaaccccaggctcgtgtgtccactgctgtcatgctgctgtgggacttccggcctctgagccagtctggtcacctctctgtgactcccttagaggaggctctgggtgggtagtttctggagctagtggggaaggactttgagtgtctcctaccaggctcttgacccactctgttgatacactatgtgtcctgcagatgcttttacagggttaaatgataccacaagaggcagggcagcgggctcgacgagctctgttctggtgcgggcaggaggcgggagcccggatctgtgcgactgaaggtgggagactgggccgggtggacctggtggtctggtgtgggcaggaggtgggcaatgaggccagccggacagctggctgagctggggcctgagcagggatgggcatcacggaggaccggagcctcagcacttgcccaaacagagctcctggtgcacagcccggaggttccgggaaggcagctggcgagctcgacgcccatcaggaagcacagagccgcgtgacagctgcagttggtcaccagctggctggccaggcattcctgtgccctgctcctccccatccagggaaccagaactggggtctgaggcctgagccagagaggtggggacagggagccatgggggcagggaaggactctgtacctaagctctctccgcccttcccatgtctgtcaggtgggaagaggagtacacggtgcggatccagctgcaagaccgtgtaaatgagctccaggaggtgagggtggcgccccacttgctgctggtgcttccctgggtacccctgtctgcccatgaccctgctgccgtctccctgtccctccttggcatctttatcttcctcccacctcggcagtgccaccaacatcagggtttctcccaactgcaggaagcccaggaggctgatgcctgccaggaggagctggcactgaaggtggaacagttgaaggctgagctggtggtcttcaaggggctcatgagtaacgtgagtgcagccccaggcttcccgagggtcgaagtgaggcttctgaggccagaagagtaggcccttctagtgttggcctgttggcctcccgtccacggctcctccccttctctttgctttccttccctttttcccctagccacccctaactccagagaaagacaagcaacaaaagtctcggtgttgcgtcacagaggtggcgcagcttctgagggcctggggttgcagagcagttagtgagcagcttctggggtggaggctctgcagctggcgccggggcgctgggccgattcctcagcctctgaggcctcacctttggcgtggggaaataaacgcgtgcgctctgcaggagtattgtgagggtggtcatgtactcgggacagtgcccagcatgcagtgttagctggaagagtgttagctgttgcga

SEQ ID NO: 8847 - DNA, 2300 bp, Homo sapien
aaaggcctcctgcgttctattttcagctcccctgccttgtgcgtgacctttttttgagcccccattttcccaacataggaatggtccctgctttctctcttcaacccagggatacagttttttggaagagagatatttggtccatgcagaacacatggatatcgctctcaaattctgcccatgttaagggaaccttataagtgagaccagatggaaatggaggtgaaaatgaacctgtctgtgtgaagtctggccaaagaacaaatagaactgtagtgggcttccagatgattcatttgtagattttttttaccctgtaagatttccttaggcttaacctttagctataactgccttacttaagtttcttccaggctctgttgagctcactgtcagatagcccctcctgccctctttcacacatcttgtccagggttagcgtgcccttgacaggcttactgtctccctccagggactcgtgggctcccggcgcatgagggcaccacagttcatgccttcacatcatagatgaagaaaccaagacccagaaaagataagggtcttagctaagaaaacataatctgatgcgactggttcccttagtggcctgactgtatgcatgagaatgccagggaggaggggagaagcacctacgggacacacagggaagggggctgggagccaggaaggctgggagctgggctgtgtggggagccagcagggtggtggctgggctggctgcctcctcctgctctgcccagcagggaggggcagtcgaggtgatgtggaggagttattattaggaatactgcagtgcggctgtgaatgaggagatgggacccagaggctgacacaggaaggaagatggagggaaggggaagaaagggcttcacccaaggcttcagaagctgcccactcagattttaattttcttgctgtcttcttggccccttcctaaccacctttcttgtgttgaagtttctctcttggtgcagttcccctcccttctcgggttgacagaagtgatgagctcacaggaacaggatttgagatgtgctgctacgccagctagactgcagggccctggaatgccgggcgggtcctaagcagcacgttgccctggcttccatctctgtgatggaatagaatatgcactgcctgccatggctgatgagacatgacaaagctggctctgggaagcatgccctacctaggaccctgccctgtggcccagggtgtcgtccggcccacttgcagtcttaatctctgaattctgggccctggaacaggctgtgtctagttctcatttgccgtactcaccgggcccctttacatactctactttctctttccctctgggtttgagtgctagtaaccccaggctcgtgtgtccactgctgtcatgctgctgtgggacttccggcctctgagccagtctggtcacctctctgtgactcccttagaggaggctctgggtgggtagtttctggagctagtggggaaggactttgagtgtctcctaccaggctcttgacccactctgttgatacactatgtgtcctgcagatgcttttacagggttaaatgataccacaagaggcagggcagcgggctcgacgagctctgttctggtgcgggcaggaggcgggagcccggatctgtgcgactgaaggtgggagactgggccgggtggacctggtggtctggtgtgggcaggaggtgggcaatgaggccagccggacagctggctgagctggggcctgagcagggatgggcatcacggaggaccggagcctcagcacttgcccaaacagagctcctggtgcacagcccggaggttccgggaaggcagctggcgagctcgacgcccatcaggaagcacagagccgcgtgacagctgcagttggtcaccagctggctggccaggcattcctgtgccctgctcctccccatccagggaaccagaactggggtctgaggcctgagccagagaggtggggacagggagccatgggggcagggaaggactctgtacctaagctctctccgcccttcccatgtctgtcaggtgggaagaggagtacacggtgcggatccagctgcaagaccgtgtaaatgagctccaggaggtgagggtggcgccccacttgctgctggtgcttccctgggtacccctgtctgcccatgaccctgctgccgtctccctgtccctccttggcatctttatcttcctcccacctcggcagtgccaccaacatcagggtttctcccaactgcaggaagcccaggaggctgatgcc

SEQ ID NO: 8848 - DNA, 2300 bp, Homo sapien
tagaagtaaatgcaaagtaaagaggcaaaacctacaagcattttgccttcagaagaagatgtagtgttctcctgcactagtgatcccacccagaacacaaatgtggctctgtctcccgtgaaagcatcagatttgctttctgagctcagtatgcccatttcaataattgcaaagtgatggcaagaagtggcgttgaacacatgactacagacccttgacttaaaatattgagacagggacttgctctgtcatccgggctggagtgcagtagcgtcatcacagctcactgcagcctcatcctcctgggctcaagcaatcatcctgcctcagcctcttgagtagctgggactacaggtgtgcactaccatgtccatgcctggctattttttttttttctttttgcgttgtccaggccagtctcaaactcctgacctgatcagcaggctttctgagcttgagtcctgtcctcgtgctggcttccttagttgtggtccatgttatgtgtccttgggagtttcagttgtcctgaaatcatcgttctgccacccagaaccagcctgctctgcccctgcaggagttaactacgcgctcagcagtggcacaggcacagttctggaatacatccataaccacaggaacaactgctgttctcaggagcattttttttttaaactgaaggagcgtttgtccttggtccagctgtccaggacaggaaggagttattccttggggactgattagctcatcgctctgcagcacgctgctgtgtagagagccttagctggattcggatggtgcgtgatactggcagtgactcttcttcctccctagattccctgccctcattctggtctctttatagcaacactgtaactcctgtcttctgcctggaaggcctgggatggcttgagcgctacactgggaggtagctaaaggcctcctgcgttctattttcagctcccctgccttgtgcgtgacctttttttgagcccccattttcccaacataggaatggtccctgctttctctcttcaacccagggatacagttttttggaagagagatatttggtccatgcagaacacatggatatcgctctcaaattctgcccatgttaagggaaccttataagtgagaccagatggaaatggaggtgaaaatgaacctgtctgtgtgaagtctggccaaagaacaaatagaactgtagtgggcttccagatgattcatttgtagattttttttaccctgtaagatttccttaggcttaacctttagctataactgccttacttaagtttcttccaggctctgttgagctcactgtcagatagcccctcctgccctctttcacacatcttgtccagggttagcgtgcccttgacaggcttactgtctccctccagggactcgtgggctcccggcgcatgagggcaccacagttcatgccttcacatcatagatgaagaaaccaagacccagaaaagataagggtcttagctaagaaaacataatctgatgcgactggttcccttagtggcctgactgtatgcatgagaatgccagggaggaggggagaagcacctacgggacacacagggaagggggctgggagccaggaaggctgggagctgggctgtgtggggagccagcagggtggtggctgggctggctgcctcctcctgctctgcccagcagggaggggcagtcgaggtgatgtggaggagttattattaggaatactgcagtgcggctgtgaatgaggagatgggacccagaggctgacacaggaaggaagatggagggaaggggaagaaagggcttcacccaaggcttcagaagctgcccactcagattttaattttcttgctgtcttcttggccccttcctaaccacctttcttgtgttgaagtttctctcttggtgcagttcccctcccttctcgggttgacagaagtgatgagctcacaggaacaggatttgagatgtgctgctacgccagctagactgcagggccctggaatgccgggcgggtcctaagcagcacgttgccctggcttccatctctgtgatggaatagaatatgcactgcctgccatggctgatgagacatgacaaagctggctctgggaagcatgccctacctaggaccctgccctgtggcccagggtgtcgtccggcccacttgcagtcttaatctctgaattctgggccctggaacaggctgtgtctagttctcatttgccgtactcaccgggcccctttacatactctactttctctttccctctgggtttgagtgc

SEQ ID NO: 8849 - DNA, 2300 bp, Homo sapien
cagtgatttttttttttttttttttttttttgagacggtgtcttgctttgtcgctcaggctggactgcagtggtgcaatctcagctcattgcaacctccaccttccaggttcaagcgattcttgtgcctcagactcccaagtagctaggattacaggtgtgtaccaccatccctggctaatttttgtatttttagtagagatggtttcaccatgtgggctaggctggtcttgaactcctggcctcaagcaatccacttgccttggcctcccaaagtgctggaattacaggtgtgagccaccacgcctggcctataggcagtgatcttttaatacaaggttcaactaggacttgagtaaaggccaagttatattaagtaatgggaatttaggtaatctgctcttaggcactgacctaattgtgtggagctcctgcccaggaaatggcaattctcatattttaatatgagaatattaaaatatggtgataaggcccattttctgacaccatctgtttaattttaaccccaggaaattctgaaacagccacacctacaaatgtagacttgcctcaggtcatccccaagtctgagaacagcagccagccagccaagaaagccaagggggctgcaaagacaaagcagcagctgcagaaacagcaacatcccaagaaggcctccttccagaagctgaatggcatctccaaaggggcagactcagaattgtccactgtaccttctgtcacaaagacccaagcttcctccagcttccaggatagcagtcagccagctggaaaagccgaagggatcagggagccaaaggtgactgggaagctaaagcaacgatcacctaaattacagtcctccaagaaagttgctttcctcaggcagaatgcccctcccaagggcacagacacacaaacaccggctgtgttatccccatccaagactcaggccaccctgaaacctaaggaccatcatcagccccttggaagggccaagggggttgagaagcagcagttgccagagcagccttttgagaaagctgccttccagaaacagaatgatacccccaaggggcctcagcctcccactgtgtctcccatccgttccagccgccccccaccagcaaagaggaagaaatctcagtccaggggcaacagccagctgctgctatcttagatggttgaaaactagacgggtggctcactgccattgtcaccaggttggaactcttgcctctgtgaggatgccttctctactgtgcatacccatgaaatttaatacacattttaaaacctctggccactgagtatttttgagggaactgggtgctgcctttgccgctttaagggtaaagatgggaggtgggactgggatcttctgaggagagggaatggttgggtgctactgagaaataaggtcagttttaggctcctgcatccttgggttttcccaggaagggaaagccctggagtcagagctaggggtgattgaactccggggagaggagggcaatagaagtgtaggggaaggcggggcacactagctcatgcctgtaatcccagcactttctgggaggccaaggcgggtggatcacctgaggtcaggtgttcgagaccagcctggctaacatggcgaaacctcgtctctactaaaaatacaaaaaatcagccgggtgtggtggcgggtgcctgtaatcccagctactcgggagactgaagcaggagaatcgcttgaacctgggaggctgaggttgcagtgagccaagatcgcgccactgcactccagcccgggcgacagtgagactcggtctcaaaaaaaaaaaaagtcgtgtaggggagatgggcttgccaccagaacccatggggtactggaggtcctgggctttacgccaccccggctggagtccaggcggtggctcccctcatcacagggctcggcctcagacccggaaaggtccagggtccggcctccaattggagcctgtcattggcttcccctcggcccgccccctgacctctgccccgctgccgagccgcctgattggtcggctctgtcccgccggcgccgcattggctcttctggctcgccttccatccctgctcctgcaccggtctgcatctcccagcagaaggcgcagccatgaatccgttattcggccccaacctcttcctcctgcagcaggagcagcagggcctggccgggccactgggggactcactgggaggcgaccacttcgccgggggaggagacttgcccccggcgcctctctcgccggccggccctgctgcctactcgcc

SEQ ID NO: 8850 - DNA, 2300 bp, Homo sapien
cactgtaacgcctgttacacacaaactgttgtgggttcctgccaggcttgaagaaaatgatctgaattttttcctccttttggttttattttgttggtttattttgtgttttcttttctcctttttggggggtattcagagtgggctgggcccctgggcgagacacagctacctctgttggcatctttttaataccaggaacccagcggctctagccactgagcggctaaatgaaataaagtggaaaaaaaaaaaaaggaaaaaaccaaaagcataaaaaaccacagcaaatttcttgatgaaaattgaaaataaaagtttccttgtattttagtgctctggttcagtgtgggtgtaggtgcaggtggatgagtgtgtgcggcaggagcctggcacctgtatagttgaaaattaagggctacgtggtgtcctgataccccactgagtaactgggttctgtgtgtgggtgcagtatgtgccttgccaacgttgacttccacctgtggaaaatgagaggctgcaaaactgcgggcaccgccgcttaatggctctgtgaccttgagcaagttgtttaactttggtgggatgcagatatctcatgtatacctcatacggttgtcaagttaaaccagtgaagtacatggaacggttttaacacctaaccactaccttaatgttagtttctaggaaggctgaggggggttttcttgctaagttgtgcaaaattgggatgcaatttgtggaagaacacagcctcaatcccacacccccggaggcccgacctaacgtcctccaaccttgaaacccttgtagttcaccccttctcatgtcccagaccaggtcagccttgcaacccgttgtttcccaactaattgtagacccacctgaaagcgagttccggcgaagaggccccctgcgaatgaggtgcagtgcagcaccttaattgaggggctgagcaggggtcagcatcaaggaaggtgctgggagggcggggcacggtggctcacagcctgtaatctcagcacaaaggtgggggcaggaggatcgcttaagcccaggagttctagaccagccctggcaatatagtgagacgccaccccctacaacccgtctctataaaaagatttttaaaaaaggggcaaagaggaggaggtaagtggcatggaattccacggttttttttgtttgtttgttttgagatggagtctcgctttgttgccaggctggagtacagtggcgcgatctcagctcactgcaacctccccctcccgggttcaagcgattctcctgcctcagcctcccgagtagctgggactacacgcgtgcgccagccaccatgcccaactaatttttgtatttttaatagagacaaggttggccaagatggtctcggatttcttgacctcgtgatccgcccgcctcgacctcccaaagtgctgggattacaggcgtgagccaccgagcccggctggtttttttgttttttttttttgaggtggagtttcgctcttggtgaggcttaagtggcacgatctcggcttactgcaacctccgcctcccgggctcaagcaattctgcctcagcctctcgagtagctgggattataggcgcccgccaccacgcccggctaattttgtatttttagtagaagcagggtttcaccatattggccaggctggtctcgaactcctgacctcaagtgatccacccacctcagcctcccaaagtgctgggattacaggcgtgagccactgcgcccagcctggaattccgtgatcttgacgctggactagggcagtggatgcgagggagagggctccaatgtcgggccctggttcgaggagaaggtgcggctttcacccaacagaaaccggccgtgaggctaaaagccaactccatgagggaaggtcggtcaagctcaatggtttcgtcacattgctccctccacccgccgcgggtgtaagctgcgcgtctccttcgaattgccccctactcgccgccgccggctccgctggcgttcccagggcgagcgtaagttccgggtgcggcggccgactaggcgcaacaggaagaggcggggccgcgaggctagcgctacccgtgcgcctgcgtggaacgattctgtggcgagtgccggccgaaagctaggtccggattgcacgtggagggccgcccgaagggcactctcggacattaacccgcattctggtgggtctagaggaaattgggggacgaagagtggcagcactgacctggtctgggacgtggggagaagggtgcgctacctgggtttcaggtgg

SEQ ID NO: 8851 - DNA, 2300 bp, Homo sapien
ccgagctagtcttgaactcctggactcaagcaatcagctcttttaaatgctgagattagccactgtgtctgcctctctgagaactttcttttcttgtcttttttgaggtgagtctcgctctgtcgccagactggagtgcagtggtgcgatctcggctcactgcaacctccgcctcccgggttcaagcgattctggagaactttcttatgccaatcagcaatctctctcctgatatgcagaatggcattcatttgattacacatgtgctcctacttgaaactgaaagctccttgaaaacagataccatgctttgtctttttatccctgggcacatcattgcttagtacataatacctgaaggcttattagtgtaccatttcttccccgattatactcagcgtacgagacaacagacacgtctttttttttttttgagacagagtctcactctgttgcacaggctggagtgccgtagcacgatctcagctcactgaaatctctacctcccgacttcaagcgattctcctgcatcagcctcccaaagtgctgggattacaggcgtgagccaccgcacctggcccacacaggcactttttagcccagaaaaaagaaccaggccaggcatggtggctcatgcctataatcccagcaatctgggtggccaaggcaggtggatcacttcgaggtcaggagtttgagaccagcctagccaacatggtgaaaccccatctctactaaaaatccaaaaaaaacagctgggtgtggtggcaggcgcctgtaatctcagctactcaggaggctgaggcgggagaatcacttaaacccaggacacagaggttgtagtgagcagaggctgcatcactgcattccagcctgggcgacagagattctgcctcaaaaaaaaaaaaaaaaaaaaaacaaccagcagcccactgactaatagctctacatcttcagagatgcaattcaatcccacctctatatctttcctgaatactccaatctgcagtgttccccaaacaaacccctctgcactagtgtgtcactgattggacacatagtcacctacagctcatgtacagttagttaactttcaattctgtgtgtcttcaaccctaatgtgtaagttacttgggagcaaagccttccatagaatgaagaaagtgagaacagtgcgctggatggacagactccctctgctgcaggacgttacgcactttcaagtttgtcacttaagcaatatattcctccccaaccgctcaccttaaaccttcgagctagaaatttattcttgatctctaagaaattgccacggttcatttcacccttgaaaggctcattgaggatggcatagcgtgggtcattctggatgtcttgccaccgggcatagccatggctattggaaaagtgctcaggaaaaacaaaacaaggaaagtaagaacctcaaactaaaagaccttcagaacctttcaccaaaagcctcagtacagattcaggcaaaggatactttataatgccggctagcagccagtagtcatgccgtcgatgccagatctcataagtcttcttggtaactgtggctgcccgctcttcattctgccaaagggagtgcaactctgaggaggaatttagggaaggttgggggtggggggaagcaaacatctgtgagaattgaaaaagctacttattcttgtcccccaccatcccctacccctggatccatttcatataatttgcttctggctttctccacagaacccactatcagtttggcattccctcatcaaacagaggtaaagaggtaaagtccctgtaccgtggtttctgacaagaaccccaatttcacatcagatccttctaaccctggtgggcccctcatttccataccagtaaaaccaccatctgcaatgttaaacatgaaacgttgtttaatatttttcttctgtttctcatcattcaggtccttgggggtctctccattctgaagcatcacctcttttttctcttcttcttctttcttctcttctacagaatatggggaagaaaaatgtcagctccagccaaagcccagcaccatcgcccttacccagaacactgtatgctacaagaatccatccacctacaccccttctccacctgggtgtctctcagacccagaaaatggtgccattggcccactgacaactaaatgtggggacaggtacagtcttttatcttgggataaaatggctagatgagtatggacagggaggcagggcagatacagtccttgcttctggttttagagttcttctgaacca

SEQ ID NO: 8852 - DNA, 2300 bp, Homo sapien
catgaacatattataggatttcagtattaggaatgctggatggatgaacattgctttccaagaaaaatcccctagtaagtagggaacagataggagatcatgttgactatggtctatacccataaatcctttaagtatcatcttccagcctctagaaggaccacgataaatcttattgggatatgttctctcttggaaccagtgggattttattttctgtaacaggaaattgggaaacagtgctcagcagttctcccttggcaccattctgtcgtgtatcatagtttgcttggttgcttatgctttttgaagggaggccccctggtcttccttgattctccatggtgcggagctcggccttgctaggtactctgtcaacacaggttgaatgaacatgagtagtggtgagtagcgggagggcaggccttcactcttggtgtgtatagagcaggaacctgagttcacatcgtgatgggatgtccatccccaggaatggcctgggggtgttggtgaaagatccctgacctggggatgtggtgagggggaggattgctagaatgttgagagatagtctttggatgggagttggtaattattatgggatgctgtagggtgaattagacttcatgtaaatgtttcatctgtcagcttggtattttggttggttggtgttcctcaaaacttaggagctggaggtaagcatctggaaaatacctagattttggtgggactgggtggggccctaggtgggctcccagcccccgagtgtctggaaatgatggtatgagggaagctggggtcccagacatcaggaggctttttgccaggatactactttggcccagaaagggattaaggtgtgtgcaagtgggggcggggacaaggaagcgtgggtagcctgcctggccctccctgctctgggtgttagaatagactgacagcgcctggagatgggggtgggaagaatatgaatattatgggatgcctggctcgaagggtataggggtggtagagtggagatgaagcattatgggatgtgacactgggttgtgttgggagtattatggtatgtttggttgaccacgggctccttgcaattattatgggatgtcaggatgtgggtaggagagtaaaattattatgggatagctttccagtgttagaggaaaagagattagatgtccatctgtggggcgacagtagggctgttgatcattatgggttatctttttgatagaggaggggtacttactataggctgtggagctagaagagggaaggctgggggtgatgtgagcctctagaccctggcctgcagggactgagggcagctctagggggttagttattatgggatgtcagtatagaaagtgggagactgattattacgggatgtgtgtgggaggaggccgagtgtccgttgttgtagtatgggggggggtgagtttctgactattatgggatatcaaactgggggtggatgaaggatggttattatgggatgtctgtgggggatggggctgaatattatgggatatgaggcataagtgctgcgaggggtgcttattatgggatggccatggggagggaggggtgatgaattattatgggatgttagcattaggtccaagagtgaagaagaagttggcaaaggatgtctattatgggatgtctaagagggttagttgcaaaaggtctgcaatattttgagatgtcagcagtctctggcatatgtgtatgaaatgtgggggggcagggtgtgtgtgtgttgtgtgtgtgtgtgtgtgtgtgtgtgtgtgtgtgtgtgtgtgtgttgggggggggggtgtccgtgtgtattatgggatggccaggaggtgggcggttgcccaggtgacgcgcgcgcgcccgctgcgaagggggcgtggccagtggttgcctgagcgacgagggggcgggggttgcccgggagacctggggaggagggtggcggtagtggaaggggggggttggagttggttgaggttattatgggctgtccgtgggggggcggggcctgtgcggtgggatttcccggccggtgtttcaggccctttaagaggcgacgctggagccggagccattttccccccttcggccgcggcgaggaggagccggagcgggagtgacaccgagccggacccagcgcgacctgcggcggctccggggtgaggagagcgcggggttcccaaagagacgcccctcacggccctaccagccccgagggtcatcccgtcacccgccccttcctcaggcgtctccggacccgcggaccgcccctt

SEQ ID NO: 8853 - DNA, 2300 bp, Homo sapien
accccattgctttcaggctgccccttctgggtctgttactcggcccctactcacatttccttgggttggagcaacagtcccagagagggccacggtgggagctgcgccctccttaaaagatgactttacataaaatgttgatcttcagcctgtgtggcctgttctggttatgatccccatcctcagcactgctaccctgccccgtggcagtcagtccccaacccctggttttatggatccacctgccggtgagagaatctcatgggaatggtgctcagggaagcagccatctgccaggagaagcagaagacctgagaacccagggaggtgaactgaggaaggccaagaaggctggggccctagggatgatgtgggcatgtgggcacctgtcttcatttctgaagccctaagccccgtgatgtcagatgcgagtgtagtattgttcctctgtaggataaaggccaaagcctgatgagatcttttccaaagggaccaatcctggggtatagggagtgtgcaccttgcacttaatcaggaagggaaaaaccaggaactatagcctagatcaggaaaccttggggttgtttttgttgttgttgttttgtgtttgagacagggtctcgctctgtcacccaggctggagtgcagtggcatgatcaccacccactgcagtcttgacctcctgggctccagccacactcctacctcagcctctcaggtccctgtgaccacaggaatgtgccactaagcctggctaatttttatatttttttgtagagatggggtccctccatgttgcccaggttggtctcgaactcctgggctcaagcaattttcccacctcggcctcccaaagtgctgggattacaggaaggaaacccttggtgtacaggaatttgccagatgatctggatgtttaagtggttgcatcttaacaacctacattgaggtatgactccagcattggcctttattattattattattattagtgagacggagtcttgttctgttgcctgggctagagtgcagtggcactatcttggctcactgcaacctccgcctcctgggttcacgtgattctcttgcctcagcctcctaagtagctgggattacaggcgcacaccaccatgcccggctaattttttgtgtatttttagtagagaaggggtttcactatgttggccagactggtcttgaactcctgacctcgtgatctgcccgcctcggcctcccaaagtgttgggattacaggtgtgatccaccgtgcctggctcagcattggcctttaataagttgacatatcccaaagtatgttccagggacactgtagagtctctctcccttctataggttcgcagtaattaacagcattttgttaaagcttgcttactatgacagttcaaacatgcacaaaaatagaaaagtataatgcactgtcatgtacccttcacccagtttccatgatcaacacaaggcctatcatctgacagcatgttaaggccctccggagcgcggtaatagagaaacctgtttaacctagtgcttcccaaactcatttcaccacaatcccttttccacctaccaccaaaaaacttgaacttgtttttatttattgagcatggacaacatgcccagccctgtgcccacagggccacttgtctctgtgttgtctggcccgaggacacaagacaacgggctgaggagaaacagacctaagcaaagaggaaccatccagcctagtgactgctcgatgcgggagccaagtgtgctcagtgggaggcaggacctagcagagcactgtcatgaagagggccccgggcagggtggggcacaagccacgagtggcatggactaagccacgagtagcatggactaaaccacctggcagacctaggaaaggaagacagacacccagggggaaccggtgaggacagcgagaggctggtgggttagtcatctggcatcagacggtgggtgtgccaggaagagttcccagacacagcaggaatatctgaacgatgggtgggggcagttcctagtcggggctggattaagtatccttagctgctggggtttcttctctggccagtccgtgaaggcctctgagggcaatgcttcctcttcactctctccttggcccgtgtggggttgggtgagtgcactgagctgggagggatgggctgagatctgctgaggtgggtgtgtcccctcccgccctgggagcaggtcctaccagcccagcccagcccagcccagcccagagcaggcagcggaagccagcttggggcagcgcagag

SEQ ID NO: 8854 - DNA, 2300 bp, Homo sapien
tgggtcacctctttgtaaatattagcattatcattagcagaggtggcaggggagggttatgagttcttttcagataggctaagttggggtatctgtaagatcacccaatcacagacatctgtcaggcacttggcaatgaggatttggagcccaagagagagatcagagctggtgataaagatttgggtgtcactcgcagatagatgattacctaggagtagataaatcatccaggaagagggtgaagaaatagctgaggcaaggtccttgaggaacccttggggaggaggccaagtagaaaacccagagaagcttttggaagaggctaaatgcaaagacattctgcagggcccaccctggagggctgaggcatgggagaaggcaggccgctgactctcagcttcagcctcacccattcccctgccccaggtctgtgacagccttgggcggcgacacatgtctacctgtgccctctgtgacttctgctccttgaagctggagcagtgccactcagaggccagcctgcagcggcaacaatgcgacacctcccacaagactccctttgtcagccccttgcttgcctcccagagcctgtccatcggcaaccaggtatctagcccggcagcccgcagtgggaaaggcagaactgggtggcaggggtggggtggtggtggccagcaggtggggaggggcacgcacctctcccctatctcctgtgccacaggtagggtccccagaatcaggccgcttttacgggctggatttgtacggtgggctccacatggacttctggtgtgcccggcttgccacgaaaggctgtgaagatgtccgagtctctgggtggctccagactgagttccttagcttccaggatggggatttccctaccaaggttagaacctttccccaaagctcagccccatccctaccctcaccccattccttccagttacttgctgtgagtagcgctagtttgtggaagggggcttgggcccctggcttctgagaacccgtcctcactgaatctcctgcctctctccaagagaccattgcaccccaccccaccctccaccaatagagcaggcaaaggagtggggacccagagggctgagaaaacaggagctagaggttctggtcccaactctgccagttacttgctgggtggctgtgatcaagtcacttcctactcaatcaaagagtcatctctacaagaaatgactgagtgacacgtgcaccactgcccaaccctgtgatccaggacttcccggccttagcctgacgggcttcccagctcttccagtgccttccctgctcaattaaatcaacttggctccccgttcccctgagttacctcccctgtggaatgacctgttgttttagatccaggcctctcctcctgtagttagcagggaaaaccaaggcaaggaaaagtaagggcagctgaagcaagggctggtagctgagctggggggcccatgtccagctcttgtccctgggccccttgatctggaatggggaggcgaggtccaaagaaggcagtgactcacttcccccttcccttatctaccattaccagaaaaatccttgacatcaggccactaatcgggtccctgtcccatgttctggacccttatctaccccgtcctgccccattcccgcttcctcagccactttcccagtaagctgactggcagcctcatactctcccaggctcctggcttcttcccagcaacctgtgacagagcggcaggggaaaggcagagggaaagcggagtgaggggccgcctgtgtgtggaagacctgggtcttgggccacaccctgcccctggctctgccctagcagatattccctggagtgctgctgcctggtgaggcttctgataccctcttccctctctctggctcttggcttagatttgtgacacagactatatccagtacccaaactactgttccttcaaaagccagcagtgtctgatgagaaaccgcaatcggaaggtgagcacccctgccctgcccctccttctcccagcaccccctcaatcagtcaccataactggtctattctgaggccccctctgcgagcagctaggatgtggaaagcggttcctgcttgcatctctggggcagaggcctccaccagcaggctctcctccattcctccagtcctggcggaagcaaggccctcctaggcagctggtggataacagaggagggtcctaagagcaccacaggaagaacccttggctgggccaggacttggacgttgaggtctcggtctgtctcctcttcttactcac

SEQ ID NO: 8855 - DNA, 2300 bp, Homo sapien
aaatacaaaaattagccagatgtggtggcatgtgcctataatcctagctacttgggaggttgaggcaggagaatcacttgaacccaggaggcagagattgcactgtgctgagaccagccataatttttgtatttttagtagagactgggtttcaccctttttttttttttgagatggagtctcactctgtcatgcaggctggagtgcagtggcgtgatttcggctcactgcaacctccatctcccgagttcaagcaattctcctgcctcagcctcccgagtagctgggactacaggcacatgccaccacgcctggctaattttttgtatttttagtagagacagggtttcaccgtgttagctaggatggtcttgatctcctgacctcgtgatctgcctgccttggtctcccaaagtgctaggattacaggcatgagccatcgcaccggccaagtttcaccattttggccaggctggtctcaaactcctggcctcaagagatccaccctccttggcctcccaaagtgctggaattccaggaatgagccacagtgcctggtctctattttattaatttattttattttattttatttttgagacagggtctcactttgtcacccaggctggagcacagtggtgagatctcagctcactgcagccttgacctctgaagactcaggtgatcctcctacctcagcctccccaagtagtaagtgggacaacaggcgcacaccaccacacctgacaatttttgtattttttgtagagacagggtttcgccatgttgcccaggctggtctggaactcctgggctcaaggaatccacccgccttgacttcccaaatgctgggattacaggcgtgagccaccaagtctggcccaagacaatttcttgttttatttttcttttttacttttgcttttgggtggggacagggtctcactttgtcacccaggctggagagcagtggcccgattgcacctcactgcagccttggcctcatgggctcaagcgatcctcccatctcagccccccaagaaactgggactacaggcacgtgccaccacgcttggctaattttttgtactttttgtagagacgaggtttcgccctgttgcccaggctggaatttctcattttaaacacaaaacagatacaaaagcaaaagttctcctcccatacctcagtggactgtcttactcgattctcccttggaaaccactttcgtagaccactgagccaccctcttgttttccccttggacccattttgctcatggaggcgccctgtctagttcctacccagataggccttgacttggttttgcacattctatctctgcctgcgcttagctctagacctcacgacctgtttgttgggcgagttgcttccctaagccccgatttctcatctgtaaaacgaatgatagtgtatctaccttatgggattcctatggcaattacgtaaggtagtgcatgtaaagatgctaagtggctggctacggtggctcacacctgtaatcccagcactttgggaggccgaggtgggcagatcatttgaagtcaggagttcaagaccagcctggccaacatggtgaaacccagtctctactaaaaatacaaaaattaggccgggcatggtggctcacgcctgtaatcccagcactttgggaggccgaggtgggcggatcacaaggtcaagagatcgagaccatctggccagcatggtgaaataccatctctactaaaaatacaaaaattagctgggcgtggtggcgtgcacctatagtcccagctactcgggaggctgaggcaggagaatcacttgaacctgggacgccgaggttgtagtgagccgagatcgcaccactgcactccagcctgggcgacagagtaggactccgtctcaaaaaaaaaagaaaaagacgctaagtgaaggtagctgtttgccattcctaccatctggatgggctctggccactttagggccctgagagcccggctgtcgaggccccgccccggcccgctctttgtgacgcgtgggcggtgcccgcgtgcgccccgccccgcgcctgcggctctctctgcggcttggcccgttagaggcggcttgtgtccacgggacgcgggcggatcttctccggccatgaggaagccagccgctggcttccttccctcactcctgaagggtgagaggtttacacctgctccaacagactctccccgggctagtcctctccctcccgagagctctgcttttacggtttctggatcgcttcctcatggtggtcgcgctgg

SEQ ID NO: 8856 - DNA, 2300 bp, Homo sapien
gctttaagcaccgaaaaagttgtgaaagttgtgaccaagctcccacatcctgagaactctgggactgctggccaatagtacttgttatgtagttgggctgggataaataaagcccacttaatttagtgctagatatcctgtgtgggcacctaagatggtgtctcaatatgttgtgtaataccaatgaatgtatcacatatgaccaaatatgccaatgtttcttagctccctgcatatttactgctttttcctcccactctcaccaactcttgaaaaggccctaatggccctaacttcatcaccagtattagaactagaatctactctttttatggatacactcacactcacttattccaacaaccctatgagggaggtagtagtctcattgtatagtaaaacaggcacagagatcaagttaccgaaaagcatgacttttgtaattagagcagtttcccggattctattgctgtatcttactacctgcacactagtaaacctggggtttacaggctacagatcctttcagctctgatacccccaccactctacagcccctgaaccccctcctccagcctgctcttactgtccagataatgtttcaaatacatccctgcatccatctcgaagcaaaacaaagcaacttccaatccgccccgggttggaagttcctcttctccacatatttggtagaaattatatagctgaaagtctgtctctttaaaaacttgccgtaagacattggtaattcttatgaaggatgtgtgagggtacgaaaagtgtgaggggtggcagctatctctaaaatactatcttactaacaccactattaggttatggcctttgtgttggcagtgtgttgacagcctagtgtgttggcagcctctcatacccttgactgcttcccattctgatgaaaaccatagaaatcactctaccatagctgactagagtgatggctagcaactaactagccaactagcccagtagtgatactgctgcatccctcaatcccttcagaattatgatgctaacatcacatataaacaaaaggaaaacaaaaacacgagatttcccccttagagagtagcaagaggggccaggcacagtggttcgcacctgtaatcccagcactttgagaggctgaggtgggcagatcacctgaggtcggaagttcgagaccagcctcaccgacatggagaaaccccatctctactaaaaatacaaaattagtctggcgtgatggtgcatacctgtaatcccagctacacgggaggctgagacagaagaatcacttgaacccgggaggtggaggttgcggtgagccatgatcacgccattgcactccagcctgggcaataagagtgaaaattctgtctcaaaaaaaaaaaaaaaaaagcaagagggcaaggcaggaagtaatattttatatgtgaaagtgtattctagtgtaacgtacaggagctctgacaaaagatgtgcagaattatagctttattatgagtcattctttgtatttataagtagaaaggtgatcatctttctcaagttaaaaaaataatgctgggggagatggtgtttgtgtgagtgaatagaaattcagacggtttaaatgtctcaaggcctgatactcttccccaacttccttaagaaactaactggcttgaaaaaagtcattctgcaaaagagggaaaaaaagttggatcttccagttgctgagaaggtatgtttacgcaatatgagcctaaagtgaacagttacccctgcacggattaccatacattcccgttttggagggaaaaaagtttgctagagaatgcaaaatggcgacctccagtgacgtcatacctgtctcggtcgcgtcctggggtgtctgtaagggcggaagcgggctacagccgcctcactgtgggcggtcgtggctaccatgcaaaaggaaaagtttcagtgtcgggcggatgtgtaccggcggtaatatagtaagggcggaagttctcctttaagggcggaagttctccttttaagggcggaagttctccttttaagggcggaaaggctttagccgcaaaatggcttcggcccctgtcgcgttacagtcacttccggggcggatcggaagttgctttgttttgcttcgagatggctgcggggatgtatttggaacattatctggacagtaagagcaggctggaggtgggggtcggggctgcagagtggtgcggggatcagggatgagaggatctgtagcccttaagttccagtgacgagaaggtcacaattatgaagcggttctgtggcag

SEQ ID NO: 8857 - DNA, 2300 bp, Homo sapien
ctcccaagtagctgggaaacttccttcttatagcaagggcaggaatagggctgacggagacacggagacccaggaagtgcccagttaacataaataggaaaagagcaggaggagaaccagaacgtatagctattattactatttcctgttcccacctttcaataccagcccctgatgtcaaggtttcttgaatcagcaatctctaacccacacagcaataggtctggtcacatctgagcccttaaaatccttactctgccaactgttgctactcagtcaacagagactgagtgctgagcccaaaaatgtgataaagggaacagacactttaaaaaagatacaaactacaattacaatgaaatgcatcatctatttaaatatttaaaggcgtactttgttactttcttgctttgaccttgggggaaaaaatcacttaatcctttacaggcttattttcattatctgtaaaatgagcattataattatttctgttaaagttattttttgctgggcgtggtggctcacgcctgtaatcccagcactttgggaggctgagacaggtggatcagttgaggtcaggagttcgagaccagcctggccaacatggtgaaaccccgactccactaaagatacaaaaaattagcccggtgtggtggcgggcgactgtcatcccagctgctagggaggctgaggcaggagaatcgcttgaacccaggaggcagaggttgcagtgagccaagatggcgccaatgcactccagcctgggcaacagggtgacactctgtctttaaaaaaaaaaaaaaaaggttatttttctcagcaagaggctcttaccattagtaggagagacctcagttctgcttagagctgagcccagggggattctggccaggtcggggtgcacgcttgtaacagcattcacttgttcaaacaacatattcagcatttactatatgctcagcaaagcaacgtatttccttccatgaggaactgacaatcttgctggggaatcacatgtatgaaatagttaaaatatcaataaaaggtacgtattaaatactatgggaattcagagggaccattacaggttggagcaatcaggcaaggcttcctaaaagggttcatatttaggtgttcataatgaactatagttcatttatacaacaagagtttacagaccacttaactgccaggatatgaggatacagcaacgaacaattcagtcctcgctgtcctgtagccaatattttagttgggagaggtggacagcaaacaataaatcaggcagtaataagtgctatatttaagtaaaacagggtaaggggatagagatgtgggtatgggcaacaagaaaagaccaaagtaaagtaagggatgtgtcagagagacagattttgatggctgggagagtttctaactggacctaagtagggacctccgaaaaacaaggatacgtcctagtcctttcccgcatattcaaagcattgagacattcttgggggtatcagaaaaaataatggtaatttcctacatcagcttattcaacatccagagggaagagaaacggggtcccagcatctgaagaacccacacctcctctcctaccttgatggataattcatgaacctgtcgcgtttccacccccccaccttccccagatgtcccttccggaagctcagggccggagtcctccggtttcagcttttgcccctagcggaacccgccttcacttccgctatagcgtcacatcccctcttcccagtcgctgggcagaagctatttccgccccgagttatcgtaacttctgccctgaatatctcgcagcgctagcggcgccggaagtgttccagccactcccggaagtgactcggcttctgcacgcccctctttctccattagcgccccccctacattgctatttccctccctccccccttttcgtttccggcgctcccgccttctctccgcagagctcttctctgagcctgttggggggagggaggggggcgtggaggaactggggttcgcgggagcacgagctgcagcaccacttccgggtgagtgcaaggggagggcagcaaggagggggggccacccactacctcgcgcccccgccctgcgggtgtctcgcgcgcgttccgtgcgtgtgagtgtgtgggtctgtctcgctccagaagtgcgtgcccgcgcgctgcgccttgcgctttttcccctccctcgccccttcctggtcctcccaccctcctcggctccctcctttcccagcaaacgccgcccctcccgcgccctggctcaggctc

SEQ ID NO: 8858 - DNA, 2300 bp, Homo sapien
cacttgaaacttcttttttttttttttgagatggagtttagttcttgttgcccaggctggagtgcaatggcgcaatcttggctcaccacaaccttcgcctcccaggttcaagtgattctcctgcctcaacctcccaagtagctgggaaacttccttcttatagcaagggcaggaatagggctgacggagacacggagacccaggaagtgcccagttaacataaataggaaaagagcaggaggagaaccagaacgtatagctattattactatttcctgttcccacctttcaataccagcccctgatgtcaaggtttcttgaatcagcaatctctaacccacacagcaataggtctggtcacatctgagcccttaaaatccttactctgccaactgttgctactcagtcaacagagactgagtgctgagcccaaaaatgtgataaagggaacagacactttaaaaaagatacaaactacaattacaatgaaatgcatcatctatttaaatatttaaaggcgtactttgttactttcttgctttgaccttgggggaaaaaatcacttaatcctttacaggcttattttcattatctgtaaaatgagcattataattatttctgttaaagttattttttgctgggcgtggtggctcacgcctgtaatcccagcactttgggaggctgagacaggtggatcagttgaggtcaggagttcgagaccagcctggccaacatggtgaaaccccgactccactaaagatacaaaaaattagcccggtgtggtggcgggcgactgtcatcccagctgctagggaggctgaggcaggagaatcgcttgaacccaggaggcagaggttgcagtgagccaagatggcgccaatgcactccagcctgggcaacagggtgacactctgtctttaaaaaaaaaaaaaaaaggttatttttctcagcaagaggctcttaccattagtaggagagacctcagttctgcttagagctgagcccagggggattctggccaggtcggggtgcacgcttgtaacagcattcacttgttcaaacaacatattcagcatttactatatgctcagcaaagcaacgtatttccttccatgaggaactgacaatcttgctggggaatcacatgtatgaaatagttaaaatatcaataaaaggtacgtattaaatactatgggaattcagagggaccattacaggttggagcaatcaggcaaggcttcctaaaagggttcatatttaggtgttcataatgaactatagttcatttatacaacaagagtttacagaccacttaactgccaggatatgaggatacagcaacgaacaattcagtcctcgctgtcctgtagccaatattttagttgggagaggtggacagcaaacaataaatcaggcagtaataagtgctatatttaagtaaaacagggtaaggggatagagatgtgggtatgggcaacaagaaaagaccaaagtaaagtaagggatgtgtcagagagacagattttgatggctgggagagtttctaactggacctaagtagggacctccgaaaaacaaggatacgtcctagtcctttcccgcatattcaaagcattgagacattcttgggggtatcagaaaaaataatggtaatttcctacatcagcttattcaacatccagagggaagagaaacggggtcccagcatctgaagaacccacacctcctctcctaccttgatggataattcatgaacctgtcgcgtttccacccccccaccttccccagatgtcccttccggaagctcagggccggagtcctccggtttcagcttttgcccctagcggaacccgccttcacttccgctatagcgtcacatcccctcttcccagtcgctgggcagaagctatttccgccccgagttatcgtaacttctgccctgaatatctcgcagcgctagcggcgccggaagtgttccagccactcccggaagtgactcggcttctgcacgcccctctttctccattagcgccccccctacattgctatttccctccctccccccttttcgtttccggcgctcccgccttctctccgcagagctcttctctgagcctgttggggggagggaggggggcgtggaggaactggggttcgcgggagcacgagctgcagcaccacttccgggtgagtgcaaggggagggcagcaaggagggggggccacccactacctcgcgcccccgccctgcgggtgtctcgcgcgcgttccgtgcgtgtgagtgtgtgggtctgtctcgct

SEQ ID NO: 8859 - DNA, 2300 bp, Homo sapien
tgaggtgggtacaggctggtgggcttctccttacaaggagttcagatttattccaagtgtaatgaaaaaccactcgaatattttaagcagagaagagcatgacatgcttttgatttttaaaatattatcaatataggaaaaactagtttgtaaagacaagggcagaagcagggaccagtgaggaagctattatgataatctggatgagacatgatggcttagaccaagactatagcaataaagatagaaggagatgaattcgggatatattttggacgcagagcccacaggacttgttggtgaattagatacagggagagaatcagtgaaaaaaaggggaagggagggatgtttcctagatttttagcctgaacaactagtagttgtgaagcctcaggatggggatcactgggagaaaaatggattgggggtgggggaattcaagacatctattttagtcaagttagctttgcatggctattagacatccaagtggagatgtcaagtaggctgtcggataaatgagtctggcgctctggatataaatttaggactcactgacatttacatagtatttaagccctgggaccggatgagatcactggacagagaatgtggaaagagagaatggccaaggactaagccctaggaggctccaacatttagaggtcacccgaggaagactaagaacagtcagtgaggttggagggaaatgaggagagtgtggtgtcctggaagtgccctgaggaaaaacagcgtagtgtggtagagagggatgggatccaggtggtgggagaaggggcaggagaggctacttttgatagagacattagggaaggcctcccagaaggcgttggatctaagtgagactggaatgaaaacagtaagtcattgtgaaaagccagggaaatgtattactgagggaacagcaagtgcaaaggccctgaggcaggttaaacctgtctccaaccaggaaatccaccaggtcccatgtggctgaagcatagaaatctttaggaaaggcaatcagagagccacctaagagccaggttatatagggtcttgtaagtcacagcacggagtctaggtattccagtgctggaaaagcccaggaatttcgacgtgatccacttaatgcatggtagcagggccagagtgaaataggggatcaagctgtggggataatccaaagatggtgcaaggtccttcctccccagtcctttcctccaccccttgcccccagccttgacctcaggcactttctacagcgggcaaaaccaagttgggggacaggcagtggtgactcacgcctgtaatcccagcactccgggaagctgagcgggaaggatcgcttgagcccaggcgttcgagaccgggctgggcaacacagcgagacctcatctctacaaaacacaatacaaaagaacaaagttgggaatgcagagcattgagtgactcagaatctcagaaactgactgaggcgaccatgggtgtccctggagttggggtgaaggaggtggggagactgccatcagaacccagggaagcggacggtcgctggaccctgccagcctcttcagccctccacctgggacatagcctggcttgactcctgcagcgcggcagcaggagggttaaaccgtgcgtggcctccggcgcgggggggaggcggagacggagacggagcggtcccagccgccgcgccgagcccagccgagccgagccgagccgagccgaggcgagcatctcccaccgccgccgccccgcgccccaggcgcccgccccccacccgctccagcgccctgccgcgggccaaacctccccaccatgccccgcaccccgcccgctcctgcgaccccccagccccgctcagtcccgagcgcccgcagtcgtcgcgccgccgcgccaagcatgcaggtgagtgagagggacccccacgcccccacccgcggggagcccggccctgcccttcccggctccgcgccctgcgcctcctgcccctcccgacgcggtccctcgcccgggacaaggcctccagcctcccagcgccccttccccgaagggctctccatccctccgcggtcctggctcgctcccgccctccctggcgcagccgtccccgtccccgcggctgcctccatcccgcctcggctcggcgggcggctccgcgcagtctcctgcttcgggtccccagtccgctctcggcactccctgcctcggggtcccttcgccgacctccttttcctcgtctccccccactctcgccgctctccagccctgtgcggggagtgcgggcctgc

SEQ ID NO: 8860 - DNA, 2300 bp, Homo sapien
ccaaggctggtggatcatttgaggtcaggagttcaagactagcctggccaacatggtgaaaccctgtctctacaaaaaatacaaaaattagcagggcactagtgggcactgccagaggggtgggagggctgggaaggctggaagggcccccctgcatgcacacgctagctacttgggaagctgaggcaggagaattgcttgaccctgggaggcggaggttgcagtaaactgagatcgtgccattgcactccagcctgggcaacagagagacacactgtctcgagaaaaaaaaaaagtgcagggatgctaagagaatgacttctgatgttacagaacagcaagtagtctgatccagcaggagcactgtgtatgaggtgggtacaggctggtgggcttctccttacaaggagttcagatttattccaagtgtaatgaaaaaccactcgaatattttaagcagagaagagcatgacatgcttttgatttttaaaatattatcaatataggaaaaactagtttgtaaagacaagggcagaagcagggaccagtgaggaagctattatgataatctggatgagacatgatggcttagaccaagactatagcaataaagatagaaggagatgaattcgggatatattttggacgcagagcccacaggacttgttggtgaattagatacagggagagaatcagtgaaaaaaaggggaagggagggatgtttcctagatttttagcctgaacaactagtagttgtgaagcctcaggatggggatcactgggagaaaaatggattgggggtgggggaattcaagacatctattttagtcaagttagctttgcatggctattagacatccaagtggagatgtcaagtaggctgtcggataaatgagtctggcgctctggatataaatttaggactcactgacatttacatagtatttaagccctgggaccggatgagatcactggacagagaatgtggaaagagagaatggccaaggactaagccctaggaggctccaacatttagaggtcacccgaggaagactaagaacagtcagtgaggttggagggaaatgaggagagtgtggtgtcctggaagtgccctgaggaaaaacagcgtagtgtggtagagagggatgggatccaggtggtgggagaaggggcaggagaggctacttttgatagagacattagggaaggcctcccagaaggcgttggatctaagtgagactggaatgaaaacagtaagtcattgtgaaaagccagggaaatgtattactgagggaacagcaagtgcaaaggccctgaggcaggttaaacctgtctccaaccaggaaatccaccaggtcccatgtggctgaagcatagaaatctttaggaaaggcaatcagagagccacctaagagccaggttatatagggtcttgtaagtcacagcacggagtctaggtattccagtgctggaaaagcccaggaatttcgacgtgatccacttaatgcatggtagcagggccagagtgaaataggggatcaagctgtggggataatccaaagatggtgcaaggtccttcctccccagtcctttcctccaccccttgcccccagccttgacctcaggcactttctacagcgggcaaaaccaagttgggggacaggcagtggtgactcacgcctgtaatcccagcactccgggaagctgagcgggaaggatcgcttgagcccaggcgttcgagaccgggctgggcaacacagcgagacctcatctctacaaaacacaatacaaaagaacaaagttgggaatgcagagcattgagtgactcagaatctcagaaactgactgaggcgaccatgggtgtccctggagttggggtgaaggaggtggggagactgccatcagaacccagggaagcggacggtcgctggaccctgccagcctcttcagccctccacctgggacatagcctggcttgactcctgcagcgcggcagcaggagggttaaaccgtgcgtggcctccggcgcgggggggaggcggagacggagacggagcggtcccagccgccgcgccgagcccagccgagccgagccgagccgagccgaggcgagcatctcccaccgccgccgccccgcgccccaggcgcccgccccccacccgctccagcgccctgccgcgggccaaacctccccaccatgccccgcaccccgcccgctcctgcgaccccccagccccgctcagtcccgagcgcccgcagtcgtcgcgccgccgcgccaagcatgcaggtgagtgagaggg

SEQ ID NO: 8861 - DNA, 2300 bp, Homo sapien
ccagcactttgggagacagaggccggtggatcacgagatcaggagatcgagaccatcctggctagcatggtgaaaccacagctctactaaaaatacaaaaattagccgggcatggtggcgcgtccctgtaatcccagctacttgggaggctgaggcaggagaaccgcttgaacctgggaggtggaggttgcaatgagccgagattgtgccgctgcactccagcctgggccatagagcaagactgtctcaaaaaaaaataaataagataaaaatttgaacaatcgaggctgcagtgagctgtgatcgcatcactgcacgccaccctgggcaacagagtgaaaccatgcctctaaaaaaaaaaaaaaaaaaaaaaaaaaaaaagtaaaaaatgaacaaataaagcacttggcgcaaaatagaacaaatacgggttattttctcatcccttcatcttacatgtttttcccttctctctaaaaatgataagcttggccgggcgcagtggtttacgcctgtaatcccagcactttgggagtctgaggcgggcggatcacgaggtcaggagatcgagaccatcctggctaacacggtgaaaccccgtctctactaaaaatacaaaaattagccgggcgtagtggcgggcgcctgtagtcccagctattcgggaggctgaggccagagaatggcgtgaacccgggaggcgaagcttgcagtgagccgagatcgcgccactgcactccagcctgggcgacagagcgagactccgtctcaaattaaaaaaaaaaaaaaaagataagcttggggcggggaggggtggatgcaaaataataataataatgtttggactcattaattccttgcttccttcaaactctgaatattttattatgcctttgattccttctactcacttttgtttcaccttttccattcatttcttcttctcctcttcctcctttctctttcctttctgtgtttctgcttattttctatcacaaaccaaaatatgcggaccataaactgcatctgcagttcctttagccctaacagactacgagtcctatttctctttatctttctctttttcactttcttgtctttccattacttacaagtttcttaattttcctgagttcagtttttccatctggaaagtggagataacaattactagatcgttgtatcagatgaattaagtaatgctcatggcttaacacaaaggccaagatgtcattaactttaccctcacttgaccttctgcaagcctgttgtgaaatataaaacactatagaaatgttagttgtttttgtttttattaaagtatcatattgaagtagaaagatggttttgagtttgaaaagctccagataaatccttggatttttatgagcctcaatttccttttctgtaaaatgagaaccacatagggttttttcctccccaagaaattaagagtccatgtactgaaagcatcattctacaagtattaatacatatgtagtaatcatggtagagggtgtcctgaagtcacaggggaatatttgtgaggattcaacggaataaaattttaaaagatgtctgaccaatagtaagcactcaatacatgttagctttattctctcttttatttttctcgcttcttttctcctgctcttcaaaaaagtgagtggttgaaccacctaggtgatctctgctgctaaacttctattattgatttttgtttgcttcctctctgccccttgtttcctcatcccgtttttttccctcttcttcactccttccgttacagcttttctcttgcctcaggtacccagtgcagtcctgatctccagctctccagcggcttagaacagacacagaatgggccgggaccagggacccaccagagacgtctgtagttaatagctggcgctcttccactaataaagttttattgaaataaagcatttaaaaaggcgcccgtcattcttcccccagcgaccaatcgaagagtagaatgcctgcgtccctcactggagcttcagcggtcggaacgcgggggtggggcatgtcctgccgaaatttgcgtccttagagcggaagtacggccggaagcccgccatagagtttagtggccagagcgactcttcagggaggtggcaggaaaggcttggaacagctgccggaggtgacggagcggcggccccgcccggtgcgctggaggtcgaagcttccaggtagcggcccgcagagcctgacccagggtacgacgaagcagtcggcgggagcccacggtcgctgggcggtgtctttaagggagg

SEQ ID NO: 8862 - DNA, 2300 bp, Homo sapien
gctcaaagcaccaggagttagcagcttttacacactggcgggcgtgggaagaaggggtttatttcagaggcagagactgagaatcaagtcttgcttgtctagggaaaagctgagaagctaagagtttcaactcctgaaatggggctccctagactggtttcgttaagtgactgccccgctcaagacaacaagcttacctagccaatttgtaatcaaaaacctaggatctggccggacgtcgtggctcacgcctgtaatctcagcactttgggaggctcaggcaagcggatcacctgagatcgggagttcgagaccagcctgaccaacacggagaaaccctgtctctactaaaaatacaaaaattagctgggcatggtggcacatgcctgtaatccccgctactcgggaggctgaggcaggagaatcacttcaacccaggagacggaggttacagtgaaccgagattgtgccattgcactccagcctgggcaacaagtgcgaaacttcgtctcaaaaacaaaaaacaaaaaacaaaaaacaaaaaacaatgcaacaatgcaggatcccactcccacctttttttttttttttttttttttgagatggagtttcgctgtgtcgccaggctggagtgcagtgttgccatcttggctcactgcaacctctgcctcctgggttcgagcaattctcctgcctcagcctcccgagcagctgggattacaggcaagcaccaccacgcccggctaatttttgtatttttagtagagatggggtttcaccatgttggccagaaaggtcttgatctcttgacctcgtgatctgcccgcctcggcctcccaaagtactgggattacaggcatgagccaccatgcccagcccctactcccactttctaattccatgactgatagctttaggaccaatgaagagtggtctatcctaaatctccacctaaagaacatcacaagctctggggagcagctgtcaaccccaggaccctcagaaggcaaccacttcacatgcaaatgaaggctcaactgtccactagagctctccaaatctagggagtccatggcagcactctaggccatggattctgatccttctagcacactccctggagagctctagtggacagaggacagaagtccaatggcttcttcttgccacagatctgacagttctgtgtggttctgatgtgaaaattcaagttcattaccaactctttcccttataattctatgaggtgggaggacatagtctgaactcaagctccttgagagcagaaacagcggccatcatttgtatgtccagtgcctttcagtaagtatccactacttttttttttttgagacggagctcattctgtcgcccagattggagtgcagtggcacgatctcggctccctgcaacctccgcctcccgggttcacaccattctcctgcctcagtctcccaagtagctgggactacaggtgctcgccaccatgcccggctattttttttgtatttttagtagagatggggtttcactgtgttagccaggatggtctcaatctcctgacctcatgatccacccgccttgacctcccaaagtgctgggattagaggcgtgagccaccgcgcccggccttttttttttttttgagatggagtctcactctgtcactcaggctggagtgcatgatctcggctcactgcaacctccaccttccaggttcgagcgattctcctgcctcagcctccttaggggattatgggcatgagccaccacacccagctaatttttttgcatttttagtagagatgggtttcaccatgttggccaggttggtctcacactcctgacctcaagtgatacgcccgccctggcctcccaacatgctgggattacggtcgtgagccactgcacccagccatatccattacttctgaatggatgctgagcaacctgtccaaagccatacagcttgggatctaggcctcagccagggactcagcaaatagtatctgggtctcttcattttccagcactgtgcttgagtgaattgggaatgagtcttcttcccatccacaaatatcaaacacagaagatacccagttcagggtagtttgtagatagatttctcatagatttatttctgcgtcatattatatatagatatatgcatatatacctttttttttttaatacaatctatatacccttcccttccccaccaaactcacaaaaggagattaaacccttccaggattgccatcaagcttcccgagatggccagggccaagaaagaatcatct

SEQ ID NO: 8863 - DNA, 2300 bp, Homo sapien
ttttattttttttggaacagagtctcgctccatcccccaggctggagtgcaatggcgtgatctcggctcactgcaacctccacttcccaggctcaagtgattctcctgcctcagcctacttgtgggattacaggtgcttgctaccatgcccggctaattttcgtttttgttgtagttgttgttttgagacggagtctcactgtcgcccaggctggagtgcagtggcacaatcttggctcactgcaatctccatctcctgggttcaagcgattctcctgcctcagcttcctgagtagctgggattacagacatgtgccaccacgcccagctaatttttgtatttttagtagagactggatttcactttgttggtcaggctggtctcgaactcctgatcttgtgatgtgcccgcctcagcctcccaaagtgttgggattacaggcgtgagccactgcgccaggccttaaacatttgttgattggctggacaataaagaacttgctttagaaggaggagaggacaaaagaaaaaaaatggataggatctctttagttaagtttcagccacagaacctttactgggacaactcttgatcacatgtcaaactgctttcatttggggcaagaggataaggggaagttgcatggtgggaagtgcagagatctggaagacagaagattttactaagtctcttcccccagaaatagcaatgaaaaacaaatttacttgtattctgtctgttttcctttgacttgccagtctgtcagcttatatcttaattatctatctctgctccctgtctctattattgttttttcctctttaataatgatcaagtccaaagaaacgtgagaagccctgttcctagcaccttttcctgagtcaccagggaccccctctttctcccccagggaattactgggaacaagtctttctcattgggtcagactccacacagcactaatatggctaaaagccagagtaaagaaccagggaaagctggagtttggatgagtctggttaaagtccatcctagacagtccaaatgccctgaccccaaaggggaaggcccttctctccagcagagccagattttatgcaagacatttagtatgtcaaagtatcagtctctggccttggaggcaggtcttctgggccccgttttagctcctcccctgggtgatccaggttaactgagctctccactcctttgttcccccaaactttagacctttgacctaagaaagcaaccaagaaaggtcagtgcaggactgggagctcttgaggacacaagaattagagtaaaaggaaggggagagtggcattaaactaatagattcagaactgtagcctttccccagtccaacccttcacagatgggtaacgggggagggtccaggtccctctccaacgcgagttctcaagggcctccggttccagcctggccgaggagcgccatctggcggccaaccccccaacctggatcctctgccccatccgactttctgaagcccgaactagatctgggctggagagtttcacctcctctgcgtcactccggggactccgccctgccaggaacgctcctcctcaagcggggacaggcccaagcgcctcccccgcaggaaaactgcccatcctccctctagggtagactgcttctccagtagagtcggcttaaagctccccccagggatccgccccgcctcgtcgcccacagagcgcccgcctctccccaaggggcatctgcccctcgtcctccagtttccccttgaggagggagagagaacgtgctgcactgcgcccccaggttcaacctccaacccggtccctcccgaagaatggattcctcttctccttctcctcccctgccttatgggagcctcttccagtccacagaacccaaatcgaggttactaatgagctccccttcttcgtgcccaggggacccctctcggcctcaggctctgctcccctgagcttggcccatggccccggcgcccctgggactcggccccagccatctcaccacccgcgccagggggcggggctcccacggcccggccccgggtgggcgggtctatcgtgacgtcacttccgcccgggcctggccgaggttcgggctccgttggccgagggggccgtacggaggtggcagctgtgggaggaggcggcgtggaaggccgaggagctcaagcccggaccaatccccacgttccgggccgcgaccctgaccctgcagcgtaccgggaagcgaaaccggccggatgggccgctgagcccgaatcgggcactggtga

SEQ ID NO: 8864 - DNA, 2300 bp, Homo sapien
tctttagggcggggagaagggacactggaggggctggtcccctgtggggctggagttgggggagtggccctcctcacatccccatataaggcagggcaagcagttaggcttctggattggctgattcaaatgagcattccacctggcaacagggtttctattggctatcaggaaaaataggaggaaggtggatggaggttgttggtggcggtgattggaggggggagaggagtggaggtgaccggagtggggggcggttaccagggcaacagggtaagagcccagcagggtgtccgagacagcaggcggggctgggaggtggagtggagggaagaggaaaggaaggcgggagggagaggaaagagcctgatggggagggagcgagactgggagactgggttgttggttgggcgggggggggagtagcaaaggatcgaggagagggagataaatgaagcaagaggagtacagagatggagacggtgagagacggctgaagacatcagccagtgagtcagagaaacagattgagagagggacatggaaagatctcagaaaagatggacagagtccggcaaggaaaaatcctgggtggggccccaagatttttgaggagactgagactgaaatattgatagaaaagtcagaaagagaaactgggaggcgtgtacatcaagggaccaaaagatggtgtatttaagcactcaaacacaaaataatgataatgatcatcaacgtagttttttattaataaaatgaaaataataagatgaggaataatgataatgacagacaaatatgggagtgcacgcacaccaaaggtctttttccaaaccccagccttccactctgtccaccttcctgacctttaatacacaacccagcccctgttcccttctgaaatcccaagcttttcaaaatgactcaaagataccgagattgagggcgaggagctgaggatgtgtggaatagggtggggctggaactccagacctggacctgtattatatttgcaaaggaggcaaatataacccagaaaggctagggaagatggcagcagaggaatgagaaaagctgaaggatggaaaatgtaaaaaatgaggacagaaagaggagttgaggaaagccagccaagaatagagggccaggtgcctgactcagataagacaagagcagggttgtctgggaaagatagggaaagagaccagaggtggaagggcagaagagagtcagtgaggagtggagaagaggtgagagaagaatgggagcgattcgagttataattggttgtgaaggaggggtctaggtacagatgactgaggacggatgaagagaaatagaaggaccaggcgaataaaagtgaggtgagacgggcgaataagagaggtagaagatggaagagagctggaagacagcaaaggagaccagggggcctgactccccccggctcacagcacggggccaggaagggaggcacccggcaagggtcacaagtgtcaatctggcgggacagaaggctgggccgccctttctgccctcccatccctcctcaaggccatccagagaatgtggatggaggatgagagggggaaatccggcgtggtgtggaaggagcgcccgaaccctcttcctcttctttaagcttttggtttctcaaatacctgccctatcttcccatctgctcccctcaccccaccccttggcaaaatcccagggctttttttggggtcagtaggattctggccacctctccagtccgcccccaaaagccagactccacattcgcaggcagtaggttgggatttggaaaggtgcctccccgcaggaaccccaccccttcccacctcctcgccccactctttctccgcggccgtcagtctctccatttccccctcctggtctcgtcctccctcccgactccctagctctccctcccctcgctttcatcctcctatccccacctctccaacctcctctttcatccccctcccctctcctctcctccccgctcccgcctgccccacccctgggaagcccctcccgtcgggcagcgccgccttataagcgggttcccttcccgggggcggcagcggctggtcggcggcagctctgctggtgcgggggcggcgagcccgggatcgagctaccgcggccgagcgcgccggccaccgcctgcaccgcccttccgcccgccctccggacggccgcagccctgcgggtctccgctccagacccacccccgccccaccccgcgcgcctctgccgcctcttccagagacccagcttgccgagcggccgcc

SEQ ID NO: 8865 - DNA, 2300 bp, Homo sapien
gcgcgcaccacggcgcccggcctcgccgctccggtcgcgccgtcccccgcagccgtccccacccctcttcggccccacctcgctgaccggatcccgtccggcttcccgtccgaacgccccgagtctcactttgccgcgccccctccctgcgccccgctgccgcgtctttgcttgcaacctgacctcacctttcctcgctaagcggtttgagatcctcaagtgtaaacaggactctccctggaggctgctcctccgggcccctccccgcggcccgaccgtcgctcgcttctctccccggacggcggccgcctctgttttctcgttccctcccctcagctggctttcagctttcttttctcttcatcgtccccttcccgcatacacactgaaagaatctcgaattcctaaaaattagaagcggggcaggactagccttcgaaaaagccgaggctgggcattgcatggcattgcgtcgagctgtcctcgccctcatcagctcccttccccggccccatccgttcgcccttgcctctcttccagccttcctctaatttccccagggaacctgcggagtgtcgctttgggaaattaacgcggccggggtttgggggctgggagccctatcttgtgtgtgtatgtgtatggcggggggggggggcgcggtggttgctgaggggccgtcacacaggtctcccggaggcccgcggagtgaaacggggggagccaatgggattaacggcggtgggagaggggctgtgtgcgatctgccaaggtgcgcccgtgtggccctccggcgggctgtgcggtggcatgtgacttcactgagtaggtgtctttgtatgtctgaaatccagcgagtgtgtgggactgcccgtgtcagttacatgtgtgcatgtggagacgtagatgttctggagccatgttgtcgctttgtgagtgctgagtggctccgctgtgctcccgtgctgtctcaagagtgtggaccagaatggcccaacgctgggccatgtgtctcccatcgcgtgggtgctcctctctaactgtgtctgtgcatggctgtcggccggtgtcggtgtgtgtgcctgtgttgagtaaatgaggccagagggctgcttagcagaagacctagggcccaggtcacatattctcctggaaaagggatcatggaaggacagtgaccagaaggacagaacaggggaggagagggcccggccccttgaactttggtctctggtattctccctccctgcatcagcccagatgggaaagtcaggccagggccatacagacttttggtgctggggcccccagagagaagctgaccagctctttgctctcctggcccaggacgtagggaagagccccctaggtagtggaaatgccatactgaccttgtggcacagaaatgaagacctcacggtggggtggaagggcaccctctctggagtgagagtgaagagttctgagctacccttaaagggagaagggaattgagtgccccccagggcagccgttctgcaccaggctcctctcctatcccctatcctgttccagaaaggacccccccgcccagggtgatctcacacaggagacttccattcacatggaatcagatacacagcgtggcacaccaacaccagatcagatcacacaaggacacctaccgtgttacactgtgcctgccaaggagtgggtggggagagcactggaatctgaattgggaggctagtgtagtgtccagaagggactcagatgtgccatatcagcacaggacgtcaacctatgcctgctaggatcttggggtgaaggagaggggctggctggtgggagggtctcctagactggtccctccctcttctccattcctatcccaccccagtcacagaccttgtttgttgctctctccttgtttcccacgcctgctactcttcccctccttgttttctcttctacttcacctacatttccaccgtaaatggctacttccactacacccatgcatacaccatgggaggcagggatagaggaaactacttgaactgttttggggcggggagggcagaaagtgggaggggtgctgggaatgtgctaaggtgtagtgtttggccaagtaggggcctgaggattagggagacacagatggagagaaacaaagaccttagaagctgaaggggaagctgggagggatgcccaggagagagagtcctcaggaaaaggccccagaggtagacaaaaggcagagctgggcgggcagtggcggggcaggcaagggaggcggagggacacaggagggggcgggg

SEQ ID NO: 8866 - DNA, 2300 bp, Homo sapien
cccaaacggcagaagacagaaaatggggcatcggcgtgagcccctgccaacaggctggggttgggaggcctctctgggcctggaggtgggggtgggggcagccaagtccagccactcttcacctggctccctgctctgggccctgcaccagagctgccaccctcttctttctccccagccttctcatttccgcctctccagacactgcgccctccaccctcactctgccattgttccacctcctgacctgctccatctgagctctccagctggcccccaattgctcctctctctctttgctctctttctccctcccctaccagcctcattcttcctccggtagcctctcccacctaacctctgcatcccccagcctcatgtcctgccccatccctatcctgcctgatccctggatctccctcagatcccctcttctcagacagcgccaggccggggtggggccggggttggggccgagccccacagctgcccccctcccctccctttttgtataatttaataaagaaatggtcgcgcttctgtttttaacctgtctcctgctttcccgggggctccagtcagtgcgacaaaagggtagagagggaggagggtggctgacctcccattctgccaggacccttccctttgatacaaaagcagcagcacactcctaccacccacgactcaagaagacaagatcagccctccaggggtggcctggagcccagctcttctgagagctgacttatgtcctgttttggattctcagggatgctcctccccagcaatacacacttccctgctaacccacacaagacctagacactgctgagcccagtggaaagctaccagctctattgtgctgaaccaggcacagagaaacagcccagaaacaggaagtccttcccctgagctgggagagggctggtagtcctgggtctcagcctgctaggatctggagtgagctgcctggcatcagagatgccctctgcctggcatggaagcgagctccttccagtcaagcagggaaatcctgggtctcgtgtcatccccaggtcggctgtatgtttcgtcacctgccctccaactctccctgggctgggctggggagcgggagttgtatgactcttgtcagtcttgggccttccctagtcccactgcctctgtttcccctgagtttgatctctgttaggagatttctaagatttctgcatttctccatctccgcatggcccttgccttctcctcttagttcggaacctctggactggaggatgcttctgagggcatggggacctgagttggagtggggaggggtgttgactcatcaacagcatcatttctcccaggagacgcccgtaactcatccaaggtcaggactacacactgtcacgcacacaggtacactcacagcttttatcttcacgctccctaaccttggcaaattgtacaatttctttgaagctcagtttcctcatctgtacaatggggaaaagcattagatttcatgaattactataagtaaagtgtccaatacagtgcttagcacgtaatgaagcctcaatacaatgtagttattctccatgccccacaaagctggcatgcctagcctcagacctaccattttttggggtgcagtaaggcttcctgtccaccatgttcccagggacattgtactgatgggtggaaaggcaggtctaaaggggtcacgaagttctgggaggttaagggaacgaggaaggagattgagcaacaaggaaagagcttgccaagaaggaggtgtgaatattgggactgaggaggcagcttagagatgggcaagggggcagttccaggcagaaatggttcgtggaggcagaaggtccctgggagagggagcagtctggagggtggggcaggggcgaggagggggaggtggggagacccaggactgaggaagtaaacaaggggagcgccaccacagaggtggagaggtggagggtgctgctgctgggaatcaaccccctcagactttccactgcgaagcgaaaccgtaagccctggggtgcggggggcgggccgggaggaggggaagtggggaaggtggagggaaggccgggcacaggggtgaaggcccagagaccagcagaacggcatcccagccacgacggccactttgctctgtctgctctccgccacggccctgctctgttccctgggacacccccgcccccacctcctcaggctgcctgatctgcccagctttccagctttcctctggattccggcctctggtcatccctccccaccctctctccaag

SEQ ID NO: 8867 - DNA, 2300 bp, Homo sapien
aatgttgcaaaaacaatctggataaaactgctgccttagcataaatgaaggcagtggtgccaaaccatatgatagtcattgcattcttcactgccaggtacttacagtaaaaaaagaaaaaaaattaatgccacttttacttaagaatgcccttaatgaggccgggcgcagtggctcgtgcctgtaatcccagcactttgggaggccgaagcgggcagatcaggatcacctgaggtcaggagttcaagaccagcctggccaacgagtgaaaccctgtctctacaaaaatacaaaaattagccaggcatgttggcgggtgcctgtaatcccagctactcgggaggctgaggcaggagaatggcttgaatccaggaggcggaggttgtagtaagccgaaatcatgctgctgcacttcagcctggatgacaaagcaagactctgtctcaaaaaaaaaaaaaaaaaaaagagagatcaagaccatcctgggcaacatggtgaaaccccatctctactaaagatacaaaaattagctgggcattgtggcgcatgcctgtagccccagctacttgggaggctgaggcaggagaattgcttgaacccgggaggcagaggttgcagtgagccaagatcacgccactgcactctagcctgggcaacagagtgagactccctctcaaaaaaaaaaaaaaaaaaaaatatatatatatatatatatagaatgcctttaatgaagcagtaaatactaattttattaaatctcaacccttgagtacggtgtgtcatgaaatgagaagtagcacacagtactatatgctacagatgaagtacaatgctgtcaaataggggtacttgtgttaattgttggagtcgcaagctgaactagagttttcttttcttttcttttcttttcttcttttcaagacaggttctcactctgtcactcaggctagagtgcagtggtgcaatcacggttcactgcagcctcaacttcctgggctcaagcgatccccccacctcggcctcctaaaatgctgggattataggcatgagccaccactcccagccccacttttttcagactggaaaacgcacactcacatgtgcatctttaaatgatcacttgggctgtggtatggagaatggcgaccagtgaggaggcaggagctgttgtccgagcaagggatgatattggcatcttggattggcatggtggcagtagtggtagtgcagagtgacttgggtagattttggagccatttagaaggtaacatccacaggaactggtaaataaatacgtgggagaagttgggtgaagggggtgtcaaagattacacccaatttattttgcttgggcaagttggtggatggtgagcccctcactgagtgagaagcctggagaagcaggtttggagggtggtagtatgcaggtggtatgcatagttggggatgtgtgttgagtttgctatgtccggtgagcttcccagtggagatgtccaatgggcagacggatactcacatagagagttcatggtagattcgggctagaggaaagcacctgaggcctggccagagacgcctagaggaacagagcctggttaacagtcactcctggtgtctcagatattctctgctcagcccacgccctctcttccacactgggccacctataaagcctccacagatacccctggggcacccactggacacatgccctcagggccccagagcaaggagctgtttgtgggcttaccactgctgttcccatatgcccccaactgcctcccacttctttccccacagcctggtcagacatggcgctaccactaatggaatctttcttgccatctttttcttgccgcttaacagtggcagtgacagtttgactcctgatttaagcctgattctgcttaactttttcccttgactttggcattttcactttgacatgttccctgagagcctggggggtggggaacccagctccagctggtgacgtttggggccggcccaggcctagggtgtggaggagccttgccatcgggcttcctgtctctcttcatttaagcacgactctgcagaaggaacaaagcaccctccccactgggctcctggttgcagagctccaagtcctcacacagatacgcctgtttgagaagcagcgggcaagaaagacgcaagcccagaggtaaggtggtcagactcggcttccttccccggagctgagagggaggggaacgtggggcagatgcacaggaatgtgctctgcccagttgtctgcccacagctctggccaccttctc

SEQ ID NO: 8868 - DNA, 2300 bp, Homo sapien
actgctcatttggatcccaggggagtgttcagggccagccctggctggcatggagggtgaggctgggtgtctggaagcatggagcatgggactgttcttttacaagacaggaccctgggaccacagagggcaggaacttgcacaaaatcacacagccaagccagtcaaggatggatgcagatccagaggtttctggcagccagtacctcctgccccatgctgcccgcttctcaccctatgtgggtgggaccacagactcacatcctgaccttgcacaaacagcccctctggacacagccccatgtacacggcctcaagggatgtctcacatcctctgtctatttgagacttagaaaaatcctacaaggctggcagtgacagaactaagatgatcatctccagtttatagaccagaaccagagctcagagaggctagatgattgattaccaagtgccggactagcaagtgctggagtcgggactaacccaggtcccttgtcccaagttccactgctgcctcttgaatgcagggacaaatgccacacggctctcaccagtggctagtggtgggtactcaatgtgtacttttgggttcacagaagcacagcacccatgggaagggtccatctcagagaatttacgagcagggatgaaggcctccctgtctaaaatccctccttcatcccccgctggtggcagaatctgttaccagaggacaaagcctttggctcttctaatcagagcgcaagctgggagcacaggcactgcaggagagaatgcccagtgaccagtcactgaccctgtgcagaacctcctggaagcgagctttgctgggagagggggtagctagcctgagagggaaccctctaagggacctcaaaggtgattgtgccaggctctgcgcctgccccacaccctcccttaccctcctccagaccattcaggacacagggaaatcagggttacaaatcttcttgatccacttctctcaggatcccctctcttcctacccttcctcaccacttccctcagtcccaactccttttccctatttccttctcctcctgtctttaaagcctgcctcttccaggaagacccccctattgctgctggggctccccatttgcttactttgcatttgtgcccactctccacccctgctcccctgagctgaaataaaaatacaataaacttactataaagatgctcttcgtgtgtgtgtgtgtgtgtgtgtgtgtgtgtgtgtgtgtgtgagagagagagagagagagagaccccttctctggggaccaggaatcttctggtctttggggtcggacccagaggagaggttgctgggcgtgccccaggaaggagatgaagtttccctggagagggaaaaattctgtggaggctggctacccacctccacaacccacagggctctgtgtgggcctgtgtgtgtgtgaggctgagactctgtaattacatgtgtgtgatataccgtgggggagagactcagggttgtgtgagctctcctggtgtatgtgtgtggcagagaaaaaggactatgagaaactgtaacatgtgtgtgcaaattgtatccccaacatatgtgtttgtgttccaggaggaggaggcagagtgtgtgtgtctgtgtgcatgcatgcgcccacatccttttagcttgtgcacaaccacccccaactccacaagcagccccagtgtgcaccacaagccccctcactcccaaacccaaggcccagccctcacacagatacacacagtgacacacgcttcctcctccccgaacagctagctcctcagtccccaacaacaccagctgcctcttggagcttgtgttcgtgttgaaaacgggaaggggtgggggcaggacatgaaccatttcaccaatgaagccggttcccagccatcctcctcaccgccctccctctcagcgccttccttgcccctcctccccgagtcaccaccgtccagttccccaccctgcactcgtttcccgcccccccccgccccccacaaagctgtcctgccttccctctggcctgggctcactggcaggacgaccccgggagagagggtcctggagagtgagaggggcagagaccgagtgagccgtgggctgagcctgggaggccgggactgagggggaggagggaggcccgggggaagggagggagggagagagggaaggagggaggagggcgggcgagctggagccggcaggcagcgggagcccgagagagccgcgtcgggagtgcggtctccatggcagtgctgggcgcagccggagagaggta

SEQ ID NO: 8869 - DNA, 2300 bp, Homo sapien
aagtcggactcggcgcccccctggatggtgctggctgtgctgtggtgctccatggcacagacgctgctgctgccctccttcatctggtcctgcgagcgctaccgcgccgacgtgcgcacagtgtgggagcaatgcgtggccatcatgtctgaggaggatggagatgacggtcagaggaggggctgggctttggctttcctggacatctgtctattcccttttctgccgctccttctcagccagaggatgggctgccctggagtgccccctactggacagaatctgcaccaccctgggctcccctttccctaagcaggcaccctgctgtccactcactgcttcccgcagcactcagggctcccttcactgggcctaggctcccctccagaaacccacactgcccagctctggcactatggggaacctgagcttcccgagagaggccccccagctatagggacggctcttgggggagtgcaggcaattgtttcaataacttcatctatatgtatgaagcactccactcaggatttagcactgaacgcagcaaatgctagccactctcactgtcctcttggaacatacatgctaatgggaactaaaggggtctctgggagcttataaaggcagtggtgggaggccgcggtaggcattccctacctgtaaccactctgcccattttctctcctagatgggggctgtgacgactatgcagagggccgagtttgcaaagttcgctttgatgctaacggagccacaggaccagggagccgggaccccgcccaggtgaagctgctgcctggaaggcacatgctcttccctcctcttgagagagtccactacttacaggtatggaactgggggatacatctcctacccttggtgccgctcatcacttttctccagtgtctgttaggcaccccaatcccctcttccctagccctggctttcagggcaccatagagctgggtgaaagaaagctatagcaagagaggcatcccttcagacctcgtggggccaggtttgcccaccggagcaaacgttttgaaggttaagaaggtggcaccatcttccggagtccccacttggttcctgcctctgcctctgtccctgcagcaccttcaggtcttacccgctcctcttcccaggtccccctatcccggcgtctgtcccatgatgagacaaacatcttctctacccctcgggaaccaggctccttcctgcacaagtggtcatcctctgatgacatccgggtcctcccagcccagagccgggccctcgggggtcctcctgagtacctgggacaaagacacaggttggaggacgaggaggacgaggaagaggctgaaggtggggggctggccagccttcgccaattcttggagagtggggttctggggtcaggtgggggacccccacggggtcctggcttcttccgggaggagatcaccaccttcatcgatgagacacctctgccttctccgactgcctcaccagggcactctcctcgtcggccccggccactgggcctctcaccccgccgactctcccttgggtcccctgagagcagagccgttggacttcctttgggactaagcgcagggagacgctgctccctgacggggggtgaagaaagtgcaagggcttggggaggatcctggggcccaggcaaccccatctttccccagctgaccctgtgagcccaagcaggcctgctgaactcagaggagaaagcctgagtgagtaacacctcattctggccgagagtagggcagctgcctccagactctggggagacgggcgctagatttggggctcagaaggccctgctctctcccatccaagtgaccagatgccctactcagcttccatcacccctagcaatatgtattaaagtctgaagtgttgccatggaaacctcagtgtccagtgtactgcggtggaaaggggcttggagggtggagtggctcacaggggacacgacagagcaggggcagcagacagaggcacagaaggacacatggagaaatgatcacatgctccaccaggcagcctcgcacagggaaggctgggaggagcatatcctgctgggggcggggcttgaggacacacatcttcgttggttggggtatgaaggatctctgttcagatttgttgaggtggttttagagcgtggctccagccccagtgcccaactctccttctaacctcaaatccatgcaggggctcactttatgggcaggaaaggttttggggctgatgcagtgtcccgggcctggacacctcctccttgctgcatt

SEQ ID NO: 8870 - DNA, 2300 bp, Homo sapien
cgagagaggccccccagctatagggacggctcttgggggagtgcaggcaattgtttcaataacttcatctatatgtatgaagcactccactcaggatttagcactgaacgcagcaaatgctagccactctcactgtcctcttggaacatacatgctaatgggaactaaaggggtctctgggagcttataaaggcagtggtgggaggccgcggtaggcattccctacctgtaaccactctgcccattttctctcctagatgggggctgtgacgactatgcagagggccgagtttgcaaagttcgctttgatgctaacggagccacaggaccagggagccgggaccccgcccaggtgaagctgctgcctggaaggcacatgctcttccctcctcttgagagagtccactacttacaggtatggaactgggggatacatctcctacccttggtgccgctcatcacttttctccagtgtctgttaggcaccccaatcccctcttccctagccctggctttcagggcaccatagagctgggtgaaagaaagctatagcaagagaggcatcccttcagacctcgtggggccaggtttgcccaccggagcaaacgttttgaaggttaagaaggtggcaccatcttccggagtccccacttggttcctgcctctgcctctgtccctgcagcaccttcaggtcttacccgctcctcttcccaggtccccctatcccggcgtctgtcccatgatgagacaaacatcttctctacccctcgggaaccaggctccttcctgcacaagtggtcatcctctgatgacatccgggtcctcccagcccagagccgggccctcgggggtcctcctgagtacctgggacaaagacacaggttggaggacgaggaggacgaggaagaggctgaaggtggggggctggccagccttcgccaattcttggagagtggggttctggggtcaggtgggggacccccacggggtcctggcttcttccgggaggagatcaccaccttcatcgatgagacacctctgccttctccgactgcctcaccagggcactctcctcgtcggccccggccactgggcctctcaccccgccgactctcccttgggtcccctgagagcagagccgttggacttcctttgggactaagcgcagggagacgctgctccctgacggggggtgaagaaagtgcaagggcttggggaggatcctggggcccaggcaaccccatctttccccagctgaccctgtgagcccaagcaggcctgctgaactcagaggagaaagcctgagtgagtaacacctcattctggccgagagtagggcagctgcctccagactctggggagacgggcgctagatttggggctcagaaggccctgctctctcccatccaagtgaccagatgccctactcagcttccatcacccctagcaatatgtattaaagtctgaagtgttgccatggaaacctcagtgtccagtgtactgcggtggaaaggggcttggagggtggagtggctcacaggggacacgacagagcaggggcagcagacagaggcacagaaggacacatggagaaatgatcacatgctccaccaggcagcctcgcacagggaaggctgggaggagcatatcctgctgggggcggggcttgaggacacacatcttcgttggttggggtatgaaggatctctgttcagatttgttgaggtggttttagagcgtggctccagccccagtgcccaactctccttctaacctcaaatccatgcaggggctcactttatgggcaggaaaggttttggggctgatgcagtgtcccgggcctggacacctcctccttgctgcattttaaagctctttctccaaaggagtgcaggggtggatgagtgtgtgtgtgggcgggggtgggagtgcaggggtggatgagtgtgtgtgtgggggagtgcaggggtggatgagtgtgtggggggggtgggagtgcaggggtggatgagtgtgggggggtgggagtgcaggggtggatgagtgtgggggggtgggggggggcgagggggggatcggcgtccacactcctttttctggacccagaagcgtgtgtgtggagggaacacagccccagtagttacccccagacctcaggggctgaagtcaccgctggggctgaagtcatccttcatggatgcccaggcctgctccagttcccgccttttgccctcctcctcccagtttctccctcttattccacactagaccagctttgtccactcagcactcttctctct

SEQ ID NO: 8871 - DNA, 2300 bp, Homo sapien
catcccttcagacctcgtggggccaggtttgcccaccggagcaaacgttttgaaggttaagaaggtggcaccatcttccggagtccccacttggttcctgcctctgcctctgtccctgcagcaccttcaggtcttacccgctcctcttcccaggtccccctatcccggcgtctgtcccatgatgagacaaacatcttctctacccctcgggaaccaggctccttcctgcacaagtggtcatcctctgatgacatccgggtcctcccagcccagagccgggccctcgggggtcctcctgagtacctgggacaaagacacaggttggaggacgaggaggacgaggaagaggctgaaggtggggggctggccagccttcgccaattcttggagagtggggttctggggtcaggtgggggacccccacggggtcctggcttcttccgggaggagatcaccaccttcatcgatgagacacctctgccttctccgactgcctcaccagggcactctcctcgtcggccccggccactgggcctctcaccccgccgactctcccttgggtcccctgagagcagagccgttggacttcctttgggactaagcgcagggagacgctgctccctgacggggggtgaagaaagtgcaagggcttggggaggatcctggggcccaggcaaccccatctttccccagctgaccctgtgagcccaagcaggcctgctgaactcagaggagaaagcctgagtgagtaacacctcattctggccgagagtagggcagctgcctccagactctggggagacgggcgctagatttggggctcagaaggccctgctctctcccatccaagtgaccagatgccctactcagcttccatcacccctagcaatatgtattaaagtctgaagtgttgccatggaaacctcagtgtccagtgtactgcggtggaaaggggcttggagggtggagtggctcacaggggacacgacagagcaggggcagcagacagaggcacagaaggacacatggagaaatgatcacatgctccaccaggcagcctcgcacagggaaggctgggaggagcatatcctgctgggggcggggcttgaggacacacatcttcgttggttggggtatgaaggatctctgttcagatttgttgaggtggttttagagcgtggctccagccccagtgcccaactctccttctaacctcaaatccatgcaggggctcactttatgggcaggaaaggttttggggctgatgcagtgtcccgggcctggacacctcctccttgctgcattttaaagctctttctccaaaggagtgcaggggtggatgagtgtgtgtgtgggcgggggtgggagtgcaggggtggatgagtgtgtgtgtgggggagtgcaggggtggatgagtgtgtggggggggtgggagtgcaggggtggatgagtgtgggggggtgggagtgcaggggtggatgagtgtgggggggtgggggggggcgagggggggatcggcgtccacactcctttttctggacccagaagcgtgtgtgtggagggaacacagccccagtagttacccccagacctcaggggctgaagtcaccgctggggctgaagtcatccttcatggatgcccaggcctgctccagttcccgccttttgccctcctcctcccagtttctccctcttattccacactagaccagctttgtccactcagcactcttctctctccatcttttcacatgggcctctcccaccatcgggtctcagccccatcttctctctctctctctctctcggcctccctcattatttctccctctccctccgcctctccatctctccttcctccccctccctccccttcccccctttcctctccctccctctcggctcccgcatttcccctcggctgccggcggctccgacatcatgctccggctcctccggccgctgctgctactgctgctgctgcctcccccggggtcccctgagccccccggcctgacccagctgtccccgggggcgcccccgcaggcccccgacttgctctacgctgacgggctgcgcgcctacgcggccggggcttgggcgccggccgtggcgctgctgcgggaggcgctgcggagccaggcggcgctgggccgggtgcggctggattgcggggcgagctgcgcggccgatccgggcgccgcgctccccgccgtgcttctcggggccccggagcccgactccgggccgggacccacgcaggggtcctgggagcgacagcttctccgtgcagcgctccg

SEQ ID NO: 8872 - DNA, 2300 bp, Homo sapien
gcagcccctctagtggtcaggcaggtgggcagacaaaggtcatcccactgccggcctgggcctgggttggggtctcactgcctcttgcttttttccctccccagcggactcctctacctcaacgatgacttccagggtggggacctgttcttcacggagcccaacgccctcactgtcacggtgcgtggagtggggggtgtgacggtgtgacaaagggcccagctgtggggtcaggattcaaaacagaaggctccagaggcaaatgcagggaaatggccagggcttttaaccctttcacttccccgcctccgcagccctcccgctgcttcctccgtagcaaggtctctaagtggccgaatcaaccctaccatcagtatttgtctcgcctcctaaagaagggtgaatgaagcacagcttgcaggtgcctccaggactccatggccctattctagggatttggggaacttgaaatagtccttcctctttgcagcgaggtgagcacagtggctggcgcacagataccagggccgccttgactggggctcggattctgaacctttctgaggtttagtttcctagactggggtgataataatagtacgtattttaaagggtcattgtaggaagtaatttaggtaatgtacctaaaagaatgaggcagcgcctggtaatgataagcaattaatgaatgttaggtgggaaatttccggacaccaggggctaggattgggtaggaggagaggggcagtgattgttcatctgggtgtggggtgtgaaaatggttccaatatctgtatccccttctgcatagagtctggtactgcatgcacagccccagattgcttcaagccctggattcaaagggctgagtgggaaaaatcagggtaccaggggtcaggaaccaacaggagaccatccgtggagacccctttttcctttggttcccaactcctcttgcatttttgctctgcaagttgaagctgatttctcatttgccccaagctagtccctgaattaaggagtaggaagtggtagcgagagagctgatcctctctgtgcccctgtccccatcctgctctagggagtgagggccaagttctctgagagagccaatccctggagctgaacctgccctcatccctccaggctcgggtgcgtcctcgctgtgggcgccttgtggccttcagctccggtgtcgagaatccccatggggtgtgggccgtgactcggggacggcgctgtgccctggcactgtggcacacgtgggcacctgagcacagggagcaggtaaggagcggggtaggaagggatgtggttctcctggtgcgtgaagggtgggcaaggagcccccgagaaggctcacagtcggtgagggtcaggggctgagctgacccagggaaggtgggtgcagggaatgggccacactctcctccccaaccccaggagtggatagaagccaaagaactgctgcaggagtcacaggaggaggaggaagaggaagaggaagaaatgcccagcaaagacccttccccagagccccctagccgcaggcaccagagggtccaagacaagactggaagggcacctcgggttcgggaggagctgtgagtggctgagccagctccttgaggatgtggccacttgacttgtggaaggccatcttgatgccaggacacacaggaagcccctgtgtgacatcaggagcagaacagcaagctctctgtccctgcacccccaccatcttggggacctacaagggcctggactcagaggacagtgcacaggctagcctggagctcaccaggcctggggagctgggacggggccccgctgccggacctgcagccctggacagatggggaacactgtgcctccctgaacagaaatggcaggggaggaggctgatgctttaaatgaagaggatggtggggttgggaggtataaccctgctcctctctcccagtctgtgcaataaaggtcgtgaagatctctcagccaggggccagtcaagtgtatcacagattctgtgatggctggaggtgggggtggctctggctggcctgggaggagacaggtgtctttgggcctcccagaggcggggcgcctggagcctgtgatttgtcagggaaatctcagccacctgctcccctcatgcaaatgacccaagcccctggcagctgctccttaggcctccaagtgtaagccctgtcttccctctctgagctttgctgagacttagggccgcctgctttctctctgacccctgctttcacagcctcgagagggcaaggagggggcca

SEQ ID NO: 8873 - DNA, 2300 bp, Homo sapien
ctgatttctcatttgccccaagctagtccctgaattaaggagtaggaagtggtagcgagagagctgatcctctctgtgcccctgtccccatcctgctctagggagtgagggccaagttctctgagagagccaatccctggagctgaacctgccctcatccctccaggctcgggtgcgtcctcgctgtgggcgccttgtggccttcagctccggtgtcgagaatccccatggggtgtgggccgtgactcggggacggcgctgtgccctggcactgtggcacacgtgggcacctgagcacagggagcaggtaaggagcggggtaggaagggatgtggttctcctggtgcgtgaagggtgggcaaggagcccccgagaaggctcacagtcggtgagggtcaggggctgagctgacccagggaaggtgggtgcagggaatgggccacactctcctccccaaccccaggagtggatagaagccaaagaactgctgcaggagtcacaggaggaggaggaagaggaagaggaagaaatgcccagcaaagacccttccccagagccccctagccgcaggcaccagagggtccaagacaagactggaagggcacctcgggttcgggaggagctgtgagtggctgagccagctccttgaggatgtggccacttgacttgtggaaggccatcttgatgccaggacacacaggaagcccctgtgtgacatcaggagcagaacagcaagctctctgtccctgcacccccaccatcttggggacctacaagggcctggactcagaggacagtgcacaggctagcctggagctcaccaggcctggggagctgggacggggccccgctgccggacctgcagccctggacagatggggaacactgtgcctccctgaacagaaatggcaggggaggaggctgatgctttaaatgaagaggatggtggggttgggaggtataaccctgctcctctctcccagtctgtgcaataaaggtcgtgaagatctctcagccaggggccagtcaagtgtatcacagattctgtgatggctggaggtgggggtggctctggctggcctgggaggagacaggtgtctttgggcctcccagaggcggggcgcctggagcctgtgatttgtcagggaaatctcagccacctgctcccctcatgcaaatgacccaagcccctggcagctgctccttaggcctccaagtgtaagccctgtcttccctctctgagctttgctgagacttagggccgcctgctttctctctgacccctgctttcacagcctcgagagggcaaggagggggccagaccccagcctgggagcagcgtgcgggccttccctccacttgaaatccgttgcccgcccacaataggggcagacctgtccatccttctctgtgggtcccctgtacctttctcccccaacaggatcagacccagaggcagctggttggggtttgtcgagaagaaggattatccagatcagtcctttctaatctcagctcctgcctgtaccctcccatactcaccaaaccctcttccccaccaccctgagctgaggagcacagtttgaggtactgacaatggggccatctatcacccttatatcccacctcctggcctggttgctaagtggccctgactgccaagatcatcaccatggatgggggccgggaccaggggggccactggagctgtagttgtctgctcctttgcacccctcccaaaccccaacccttaatcctcacagctttgctctaatcctgtggggcctgatgctcttatctctgcctgcagagactgaccagggaagcaccccttcaccccctcctctctcagggcttgtggtgggggctgcccctctctatggccccacactcctgcccccaaccctcctcccggctgggcccaagtctctctggaatccgtacacctccctccctccccccaccccttccccccacccctgccagctgatttcatttgcctgacgttgtggttggctctacccttccctgtcaggcccccccaaccccccgccggtcggggccaggccaggccaggccagctcctctggcagcagagcctgggcaggtgacgggcgggcgcgggcgtcgcagctgagggagtaaggaggctcccaggaaccggagctggaaacccggccgaggtccagccagagcccaagtaagagggagctggcctgggctctgctctcctgggctggggcgcaggcagggctcaggcaggctggggctggacgcaaaggacctcaaacttggagggc

SEQ ID NO: 8874 - DNA, 2300 bp, Homo sapien
atagaaaactagcagctagagtctacaagggctttataatttacaaagtactatcgcttcttcatcttcaaggccctgggagggggctgtggtcactcttgttctacggatgagaataggaaccgtgtccgcatctttcgcatccaatatggtgcctggctcagagcaggtcccgctaaaatgttggtcgaatgaattaattaatgggtttcctcactccaaggacgtgctgtactaatgctcggagcaacgcgctattgcgggtcggggagctcccttcccctccccccatgccctgccttccgggggacagggggtcttacctctgccagagtaacgtcagcacaggctttcctggcatcctgcagggaaagcagacatcaggggagcaagggcgaggtgggggtggcaggtgcatgggccttcagggcaggttggtcttggggctctggggcttgggggtctcaaatatgcgaaccaagtttagaaagtccctggtcacttctagtcactcaagagcaaacccagccccctccccctgggccacgctcctcatgtccccagctgttttctggggccccaggggtagggctctggagttactgcaatctgcttcttgagctgctccgcttcctgacgcagttgctccatctcccccatggctgacaggtcgaggggtcactctggctcctgccaggaacatggggtcggtgttgaggaaccccccaccaggctgtgcttctgcccttcgtgcccacaccagactccaagacacagggaaacgactgggtggctgcaccctctccccagctaggccctccaagtttgaggtcctttgcgtccagccccagcctgcctgagccctgcctgcgccccagcccaggagagcagagcccaggccagctccctcttacttgggctctggctggacctcggccgggtttccagctccggttcctgggagcctccttactccctcagctgcgacgcccgcgcccgcccgtcacctgcccaggctctgctgccagaggagctggcctggcctggcctggccccgaccggcggggggttgggggggcctgacagggaagggtagagccaaccacaacgtcaggcaaatgaaatcagctggcaggggtggggggaaggggtggggggagggagggaggtgtacggattccagagagacttgggcccagccgggaggagggttgggggcaggagtgtggggccatagagaggggcagcccccaccacaagccctgagagaggagggggtgaaggggtgcttccctggtcagtctctgcaggcagagataagagcatcaggccccacaggattagagcaaagctgtgaggattaagggttggggtttgggaggggtgcaaaggagcagacaactacagctccagtggcccccctggtcccggcccccatccatggtgatgatcttggcagtcagggccacttagcaaccaggccaggaggtgggatataagggtgatagatggccccattgtcagtacctcaaactgtgctcctcagctcagggtggtggggaagagggtttggtgagtatgggagggtacaggcaggagctgagattagaaaggactgatctggataatccttcttctcgacaaaccccaaccagctgcctctgggtctgatcctgttgggggagaaaggtacaggggacccacagagaaggatggacaggtctgcccctattgtgggcgggcaacggatttcaagtggagggaaggcccgcacgctgctcccaggctggggtctggccccctccttgccctctcgaggctgtgaaagcaggggtcagagagaaagcaggcggccctaagtctcagcaaagctcagagagggaagacagggcttacacttggaggcctaaggagcagctgccaggggcttgggtcatttgcatgaggggagcaggtggctgagatttccctgacaaatcacaggctccaggcgccccgcctctgggaggcccaaagacacctgtctcctcccaggccagccagagccacccccacctccagccatcacagaatctgtgatacacttgactggcccctggctgagagatcttcacgacctttattgcacagactgggagagaggagcagggttatacctcccaaccccaccatcctcttcatttaaagcatcagcctcctcccctgccatttctgttcagggaggcacagtgttccccatctgtccagggctgcaggtccggcagcggggccccgtcccagctccccaggcctggtgagct

SEQ ID NO: 8875 - DNA, 2300 bp, Homo sapien
cgcacaacaagcatctggctcgagtggcggacccccgttcacctagtgctggcatcctgcgcactcccatccaggtactctgggccagcgtgggaaaggcagagaatgtctgaattcttgggtctcttcctaacctgattttgagagagccgtcatgaccccacccttatcctagccttattttctgcaatctcaatctgtgtggggtaggctggatatctgagggccttggcaattccttcctggaatatggggaggagaggagagaagagtcagggcccagacttgttctagcctatggtcttgacaggtggagagctctccacagccaggcctaccagcaggggagcaactggagggtcttaaacatgcccaggactcagatccccgctctcctactcttggtattgcacggacacctatgaagaccagcagtggaggtaagcgttgggcccagggaatgctgatgaagctgtcatctattattcttgggtagggtccatgaagccattctctcagggttccttaaaggggcctctatcctcctgcttcggacccatctcactcttatctcaatattttgttcccagcctgggtgcggtggctcatgcctgtaatcccagcacgttggaaggccggggtggtcagatcgcttgagcccaggagttcaagaccagcctaggcaacatggcaaaaccccatctctagaaaaaatacacacacataacacacacacacacacacaaaagcacggtggcatgggcctgtgatcccagctactcaggaggctgaagtgggaggattgcttgagcccacaaggtcaaggctgcagtgaactgtgatcacgccactgcactccagcctgggggacagagcaagccccatctcaaaaaaaaaaaaaattgctccctttcaccttgatttccttgatttctctcttcccacttgctcaccctcctgggcatgagtcctgggtttctgtatgttttgctccttgctgaatgttgtgtatcagaaggtcactgttcacttcactttcttcctctagaccccccaagcccactggtgaaacagctgagtgaagtatttgaaactgaagactctaaatcaaatcttcccccagagcctgttctgcccccagaggcacctttatcttctgaattggacttgcctctgggtacccagttatctgttgaggaacagatgccaccttggaaccagactgagttcccctccaaacaggtgttttccaaggaggaagcaagacagcccacagaaacccctgtggccagccagagctccgacaagccctcaagggaccctgagactcccagatcttcaggtacagaatctaaggcaagatgcagggaagataaactaggataatgttttgggataaggtccatgggtgagtgtgggaggaataaactgtaagtcctagttttgggtccttgctttaacgccttacccaccccaggttctatgcgcaatagatggaaaccaaacagcagcaaggtactagggagatcccccctcaccatcctgcaggatgacaactcccctggcaccctgacactacgacaggtaaaggaagagaaagtgcaagctgttactaggatatccaacgtagagggtgggagacccttttacccagatcttccctcttctgaacagcaactccccccaactcatacactgccgttttcagggtaagcggccttcacccctaagtgaaaatgttagtgaactaaaggaaggagccattcttggaactggacgacttctgaaaactggaggacgagcatgggagcaaggccaggaccatgacaaggaaaatcagcactttcccttggtggagagctaggccctgcatggccccagcaatgcagtcacccagggcctggtgatatctgtgtcctctcaccccttctttcccagggatactgaggaatggcttgttttcttagactcctcctcagctaccaaactgggactcacagctttattgggctttctttgtgtcttgtgtgtttcttttatattaaaggaagtaattttaaatgttactttaaaaaggtatatgtaaaccttgcaccgagttttctgtgtgtagaatggcggcctagagagcttgcgttccctggcctgagcccactgatgctctgagccttctttgcacatctccctttaaccatggtgtccctatggctctgtccttggccctgctctccctgggtgtttacttctagggctttagctatcacttccctatattctggtaactttcaggtctctctctc

SEQ ID NO: 8876 - DNA, 2300 bp, Homo sapien
cttgctctgtcccccaggctggagtgcagtggcgtgatcacagttcactgcagccttgaccttgtgggctcaagcaatcctcccacttcagcctcctgagtagctgggatcacaggcccatgccaccgtgcttttgtgtgtgtgtgtgtgtgttatgtgtgtgtattttttctagagatggggttttgccatgttgcctaggctggtcttgaactcctgggctcaagcgatctgaccaccccggccttccaacgtgctgggattacaggcatgagccaccgcacccaggctgggaacaaaatattgagataagagtgagatgggtccgaagcaggaggatagaggcccctttaaggaaccctgagagaatggcttcatggaccctacccaagaataatagatgacagcttcatcagcattccctgggcccaacgcttacctccactgctggtcttcataggtgtccgtgcaataccaagagtaggagagcggggatctgagtcctgggcatgtttaagaccctccagttgctcccctgctggtaggcctggctgtggagagctctccacctgtcaagaccataggctagaacaagtctgggccctgactcttctctcctctcctccccatattccaggaaggaattgccaaggccctcagatatccagcctaccccacacagattgagattgcagaaaataaggctaggataagggtggggtcatgacggctctctcaaaatcaggttaggaagagacccaagaattcagacattctctgcctttcccacgctggcccagagtacctggatgggagtgcgcaggatgccagcactaggtgaacgggggtccgccactcgagccagatgcttgttgtgcggcggaggccgcgctggtgtgactgggacgctcttggctgagcccatctcaaccaggagttgcagggtgggggcaagggccagcccgggacgaggagggaatgcctgtgagaagtgactcaggtctcagcccttatctcttccacgtcggaccttcaaccctaaaccaccctgtcttcccagtttccagtgaagaaacttcctggcgagggaccagaggcctctgcggagttaatgactgctgcagctgacaaaatggctcgttctgggcctgctgagccctctaacttatttattaaattattcaaatcacttaccgggccccaattccacctctggatgcacaacagctcgtggctcaactcccgaagttaccagtttcaaacttcccgccacgccccctgccctgaccctattggctgagccgacgtagttcccataggccctccacgtaagacccgcctcgagccaaaggaagctgttggtctgggagaacgtctatcatggtgactgtaggtgtcaatggactgatgctaggcttgcccaggggtgacgcctccttgataagggtacttctgttcagtatcggcctgcgagccgtccgtggcaggctgaggagtgccagtcttcgctttcgagacgtctagtctcaagaacgaattattaaacaaaatagaatcatgagtgattacactattatgcgcacatccagctggagttgtgatggttttcctgaggcgagcgatagtagctttattggttgacagctgtatcagtcactcgacacaaccccctcaagctccgcctcactggataccccctttacaaataccaagacaactgtccctcgactttccgaccggacaggtccccaggaaactttctggaattgagaggcctaaaacaaccgtcagttcctgctcttcaatagaaggcacgcgaatggactctaagggtcccggagccggagcagctgcggagccgcagcagctgcaaccccgaagcccacctagctgctctacgtgcgctcccgccctggaggagtgggattggttctttcaaccatcaattgccttaggagcgcttctcattggcgtcagtcaagcgcggggcaggggcggagcaccggcaggcaggctccgtccaactgccattctcgcgcgtcgtctccgcggcgcatgcccctaacgagtggcgctcattggacgggaggggcaggggaggggactgggaacggtgggagccgccgtgtgtggagaagctgctgccggtgtcatggcggagctgagtgaggaggcgctgctgtcagtattaccgacgatccgggtccctaaggctggagaccgggtccacaaagacgagtgcgccttctccttcgacacgccggtaagcccattccccacgcccgcaacgagcacgactt

SEQ ID NO: 8877 - DNA, 2300 bp, Homo sapien
agcaaaccacaaatcacagtgatgatcctgaactgggcctcacatcatgctgttctactcagtactggtgatgcagtaatgaaggctttccactctgacttgcagttttcaggccatgagctggttctggcagaatacactgggcagggcacagcagcttgaggggaggggtggtgaggggggcggatcccaaccaagctgctgccttctcagttcaggccccaaagggcctccgcttgagggtgacatagggaaggcagaactgcaggaagggaggtaccaggtggagcctgcaaaacgtgaagcatggtgtgggaggtggctttgtgtaactagccaagagtgggagcgggatgggaaagaggccttagcatcctccgagaaagaaaccacctctctaggaatactttaaaaggggttatctcagctgtctgtgataggctggggggcggggggaagggtgggggctgcggccattgctcacttcaaaggagaaacgactagagctttcctctcctctttcctcccctccccgccccctgtctgttttaaccacggggtggaggctctctgcctttctcagaatcggacttcttgagagtccactcccagactattaaccgcctaggaactgcggtccccaccccccaactccaaccccggccgagaacagtggggagtcgtccccatcactcctacacgagactacaaaacccggagagccgtgcgcggcagacaaggccgactgccaggttttctcaagggtccacttgggggatgtagtccgacggtcgggctgcgcccctagcttagaacggcaacgaaggcagtgagtgactacaatgcccacagtgctccacgaagcggggagccggagaggtgagcgcggcggcttccggggacggtagtcacacgacagccgcagttaatgaaaggcaacggcagagtggagcgtgggagactacaagtcccatggtgcatcgcagggaggcggtagcccaagccttgcaggccccagcggaatgaccagggcgatggaaggaagtcgtgctcgttgcgggcgtggggaatgggcttaccggcgtgtcgaaggagaaggcgcactcgtctttgtggacccggtctccagccttagggacccggatcgtcggtaatactgacagcagcgcctcctcactcagctccgccatgacaccggcagcagcttctccacacacggcggctcccaccgttcccagtcccctcccctgcccctcccgtccaatgagcgccactcgttaggggcatgcgccgcggagacgacgcgcgagaatggcagttggacggagcctgcctgccggtgctccgcccctgccccgcgcttgactgacgccaatgagaagcgctcctaaggcaattgatggttgaaagaaccaatcccactcctccagggcgggagcgcacgtagagcagctaggtgggcttcggggttgcagctgctgcggctccgcagctgctccggctccgggacccttagagtccattcgcgtgccttctattgaagagcaggaactgacggttgttttaggcctctcaattccagaaagtttcctggggacctgtccggtcggaaagtcgagggacagttgtcttggtatttgtaaagggggtatccagtgaggcggagcttgagggggttgtgtcgagtgactgatacagctgtcaaccaataaagctactatcgctcgcctcaggaaaaccatcacaactccagctggatgtgcgcataatagtgtaatcactcatgattctattttgtttaataattcgttcttgagactagacgtctcgaaagcgaagactggcactcctcagcctgccacggacggctcgcaggccgatactgaacagaagtacccttatcaaggaggcgtcacccctgggcaagcctagcatcagtccattgacacctacagtcaccatgatagacgttctcccagaccaacagcttcctttggctcgaggcgggtcttacgtggagggcctatgggaactacgtcggctcagccaatagggtcagggcagggggcgtggcgggaagtttgaaactggtaacttcgggagttgagccacgagctgttgtgcatccagaggtggaattggggcccggtaagtgatttgaataatttaataaataagttagagggctcagcaggcccagaacgagccattttgtcagctgcagcagtcattaactccgcagaggcctctggtccctcgccaggaagtttcttcactggaaactgggaagacagggtggt

SEQ ID NO: 8878 - DNA, 2300 bp, Homo sapien
gacatggagacaggctctggcccagtacctgcctcacattccctgaaactcctgtcctgagtctgagctgttgtctggatctttgggccatcactcaagcattcctcttctgtttccttctctgaccccctctctcctttcctagagtatcagctctttgccttcattagtcacatgggcacctctaccatgtgtggtcactacgtctgccacatcaagaaagaaggcaggtgagtgctggccacatgcgttttgaatggagaatggtggtgggaatgaggagggccatttggaagtccttgggatagctatgggagaaggtgaagggactgcctgatggggacataaagtgccagagagtgacagaaggtcttgcagcagtgattggcccaagggttggatctggccaccagctttttttttaaatagagatgggatctcactatgttgcccaggctggtcttgaactcctgagctcaagtgatccttctgcctcggcctcccaaagtgctaggattacaggcatgagctaccgtgcctggccaggccccctgcctttgtaaataaattttcactggaacctggacacacttgtttatgtgttgtttgtgcctgttttcacgctgcggcaggaaagttgagtcgttgtgtcagagaccagagagagagcctgcagaacctcaaatactatctggcccttgccagaaaaagtttaccaaccccctgcctccctggaatgggtggagggtggttgtaaaggtactggaggatctgaagacataatagggtccgtgacccttgtgaggttgtgaagctcccttaaggcacatggtggctgggctgtggatttggggtatgggcagagagtgtggagagcacttccaggggccatgtctgagagactacatgatgccactttgaatgcccagtttgttcatccttttctgttttccccacttccccagatgggtgatctacaatgaccagaaagtgtgtgcctccgagaagccgcccaaggacctgggctacatctacttctaccagagagtggccagctaagagcctgcctcaccccttaccaatgagggcaggggaagaccacctggcatgagggagaggggctgagggatggacttcagcccctctgctctgtaccctttttccttttgtccccggcagcagggaagaagctggaggccgtgggagaatggctgggcagagcagaggggcagcgatagactctggggatggagcaggacggggacgggaggggccggccacctgtctgtaaggagactttgttgcttcccctgcccccggaatccacagtgctctgcttctctgtgtcgccccgcccagccccctggtgtggagggaggggtctcgtttgtgcgcgtgggtgtagctttgtgcatcctctcccagtggagcgatcacctgtgcctcccctccccctttgtttgcccctgtgtggttggtcaaggagggatgtgagggaaatagggaccccccgacttgccctcctgcctcagtctttcccccaccctgtctcttccttgtccttctctggaaaatgccaaaatacacgatgtgaataaaagtacaacggctaaattgtgtcctgtttgataccttgggggagaggcttaccttcctggggttagcaggagggcgcttaagaaaactcctaactctggccgcctccctgccaaagtcaagtctccacttttcactggttctagagctctaggaaaattggggttgggtggggaggtggagtagagtgactaaatgccgacacaaagccaaggaaagatggagtgaagaacccttccctctctttattcacacaggagtggaggatttcccaaatgtccctaactggctagctggcttcaggctgggactcagtccctgcagttcctgccaggccttgccagccggggcgagggttgggatgatcctggcggcctatgcctgtgtgggctgcccctcccgctgtgaaccctgcatttgtcccgcaagttttcactcaggtagactccctgggtacaagggtgcctgctcagcagtcgggcatgagctgctccgatgggcgaaggaggttgtctatcccacagttggagaggggccctctctgccccagtgggcgatctgggctacggccaagttgccaccagctagttccgcttgaaaaccacttctggccccgtgggggactcaagtcgccaagcgagggttcccctgagcgccggagctcacaggtctcgccttgtcccgaaagccccgcaatcgaggcg

SEQ ID NO: 8879 - DNA, 2300 bp, Homo sapien
caaagccaaggaaagatggagtgaagaacccttccctctctttattcacacaggagtggaggatttcccaaatgtccctaactggctagctggcttcaggctgggactcagtccctgcagttcctgccaggccttgccagccggggcgagggttgggatgatcctggcggcctatgcctgtgtgggctgcccctcccgctgtgaaccctgcatttgtcccgcaagttttcactcaggtagactccctgggtacaagggtgcctgctcagcagtcgggcatgagctgctccgatgggcgaaggaggttgtctatcccacagttggagaggggccctctctgccccagtgggcgatctgggctacggccaagttgccaccagctagttccgcttgaaaaccacttctggccccgtgggggactcaagtcgccaagcgagggttcccctgagcgccggagctcacaggtctcgccttgtcccgaaagccccgcaatcgaggcggaggcgaccgagcccccgactctcctagaacgttgccacaagaagggggaacgtcggaacagtgcatcatcgggcggcggccggggcggcggcaggagggcgggcggggggcagggctccgggggactgggcgggccatggcggaggacggcgaggaggcggagttccacttcgcggcgctctatataagtgggcagtggccgcgactgcgcgcagacactgaccttcagcgcctcggctccagcgccatggcgccctccaggaagttcttcgttgggggaaactggaagatgaacgggcggaagcagagtctgggggagctcatcggcactctgaacgcggccaaggtgccggccgacaccggtaagccctcgccgaggaggggtctggccgggccggggccggggccggggcaggagtggcagcgccctctcccgaggccccgaggccccgaggccggtatccgcgcggacctgatgcagggctgtgggacgagggccgctggggtccgggcaggggcctcgcagccgcagccccgtcggtgcgtcgagggggcagggcggagcacatgatgccccttggactatggggcaggtaaggacgttttgggtctcctggaggaaggtggccccggggcgcgcactggggctgtgcccgccaggcgacggggttaggagcggagcccgaggctctgcgggagaccgggggaggctgggccgcgtgggcttcccgctccctgcgccctggcctcccgcgccgtgcgccgccgcacgtagccccagactcctccccttcctcgccggcgtccgcgtccccgcgccgagctgctcgggctccctgagccccagatctgaccccttcccttcggcaacctgaacgactcccgccttccacggaagggaccgagcccgtgccaaacaggctgagcgatttgggagtgaggagccatcctaccgctttccccaacctggaaacagcaaagcgcaaggcctctgagtcagttaggtctctgccacccacgggcaaaggatgctctcctccatcctccttcctccctccaccgaaatcggagagccgcgggcctgatccaaagaggcatccccttctcgttcattccccagaggcctcaatacaaaccccaggagttggcccctctccttttgctacaaatccttgccttgcaaaggggaggtgaggatgggctattttagaagggaagcagggttgctccctggagaatgctgagtctgtgaggtgcctatgccgagaatagctcgaggaaattggagccccagctgttaaaagagcagagggcagggtgagggccgtggcctctcaggggtatctggaaggctcttcgagttgagtgcagacccagcctgggctggaaaatggacaaaggtcatcttgctggggtgaaaagggggagagcagaaccaagaagaagagggtgagggctggggggctccagggcactggttaggaattgtggggaatgaaggctttctttagtctcatccccctgtggtaccatcttgtcctcagaggtggtttgtgctccccctactgcctatatcgacttcgcccggcagaagctagatcccaagattgctgtggctgcgcagaactgctacaaagtgactaatggggcttttactggggagatcaggtgagatcgaggtggagaggggtgtgtgggacccttccctcactttcctcgttgaggggaaagccacagggtgggctccctgctgaaccttggcttcatctcttcctttagccctggcatgatcaaagact

SEQ ID NO: 8880 - DNA, 2300 bp, Homo sapien
ctgcctcccagataagatttcacacatccctagtcagagctgggggtgaagagctggctaaggccctctaaacaacaggccaaggtggctctgacagtggtggagctggcccaggctttgactccagaggcttgggagctggggctgaggtgaggagggatggccctccactctacagcccacacaactgcagagagcagctccaagccctggacccagtcagttcctggggaggctcctcccctgctgccccaccctaaggccctgcctcctccactgctctcctccctggtgcccagggccccagtgtctccatccagaggtgtggctgaggaaggaagtaggtatgtggcacagagacaggttagagcccagggaatccggtatacagcctgggtacctggctctgcccatccttcttttggacctgtacatcaaacccagtacctaacgctttgcacctcttgctcaggggttgatatctcctgaattctctcatccctgcagttcctccctccattctgaaggttcaccatttactggccaagagaacttgagaaagttgctttctcaagcctgtttcacctctattgctgttgggttaaattaaataacagctgtgaagacccctagcctttcccagcactgaacagaggttgaggcaggctggatgaaggtccatcccctctgctcttgtcagaagagtttccatcccaaaccactgccaccagggacagaaagttctccccacgtctgccccaggcctcacctctcctttcgcccaggtagcggatgcggacctggcactggccccagacagcgcttactgccggatagagggtcctgcccttcagtccgcggaatgctggccccaggtaggtgcccccaatagcgtagcccagagttccctcctccatgtccagaaccaccagcagtctctctggcacctccagctgctcaccctgagttcccgctggatactggggggctccgggccccttgctctgatggtacagcttcccccgcccgatgtcccagccccacgactcgctgttgctgcccagcagcgccgcgtagtggtcagtctgcagcggggcgagggccgtggccacgcccaccacggcatgcgtgcccctctgctctaggggccagctgatctcccaggcgtgcaggccccttgaatagcccctcttaccccgggccccatcagtgctctgggccacgggccgccgctcaaagtacaaccctccttccttgacctcgatgttctctgaacagtctttggggttccaaccgtggcgccgctgggcccccaggtcaggagggggtgcagacagcagctcttccaagccctcgggacaggagaggtcagggtacagggcctgtggcgtgggggtgctgctgctgccccctgccagagctgtctggcccatggaggtgaggagctagaggactccccgaaagaggcttgctggggcgtctttctcttctgaaagttgagctccagtttggattgacctggaagggagctgggagaaaaggggcgtgaagagcagaatcctggcgggggctcgtcacccaggtaccccatcctttcacccaagtttgccaacgggcccgctcctccctcctcgctgccccaaagctcctgggcccttcatctgccctcgccccatctgatccaggtcgccagagactctcgcgagttcgccccatttgggcctcagcatggaccatcccccttactcgcccggagccctcgccgctgcccccgaacctcggttgacttcccagccctggaggtcgccgggcctctgaaggagccgggcggaaagaagccgaggcgcgcagggcgcagaccgccggccgcttccgcccccagctcctcccttgggccgagcccgtcccgcggccccgcccctccagggccctctggggcttaaccctctcatcgccgcccacggccgtgcagctccgaggccacgcccctgtggggccccgccccctcctgggcagttaccgctctataccggcagcagccgcggagagcatgccccgcccccgtggagcccaccccgggcggttaacctcgggtctcagtcccgggctgtgaccctccccgaggccccgcccccacggcgaaggcccggggcagttaacccttctcttgctgcggcagagtccgcacccgggcaggcccatctcagaattaacgctttgatggcatcaccgcgtcgggaatccctggggatggtgttctccaccgtcaagacctttgagccgcctgagcgactaactcc

SEQ ID NO: 8881 - DNA, 2300 bp, Homo sapien
cgccactgcactccagcctaggcatcagagcttagactccgtctcaaaaaaaaaaagagaaagattcagcccagtgtgaaggtgtgaacctcttctaggacatgaaaagattcagcccaggtgtgaacctcttttggagatgctcctttcctaactgcttgaaccccggataggagtcctattctttttactcctatagtactttctttatatctccataattttatttactattactacatgatacattattttataaaagtctttgtaacctccttaaggattcactgcttaatctccagtgcttagcacaaatcattaaatgcgaaccagaaactcttccaaatgtgttacatctataacctcattggattctcactaccaaccccatgcaatagatactaatgtgatctctgtcttacagaggaagaaacaggcacagggaggttcagtaatttgcccaaggtcatacacacactggccttcaggtattcatgcccggggagtctggtcccacagctggcatgtttgccattatattatattgcctccttatagtgtcggcactcattaagcacattgacagctatgcttggtgagtgactactatgtacccagctctgtgctacatgctttacctggattatttcaactgcacaacaaccctgtgaggtaactaccatcattgctcctattttacataacagaaaactacagaaatctggggctgggcgtagtggctcatgcctgaaatcccagcactttgggagaccctgtctctaaaaaaaatttttttttggccggacgtggtggctcacacctgtaatctcagcactttgggaggctaaggcaggcagatcacaaggtcaggagttctagaccagcctggccaacatggcaaaaccctgtgtctactaaaaatacaaaaaatagctaggcgtggtggcaggtgcctgtaatcccagctactcaggaggctgaggcaggagaatcccctgaacctgggagatggaggttacagagagccgagatcgtgccgctgcactccagcctgggcaacaagagcaagactctgtctcgaaaaaaataaaaataaaaataaaaatatttttttaaaaattagctgggtgtggtagcacatgcctgtagtcccagctacttgggaggctgaggtaggaggatcacttgagcccaggaggtcaaggctgcagtgggctgtgatggcgccactgcactctagccttggtgacagcaagaccctgtctcaaaaaaaaaaaaaagagaaatcgggcaacttccccaagatcgcgcagttaactagtggcatagcttcactcaaactcgaagtcttaatcaggacactctaccaaatgagatcaacggctcagtaatggattggcatccagtatgaagactggaccagcagggagaactatgatgcgtacagcctagagcctgaagcagatttcacagcctcagaggtggcacaggctgactcacaacccggggcagaaagggaccagcccagaaacagtgacccagaatcacagggaagtagaaatgggattcggcacaatgaagcccctccttgaccccatgctccttaccctcaggggcgcaggagttagtcgctcaggcggctcaaaggtcttgacggtggagaacaccatccccagggattcccgacgcggtgatgccatcaaagcgttaattctgagatgggcctgcccgggtgcggactctgccgcagcaagagaagggttaactgccccgggccttcgccgtgggggcggggcctcggggagggtcacagcccgggactgagacccgaggttaaccgcccggggtgggctccacgggggcggggcatgctctccgcggctgctgccggtatagagcggtaactgcccaggagggggcggggccccacaggggcgtggcctcggagctgcacggccgtgggcggcgatgagagggttaagccccagagggccctggaggggcggggccgcgggacgggctcggcccaagggaggagctgggggcggaagcggccggcggtctgcgccctgcgcgcctcggcttctttccgcccggctccttcagaggcccggcgacctccagggctgggaagtcaaccgaggttcgggggcagcggcgagggctccgggcgagtaagggggatggtccatgctgaggcccaaatggggcgaactcgcgagagtctctggcgacctggatcagatggggcgagggcagatgaagggcccaggagctttggggcagcgaggagggaggag

SEQ ID NO: 8882 - DNA, 2300 bp, Homo sapien
aaccacctgctttctttgcacaggcattgagctctttcttctccaagcattaccacaggtgattcctgcctctgaaatctctgccccgaatatatgatatcatgtatatgcatatactatacaatgatccctagcacttagtaaaagctctataaatgttgggtatgattattataacatgtctcattatattgaattacttgtgtacttaatcttgtcactgaactgtacacctcttgaagataaaagataaggacttctgtgctttactgtcccggagcacagggacagattaagtgcttaacaaaagcatggcagggcgcagtggctcatgcctataatcccagcactttggaaggccgaggcgggcggattgcttgagcccaggagtttgagactagcctgggcaacatagcaaaaccttgtctctacaaaaaatacaaaaaaattaacttggcatggtggcgcacacctgtagtcccaggtacccaggaggctgagacggaaggactgcttgagcccaggaggtggacgttgcagtgagctatgattgctccaccgcactccatcctgggcgacagagggaaactctatttcaaaacaaaaataaaaacaaaataacaaaagtgtatgttcaaggacaccttcctaacccttacatcacaacttttcttcccatctaatgtgtcttcctctttcttcttggccaaggaaactcatatccatttcttttgactacatcaaaccacatggatttttcccttctccacactccaacaatacaataactttcatttgtatagcacatctcactcttcagagtgttcatatttattatttctttttcctcacagcaaccccagtaccaaggacacaggccaggggtggggaggagcaggaaaatgtttactaagggtcaactaagtgcaaggcgatttacccacattatctcttttaatcccttaacaatccttacaggtggacgttttaataatccccatttcacgactgtggaaattagacctcagtaagatttcataacctgctgaaggacacacaggtattaagtagtagagatgggttttgaagctggtgtctctgactttaaagtccctactggttccatgacaccaagtaaacagatttgcctattaaccacattcctccaagctgccctgggcaggaggtaatataatacttcctgatttcttgcccaccacatcttccaccagaccactttgccgttatataaagtctgtgggcacaatttaacaatgaatcacatgccatcttacctggttacctcattgtttcatttacattagattccacaacaagattggtaacatccccctttccccaggcaggaattgtgtcatcttaacctccctgagcctcagtatcctcttctttcaaatgtctatcttacaggactgttgcagagattaaatatcagttgtaaagatgtttgacataatgtctcgcacaaactctccagaaatatttattgcatctcaacatctttttcatctccttcaacatgtcagacaggcctgagtgcctgggtttggctatgccagttcctgttgattactgatataacaacgttggatcaggagtattttagtgggcagatgttgaattttctgccttccacccactaaaaggtttgcatcaaaccagtccaggataactcatactggatccctgtcagttgatatagttaagctaattctacagataacaaagagtcttgggtacgtttagctagcaaatgcagatctgccaagactccaacccagttcttaaggtatctgggtctggactccttccgctccaccaagccaccttccaaaggtctacctgaaaataactaatgagcagaaactatagggggaaggggaaaagaccccttatcttggtgtttcttgcttttcctcgcagccccgccctttttgcttcgaaggacgagtttttcctgaattcacaatacttttgcattgaagatgtccggtccctttaaggtcttgggtgacgtaatgactagccccgccccctctcttctcgcttctcagccctgcccacttctttttgtcctcagccaattagcggcccaacgccccttccgcgcctcatccgggttcccgggacgggaaagtggcgtggtaaccaggcaactactgatcaatcccctccccggctgatttgcgcatcaggtagtcgccgctctactctcaacggtggcgagctgcagttgccaagtgccccgtccccgttgccataacagcagtacacaaccc

SEQ ID NO: 8883 - DNA, 2300 bp, Homo sapien
attatattgaattacttgtgtacttaatcttgtcactgaactgtacacctcttgaagataaaagataaggacttctgtgctttactgtcccggagcacagggacagattaagtgcttaacaaaagcatggcagggcgcagtggctcatgcctataatcccagcactttggaaggccgaggcgggcggattgcttgagcccaggagtttgagactagcctgggcaacatagcaaaaccttgtctctacaaaaaatacaaaaaaattaacttggcatggtggcgcacacctgtagtcccaggtacccaggaggctgagacggaaggactgcttgagcccaggaggtggacgttgcagtgagctatgattgctccaccgcactccatcctgggcgacagagggaaactctatttcaaaacaaaaataaaaacaaaataacaaaagtgtatgttcaaggacaccttcctaacccttacatcacaacttttcttcccatctaatgtgtcttcctctttcttcttggccaaggaaactcatatccatttcttttgactacatcaaaccacatggatttttcccttctccacactccaacaatacaataactttcatttgtatagcacatctcactcttcagagtgttcatatttattatttctttttcctcacagcaaccccagtaccaaggacacaggccaggggtggggaggagcaggaaaatgtttactaagggtcaactaagtgcaaggcgatttacccacattatctcttttaatcccttaacaatccttacaggtggacgttttaataatccccatttcacgactgtggaaattagacctcagtaagatttcataacctgctgaaggacacacaggtattaagtagtagagatgggttttgaagctggtgtctctgactttaaagtccctactggttccatgacaccaagtaaacagatttgcctattaaccacattcctccaagctgccctgggcaggaggtaatataatacttcctgatttcttgcccaccacatcttccaccagaccactttgccgttatataaagtctgtgggcacaatttaacaatgaatcacatgccatcttacctggttacctcattgtttcatttacattagattccacaacaagattggtaacatccccctttccccaggcaggaattgtgtcatcttaacctccctgagcctcagtatcctcttctttcaaatgtctatcttacaggactgttgcagagattaaatatcagttgtaaagatgtttgacataatgtctcgcacaaactctccagaaatatttattgcatctcaacatctttttcatctccttcaacatgtcagacaggcctgagtgcctgggtttggctatgccagttcctgttgattactgatataacaacgttggatcaggagtattttagtgggcagatgttgaattttctgccttccacccactaaaaggtttgcatcaaaccagtccaggataactcatactggatccctgtcagttgatatagttaagctaattctacagataacaaagagtcttgggtacgtttagctagcaaatgcagatctgccaagactccaacccagttcttaaggtatctgggtctggactccttccgctccaccaagccaccttccaaaggtctacctgaaaataactaatgagcagaaactatagggggaaggggaaaagaccccttatcttggtgtttcttgcttttcctcgcagccccgccctttttgcttcgaaggacgagtttttcctgaattcacaatacttttgcattgaagatgtccggtccctttaaggtcttgggtgacgtaatgactagccccgccccctctcttctcgcttctcagccctgcccacttctttttgtcctcagccaattagcggcccaacgccccttccgcgcctcatccgggttcccgggacgggaaagtggcgtggtaaccaggcaactactgatcaatcccctccccggctgatttgcgcatcaggtagtcgccgctctactctcaacggtggcgagctgcagttgccaagtgccccgtccccgttgccataacagcagtacacaacccctccttcccctcgcccgcttgctaaacagtccttccctctcgggaccaagggcctctccagaactgcttctgattgagcagaaacagggtctgagcccctttgctaaggcgaattgagtgggagggttggagactgcgctttaggctggtgtaccagagggcccaaggaaattggcccagtgggg

SEQ ID NO: 8884 - DNA, 2300 bp, Homo sapien
ctatgttgcccaggctgggtcctaccttctaccctccatttaggtgtgatcacagaaaatgtctctccctgtgaggaaaatttgccctctcctccccagctacaagacagggttgtggcctagctttgctgcaccaaaagaacacatgaatgtattacagagtagaatatggcacttagggattccttgaagggcagaagcaggaccagagcggggtcacacagcacctctgcagtaaatctggcaaggcttggcaggccagtcctcacagtgtttctagggacactggaaccccgagagtcccccagaggccccattcctagcaactggcaaccaaagcccattattcctgcatgaacccctcctgaccacactggcaggggcaacatggtggccaacctgggggagctggccaagcttcgagacctgcccaagctgcgagcgttggtgctgcttgataacccatgcacggacgaaaccagctaccgccaggaggccctggtgcagatgccataccttgaacgcctggacaaggaattctatgaggaggaggaacgggctgaggctgatgtgattcgacagaggctgaaggaagaaaaggagcaggagcctgagccccagcgtgacctggaacccgaacagtcattgatctagcagcagttctagcctctaaagatagtaaggaagcctgcagggaggcagtgggaggaggccaagggctgggcaggtaggggaagaggcaagaggggaagctgctgcagaaggaggtgggagaggaaagcatcagacaagcaggacccttaaagagaggagggttaggagtcagggagaggaaaagggacccaaggggcctgggaccagctgagaaagacttaggaggccagaagagtaagtgaaaagaattggggtggcaggcagaggagttggtggggggtggggcagccatacctgacacagagtgaagtcggctaggaaaggacaggtgtgggtgcatggtaggggctgcaggggaaagttggtggtgtatgcagctggacctaggagagaagcaggagaggaagatccagcacaaaaaatctgaagctaaaaacaggacacagagatgggggaagaaaagagggcagagtgaggcaaaaagagactgaagagatgagggtggccgccaggcactttagataggggagaggctttatttacctctgtttgttttttttttttttttttttttttttttgcgaggtagtcttgcttagtctccaggctggagtgcagtggcacaatctcagctcactgcaacttccacctcctgggttcaagcaattctcctgcctcagcctcccgagtagctgggactacaggcgcatgcaaccgcgcctggctaatttttgtatttttagtagaaacggggtttcaccacgttagccaggatggtctggatctcctgacctcgtgatctgcccgcctccgccttccaaagtgctgggattacaggggtgagccacagcgcctggtccctatttacttctgtcttctacctccaggagatcaaagacgctggccttcagacctgatcagactcccaggggcagccaccacatgtatgacagagaacagaggatgcctgtttttgccccaaagctggaaattcatcacaacctgaggcccaggatctgctctgtgccggtcctctgggcagtgtggggtgcagaatggggtgcctaggcctgagcgttgcctggagcctaggccgggggccgccctcgggcaggcgtgggtgagagccaagaccgcgtgggccgcggggtgctggtaggagtggttggagagacttgcgaaggcggctggggtgttcggatttccaataaagaaacagagtgatgctcctgtgtctgaccgggtttgtgagacattgaggctgtcttgggcttcactggcagtgtgggccttcgtacccgggctacaggggtgcggctctgcctgttactgtcgagtgggtcgggccgtgggtatgagcgcttgtgtgcgctggggccaggtcgtgggtgcccccacccttcccccatcctcctcccttccccactccaccctcgtcggtcccccacccgcgctcgtacgtgcgcctccgccggcagctcctgactcatcgggggctccgggtcacatgcgcccgcgcggccctataggcgcctcctccgcccgccgcccgggagccgcagccgccgccgccactgccactcccgctctctcagcgccgccgtcgccaccgccaccgccaccgccactaccaccgtctgagtctg

SEQ ID NO: 8885 - DNA, 2300 bp, Homo sapien
gcagaaggaggtgggagaggaaagcatcagacaagcaggacccttaaagagaggagggttaggagtcagggagaggaaaagggacccaaggggcctgggaccagctgagaaagacttaggaggccagaagagtaagtgaaaagaattggggtggcaggcagaggagttggtggggggtggggcagccatacctgacacagagtgaagtcggctaggaaaggacaggtgtgggtgcatggtaggggctgcaggggaaagttggtggtgtatgcagctggacctaggagagaagcaggagaggaagatccagcacaaaaaatctgaagctaaaaacaggacacagagatgggggaagaaaagagggcagagtgaggcaaaaagagactgaagagatgagggtggccgccaggcactttagataggggagaggctttatttacctctgtttgttttttttttttttttttttttttttttgcgaggtagtcttgcttagtctccaggctggagtgcagtggcacaatctcagctcactgcaacttccacctcctgggttcaagcaattctcctgcctcagcctcccgagtagctgggactacaggcgcatgcaaccgcgcctggctaatttttgtatttttagtagaaacggggtttcaccacgttagccaggatggtctggatctcctgacctcgtgatctgcccgcctccgccttccaaagtgctgggattacaggggtgagccacagcgcctggtccctatttacttctgtcttctacctccaggagatcaaagacgctggccttcagacctgatcagactcccaggggcagccaccacatgtatgacagagaacagaggatgcctgtttttgccccaaagctggaaattcatcacaacctgaggcccaggatctgctctgtgccggtcctctgggcagtgtggggtgcagaatggggtgcctaggcctgagcgttgcctggagcctaggccgggggccgccctcgggcaggcgtgggtgagagccaagaccgcgtgggccgcggggtgctggtaggagtggttggagagacttgcgaaggcggctggggtgttcggatttccaataaagaaacagagtgatgctcctgtgtctgaccgggtttgtgagacattgaggctgtcttgggcttcactggcagtgtgggccttcgtacccgggctacaggggtgcggctctgcctgttactgtcgagtgggtcgggccgtgggtatgagcgcttgtgtgcgctggggccaggtcgtgggtgcccccacccttcccccatcctcctcccttccccactccaccctcgtcggtcccccacccgcgctcgtacgtgcgcctccgccggcagctcctgactcatcgggggctccgggtcacatgcgcccgcgcggccctataggcgcctcctccgcccgccgcccgggagccgcagccgccgccgccactgccactcccgctctctcagcgccgccgtcgccaccgccaccgccaccgccactaccaccgtctgagtctgcagtcccgaggtgaagcccccgccaggcccagagcccctgtggccccctcccttcgccgcggcgcccctgcctcctttacccggtgccgctgcgcacctctccgcatctctggcccggtgcagctgcgcacctgctccgccgcccgcgcccagggcgccttccctccctggccttccccgcccgctgccttcgctttctggccctctgcgcgcctatctctaactgcgcctctccacccttgcctgcctctctcccggtgctcgccctcatctacggttctatttgtttctaagttgggagcctctccgggcggtgcatttttatcctagagcgtcccttttggtttgcatttggggaaatgtcttctctcaccgttcctcacctcccccagacttcccttggactcccctctctcctgctcttccccacggcgcccctctccgttcgcgcttcctcccctctgctgcacgggggagagatggaagaagtggggatctgtcgaggcgcagaggggaggacaggcccagctcgcctccactccccaccggctcttatcctcttcacttcccgctgcaacccccagggactgcagggcctttctcaggaccctcttccccgacacctgtattgcatgcgcctttcgcgggaagaggagggatacacgtttgggagagagtgggaccttggggaaggggcagtgttcaggcagctggggtgttaagttggggaggtatgggggctctggaagagaggccc

SEQ ID NO: 8886 - DNA, 2300 bp, Homo sapien
gccgttctgaacgtctggctaaatacaaccagctcatgaggtgagggtccctggggtgggagcccctggcccagatggctaaaggccccatttgcctgccagaccatctgtagcaccaagggcctggataacagtccatttcctggataacagtccaacagataatattggtttttgcttcctgggtttattgatggcctgattgacaaatcccagagatcacatgggaaagccagggaatgctaagccttggggcaggacacaaaagcaggtggtgtgggggtggttggagtctgggggacccctagagagagaagcaggatcctcctgcatccctgaccacttcctttgtggttcatctctctcagaattgaggaagagctgggggatgaagctcgctttgccggacataacttccgtaatcccagtgtgctgtgattcctctgcttgcctggagacgtggaacctctgtctcatcctcctggaaccttgctgtcctgatctgtgatagttcaccccctgagatcccctgagccccagggtgcccagaacttccctgattgacctgctccgctgctccttggcttacctgacctcttgctgtctctgctcgccctcctttctgtgccctactcattggggttccgcactttccacttcttcctttctctttctctcttccctcagaaactagaaatgtgaatgaggattattataaaagggggtccgtggaagaatgatcagcatctgtgatgggagcgtcagggttggtgtgctgaggtgttagagagggaccatgtgtcacttgtgctttgctcttgtcccacgtgtcttccactttgcatatgagccgtgaactgtgcatagtgctgggatggaggggagtgttgggcatgtgatcacgcctggctaataaggctttagtgtatttatttatttatttattttatttgtttttcattcatcccattaatcatttccccataactcaatggcctaaaactggcctgacttgggggaacgatgtgtctgtatttcatgtggctgtagatcccaagatgactggggtgggaggtcttgctagaatgggaagggtcatagaaagggccttgacatcagttcctttgtgtgtactcactgaagcctgcgttggtccagagcggaggctgtgtgcctgggggagttttcctctatacatctctccccaaccctaggttccctgttcttcctccagctgcaccagagcaacctctcactccccatgccacgttccacagttgccaccacctctgtggcattgaaatgagcacctccattaaagtctgaatcagtgcactgttgtgtctaaggagtcttactctagtccctatgaggggagagaagatggagcacctggaagctggtgaaactggatagcagagctgggggggcacaaaaagaggaagacaaactgaacaaatatggccgagatgatggcactgcctaccccattctggctaggtggggtgcatgtggcccctgctttcttagcagaaggcttggctcccagacgcaggtgaattaaggggttcaagagcccctaaaagcataaaatattttgtgtgtgtgtgtgtgtgcacgcgcattttgggggaaagggggtctaaggtgttttcatatccaaagggcttgtggactggagcagctcctgtactgggcctctgccaacaaaaccctggctggttctcgaatggaacaggacttcatggccatcacccactgcaagatggggaaatgggaaggaagaatggttccgggggtagtatacggaaggacctaaggaaacagagtcctcaataaactgaagattcaggaacaaaagtgcttaacagaaccctggctgggtcagactaacagtaggtttccaatatgtggctagagacgtactactccttagctataactcgttaactcttatggggcctcagcgttgagatgctcattctaggtacccccgagggggacaaatcccttcctagtggctcggatgcaaggttgcgtcccacagatagggtttgcacatgggagatctaaccactagagggagtcagagttttgcaggacgccatactggacgccaagtgggaggaacttcaaggctgtcccctgcgggcctcccgctctgcttctgcgaaggtctggtcctggctccctctgccatcctgcccagctccaaggctaaaataggttctagttctgtatgggtagggcccatttcttttcttgccctccttcccgggtccctgacacctcagccattt

SEQ ID NO: 8887 - DNA, 2300 bp, Homo sapien
agcaacaaggatacccagggatttgggtccacattaagcccagtcttcacccgactgcttccctgtgacccaggggatctttagtgatgactttcaacagatttgagaaggaaaatggagatgccactagatggaaggcctgaggatggtgtctcactcctccaagctgtatcccttacctatctacccatgagcttgccagcaacctccccccgctcccacatctgtcatttcctttaactgccctcgtttcccatctccattttttctttttttttttgagacggcgtctcgctctgtctcccaggctggagtgcagtggcgcgatctctgcttgctgaaacctttgcctcccaggttcaaggattctcctgcctcagcctctgagtagctgggattacaggcatgcgccaccacacccggctaatttttgtatttttagtagagacggggtttcgccatgttggccaggctggtcttgaactcctgacaagtgacccacccgactcagcctccgaaagtgctgagattacaggcgtgagcccccgcaccggccccatctccattttcttttcccatccatgatctttcctcttccatactgccgccagccataggccttgttcagcttacatttccttccaatcttcttatccccctcttccccattctgcccgcccaagtaaaccctcctcggctctactgggagcccccacccccaggatccagccagcccggtgtctcccacccttctttcccatccagagccctcctttctcacccagaacctattttccctagaattggcacctgggcccacctcgttcatcccttcttaaggttcctcacgcgttccctcctctctctcctcactgacgtttcctctggacttctctctctccagcattccttcatccccccacccccaattcttatatttatgactcttttgtcaacactaatcacccccaaaagctttactttttccagaagccccatctttctatatatgtcatcttttcaatttttctctctccttatgaccccaaacttccatcccattctctctgataatagcccccaaacccgtctggctccatctctgccacagatccctcaccccaagcttctctcacttctcaccaggcacccacaaagcccccaggcagctccatctttccaatccaatcccattatcccaatctctaccccaggatcccccaaactcctcccacttcacctctgccacagacccgctcgcccccaaacttcagcctcccctcatctgccctcaccacccacagcccctcctacctagccctctcccgcgccgggcccgcgggctccccacattccgccacggctagccctccccgcgccccggccccctcggcctcggcctcggccaactcgcgctgcgcctccccctctccggctccccctctctcccccctcgcggcttgcctcgcgctccctccctcgcgtctccctcctggcccctctctcctccgttcctccgcgctccctccttctccctcttcctcccttctcccatccccctctcccaggctccctcccttcgccgtccgctttcctgtgcgagtcgccggacgcaccgcccagcccgtccgcagccccgcgccgggtcggggcctcgggccgggccatttcggagggaccgcggcttcggggaggggctaggaggggggagagggagccgactgccggggaaggggcgggggccgcgggcgaggcggccgaggggcccgggatcgcgcgggtgcgggctgcgctaggcgggcgcgggcggcggcgggtcggaaccgcgccgagggccgggcgggccgcggggccgggcggcgcggcgggggcgggcggcgcggcccggggcattccgggcggccagggggaggcggcgagcccggggaggtggggagcagagcggggatcggggtttgctccgggggccggcgggcgattggggccaggcggggaaaaggggggatgggggccgccctccgggggggtcggggccgccgccgccgtcgtcgcggcggcgactgaggccgagaagaggagaggggggcgggggagctgccgccgccgccccccagaggcgccggagcccggaatcccgctcggagccagccagccgtcccgagctaccagcaggtaaggtctgcggccgcctgggccccgggcccgcggggttctgtcccgcccgggctccggcctgcggctccccacccccacccctcccagttccccctcctgccgccgccgcctccatttgttatttt

SEQ ID NO: 8888 - DNA, 2300 bp, Homo sapien
ggggagggagggacagacagaaggccaaggcccgatgtggtgtgcagaggtggggaggtggcgaggatggggacagaaagcgcacagaatcttggaccaggtctctcttccttgtcccccctgcttttctcctcccccatgcccaacccctgtggccgccgcccctcccctgccccgttggtgtgattatttcatctgttagatgtggctgttttgcgtagcatcgtgtgccacccctgcccctccccgatccctgtgtgcgcgccccctctgcaatgtatgccccttgccccttccccacactaataatttatatatataaatatctatatgacgctcttaaaaaaacatcccaaccaaaaccaaccaaacaaaaacatcctcacaactccccaggaacatggctgtgactattctttgcgggatatgggggtgaggctgggtctcagtgcagcggtgcttagagagaactgcagccagggcctggcagggaagcgggaagagaccagaccttcttaaggaacggggtgtgggggctgggaagaattggagaggggatccctgaagagcccagagccttgactcagctggaggcggtaccatgggtgctggtgccccctcctgccccaaggctgggcaggaccgctgcgcgccagtggaggcctcggtctgggctctgtggcttatgcctgtgagacgcgggtggattgcttgagcccaggagttggaaaccagcttgggcaacatagagaaaccccatcttaagacaaaatcagctgggggttgtggtgcacttgtggtcccagctactcaggaggctgaggtgggaggatcacttgggggtcgaggctacagtgagtcatgatcgcaccactgcactctagcctgggtgacagagcaaggccctatctcaaaacaaacaaacaaaagacaccccaaccaaccaaacactagaggcctgggacaggcccacctctgacgtggtcagttctaggaatctattcagacgggtctcactgctaggagccaccagagtcctccggaacaagggcttcagagtcctgaaacctttccgtggaatactttaagaaacggttatgaggccaggcgcgacggctcacgctggtaatcccaggactttgggaggccgaggcgggcggatcacgaggtcaggagttccagaccagcttggccaacatggcaaaaccctgtctctactaaaaacaaaacattagctgggcatggtggcgcgcgcctgtcgtcccagcgacttgggaggttgaggcaggagaatcgcttgaacccgggaggtggaggttatggtgagccaagatcccccccagctgcactccagcttggcgacagagcaagactccgtctcaaaaacaaaaaacaaagccggttatgaagcgggggtggggtgggctagttttaataggtccaggcgattagtacctggcatccttaaccacctacagtttgagaagggagtgggtgataaaagcctggaagggaagggaaatcgggccgggcattaggctccatcgctcatcaatagacaaggcctttaggaaactgcgacaacggcttttgctctgggcctttactgccgaatccaggtctccgggcttaacaacaacgaaggggctgtgactggctgctttctcaaccaatcagcaccgaactcatttgcatgggctgagaacaaatgttcgcgaactctagaaatgaatgacttaagtaagttccttagaatattatttttcctactgaaagttaccacatgcgtcgttgtttatacagtaataggaacaagaaaaaagtcacctaagctcaccctcatcaattgtggagttcctttatatcccatcttctctccaaacacatacgcagcagtgttacagctcttttagaatttgtctagtaggctttctggctttttaccggaaagcccctcttatgatgtttgttgccaatgatagattgttttcactgtgcaaaaattatgggtagttttggtggtcttgatgcagttgtaagcttggggtatgaaggtttgggccacgcctgggcgcttccggctgcgccggatgctgtttcctttccgctcccaggggcgttgggaacggttgtaggacgtggctctttattcgtgagttttccatttacctccgctgaacctagagcttcagacgccctatggcgtccgcctcgacccaaccggcggccttgagcgctgagcaagcaaagggtgagaatcgtcctagtcaaggcataggctgctggcctggggtagtcaa

SEQ ID NO: 8889 - DNA, 2300 bp, Homo sapien
ggtcctcgcggaggtgatccaggcgttctccgccccggagaatgcagtgcgcatggacgaggctcgggataacgcctgcaacgacatgggtaagatgctgcaattcgtgctgcccgtggccacgcagatccagcaggaggttatcaaagcctatggcttcagctgcgacggggaaggtgggtcagacgcgggaaggcgggtcagacgcgggaaggcgggagttgggtcgggagagggcgccggatctgtgggcccatgagcggttgtcccctttctcgccacacggcggcagccacaatctgactaacattcttggcactcagagcccagggtctaccctgagcttgtgcgtccgagttgcgttttgtacagtagaggttctgtatcccttacccgaaatggttgggaccggaagtgtttcgggttttttcagatttcggaatatttacatatacatggatatcttgggggatgggacctaaatctgaacacgaaattgttttgtttcatatacacgcaccttatgcacatagcctgagggtaattttatataatagtctgaataattttgtgcatgagacaaagttttgactgcgttttgactacagtctcccccaccccccactatgaagtcaggtgtggaattttccattttcggcctcacactggcactcataatttcagattttggattttctaattaaggatggtcaacctgtactgttaatcacattattattccattttgtgatgaggaagcaaactctaatggtgcagactctcgagtagcagagctggacttaaatgctgttgtgccaccttttagtgacatgtctgcatgacagcagtggctgcagtctctccagggtgtttcagctaatttttgtttggggggggttggtggttaaatttttggtgagatcctggtgttccccaaaggtgttgactgattcagctctgctgcctcatagccttcctgagttccagctacagacctggggtctcgtgttcattcttggggttccagtgactaaactgctaaaatggttcacctgagagcaagaagcacactgccttgggacattttcattcactgcatcccatctagttgtgcccagtgtagaccaaatgtcatcatccaaaccacacgggacagaggcctgcatgcgtcctgtttggcaaacagctgcccagccagtgggggagcagttcatgcttagactaccaccccctccaggtgtcttaggcacgctggtccttaggagaagggttgaccttccactccctcttgcaggtgtccttaagtttgctcgcttggtcaagtcctacgaagcccaggatcctgagatcgccagcctgtcaggcaagctgaaggcgctgtttctgccgcccatgaccctgccaccccatgggcctgctgctggtggcagcgtggccgcctcctgagagttggccctcccttgtgccactgccaggggaggaaaggccttgatgttccagacaataataaatgcgcctgtgacttagccttggtgtcagtctcttgcggacctgacaacccccatctctccttccctgattccctctgcctttccaggccccatccccctgaacagctcctccctatggtcctggctgggcctaaccctgccccagggcctaaccctacctgaggctcctccccttcccccggggcaggttgagaggctggagtgggtccctcagcgccctgggtgggtgggcctgcacagggggtacctccttctctgaggaactgggctgttagggattttccttaggccctttggtttccgcctacggagaggtttcccccattggttgctcttcctcagccagggttacttcctggtctgttcccctacccaataccccgccgctctgtcagcttgagctccaggtggagctccaggtggctcctcctctcccgggggaaggcggccctggaccagcaggcgggcctgctgtactcccgctttggggctgcagggaagctggccgctgtgggcggtctcgggccagccccgccccacctgtccttttcctggagactattagtccagggtttgtccctgcagtgccattggcctggcaggcaggatcgaggaggaagtggctgattactgagcggttcttcctcacctggcttgggccactgtgcacagctgtgccgctggctcagccccgccccctgcggccctctgccgtggcttccccctccctacagagagatgctgtcccgtgggtaagtcccgggcaccatcggggtcccagtctcctgt

SEQ ID NO: 8890 - DNA, 2300 bp, Homo sapien
gtccccacctctcagaacaactttgctccagccacatggcttgctcacggccaggcactgcccatgtggactctgtgcgtgccacctctttgccctgacccatgttgcctctgggggagcacttcttcctccaccttccatcatgggctgtggcagtgcccatcccatctgcccccgacgctgtctgctgcagtatggttgttgggggaaagggcaccaggctccggcgtctgacagccgtgttttacccaccttcctactcactagcttgtgaccttgggcaattacttaacatctctgagtcttagtttctgtttctaaaattgggtgaataacacctactaagtagggttggcctgaggattaatagtataatgtaaaagctggcagcactgaaaccctgccacttaccagcttttcacatcagtatttgggaaatattgttaagctcatttgtcaggcggggattctgaggctcagagcagttccagaactttctacagattattttgccttgtttgcgcttccagactgcctatcttcttgtatcaccattgatcttgatctgtatggtttttaatttttttttttttgagacggagtttcactctgttgcccaggctggagtgcggtggcatgatctcggctcactgcaacctccacctcctgagaagctgggattacaggcatgtgccaccacacccggctaatctttgtatttttagtagagttggggtttcactatgttggccaggctggtctcgatctcctgacctcgtgatccgccagccttggcctcccaaagtgctgggattacaggcgtgagccactgcgcccggccaacttcacgtttatacacacccatgcaaacagcatccagatagagacaaagagccttccctgtaccctaaaagtttcccagaaattgttcccagttagcatatttatttttataaaggtaatgcatgcccatcatataacattcaaaaaggtatgtagagaaccaagtgtctcccccagccctgtcctccagccacccagtttccctccctaggggaagccaccaatatgtgtttcttatgtatcccctgttgagctgcttttcctcgttttggtttggcggtgttgatgtttgtatttggaattacaggtaggcagcatcatataccttagtgtttagggcctctaagatcaaccagccctgagaaaatcagccatggtgaggaccttgtcccccagccccccaggagataggccccctggtgggagtgctggggcagggcagaggcctagggacaagaattagaaaggacccatgttgacagggctgctcagggtcatgttgtccatccctctgccacagtggcatggacaaactgcatatgttggttagaggagggcacccttctctcttgcaagcattggcaaggtcttaactattagtctcctgctcccatggcagcccctttggacaaggaggctcttaatctctgttctttgaagccctgagggctggtgtataggagttcaaagcactggctttggaaccggactgtctgggtttgaatcctggcactgcagctgactcactgatggactcaggcaatgccttaaactccctgagcctcaggttccttgtctgtaaaatgataaagatagcccctgtttcatagggctgtggtgagaaaccaatcagacaaggcatgtgaacgccattatagcacagcgcccggcatccagcaggactcactcgatgacagttgtcaccgccatcattgttattagcgtgggccagggagggctgcgtaaaagcagctggtggaggagggagagatgccgtgggaccgtctgggttcgcatgcgtgaagtattatctgggcctggagtgtgcaaggcacacatgtgtccttactgcatgtgttgtcacatatgtgcaatgccatgctcctgagcctttgattgcagacgtgtgggaagtgggccccgtccccacccccagtgccaccctgctctgcttctcttcccttgctgtgctctaaaacgagaagtacaagtgagttcccccaaggggtcggccgcgcctcttcctgtccccgccctgccggctgccccaggccagtggagtggcagccccagaactgggaccaccgggggtggtgaggcggcccggcactgggagctgcatctgaggcttagtccctgagctctctgcctgcccagactagctgcacctcctcattccctgcgcccccttcctctccggaagcccccaggatggtgaggtaagggcctgccaccca

SEQ ID NO: 8891 - DNA, 2300 bp, Homo sapien
aggctgacaaggaagacaagacgcagcacagctgaaatgcaccctcacccactgtgaagccttgaactgcaaaccccgtcaccagcagagctgactactctttccccctctgtactctgtgcaacctctaacgtgggcgctttcgtgctgtaccgtaatcatgtctcctgtaaggacttgggggacaagaattgtgtttaatgaatcttttattcccagggcccagtctagtaaatgaataagcgacctgcactaggtatagcacaaagaagtacattacaggttacaggtgagctacctgacccagggtgtatatgtgtgcgtgggtggggaggaggaagaggtctggggaactcaaaggcacggcttttatgtatggtctagaaggagagaacaggtgaactagtcaagcttagggacaaacttctccagaacagagtgtactagtggatgtaactgtagatatagtaagtcaagcagttagaaaaaaaaggctttaaaacaaagctttgatctaggcagtgaacaagacgagggacaaacaatactcttattgaatacacgtcagggaggagacagtaaaaagcacgcaaacacagtgtgttcagaatttgctgctttgaccccaggaggcaggtatttttgttacagctcttgcagatgtggaaagaggcctaaaggcctgacactaccatattcccctggggtttcttgccagctaccttgatcatcccacctgccatgtgattaccaagtgctcagacctacctttggagcctgtaggggaggagatttttcgaggtctggcccgaatgtcatagataatggggtactggaaccaagggatcctggagaggacagggataggtattaagaggccacagtttcggccgggcgcggtggctcacgcctgtaatcccagcactttgggaggccgaggcgggcggatcatttgaggtcaggagttcgagaccagcttgatctacatagtgaaaccccgtctctactaaaatacaaaaattagccgggcgtggtggcgggcgcctgtaatcccagctactcgtgaggctgaggcaggagaatcgcttgaaatcaggaggcggaggttgcagtgagccgagatcgcgccactgcactccagcctgggcgacagagcaagactccctctccaaaaaaaaaaaaagaaaaggccgcagtttcactagccttgcccggtttcccctcaccacgcgttttttggcctgctcctctccacgaccacagacaaggagagattctcttgtccctctggaaaacaacagtttgtatgctgctggaggttctcgcagcacccactatcctaggggcagggatgaggagggtgggaaaagagcagcgttgaatcctgttgcacgtccgactatagccactgctgggtcggcgtcaagggtgaaaggtcagggtcagcaggctctgcccgccattacctgaagtgaaggccctcggccaggatagtgtcctgctgcactccaccgatccgattgaagaagatggctctgtgcccgccttccactgtggggagatgggtggtgatcaggccaggccgctgctcagaggaaatgctaggcccgtggaggggcgcggggacagggcaaggggtttgggggagggactggaagcgtccggcgagcaggcggaggttgctcaccggtgaacacagattcgcgcacaccgtaggccacggcgccggcccccagcaacagcttcagggccgtgcccatgccccggggcccggcgggcagccgtcccgccaagtccttcaagttctgggccatgtctgatcttgaggccggcggcactggaggtcagaagggggtgccggcccgcctctaccccgctccggcttaggtactgcacccttcacacgagggttcgggcccgtaaggctggcgaaagaaagggcagcggaagtgcgctccctttgaaaccctcccccttagcccactacggacccgaacttcgcgcacaggaatcgcgcatacggaagtcccgcccctttctggaaggctgccctcccagggagggcagcgcaagacagcaagtcatctccatttcctggcccactttcaaaatggcagccggaaggaaatttgtgattagaagccgcgctgttcttatttaagagcgttagcgcaacttccggtattgttgcaagatggccgcgcccagtgatggattcaagcctcgtgaacgaagcggtggggagcaggcacaggactgggatgctctgccacccaagcggccccgactaggggcaggaa

SEQ ID NO: 8892 - DNA, 2300 bp, Homo sapien
aaacgaagaaaggaaattttgaggaaaattgggagctgagacactaaagggcagtgattatatatgaagctgctttgtaaaccacagaatcctaatgtatcaagcacaaagccaaaaataattctggagtaagcagggcaggatgggaatgactgacagacactatcctaacaactctctgtacactggaaaagacatcagaagtttgatgttaaagaagtggactacatctgtagcagctaaaagaaataattccaagttgcaatttggagtcccaaggagcattagggtggtcagtaaaaagtctaaaaacaaactgttatatacaaatacaagttttggaaggttaagtttttatgtatcactggaatgtatatgtctagcaacattcttgagatatatggctccaaaaagtctgcgaaaaaagggatgtagattttgaaattgaatagttgaagtaatgtcacagagagcacaaagaacaaatgaccaagaactaagtccatgagacacccttagttatagaagaaaaaaaccttcttgaatgaataatacagtttcaacccattagtaggatataatcatgttttctattcttttaatagattacaggcgcaggcctgtaatcccagctactctggaggctgaggcaggagaatcgattgaacccgggaggcggaggctgcagtgagccaagatcgtgccactgcactccagcctggtagagactgagactccatctcaaaaaaaaaaaaaaaaaaaagtgtatttagaacgaagattaaaatcctggcctgacttctaaaccaatgcgatttcttctgggcctattcaattagttctaacgggtaagagaaaggaggaggaagaacactgcccaaggctttaagatagagaactgctggttctattacatgtggggaaagagatgaatgatagataaaaatgcagatgtaaaagttttaaataataaccaggtctggacagtgtatcataggtggatattagagagaggtgactatggatactaatgaattgaaacacgaagcccttacaaaaagtgtgggcagactaggctacataactacgtttctcatctgcccagtaacttgtcttgggatgtggaatgacgcaaggaacgaaactttcctctgcttagactactataccacagaatcctggtaaaccaattggaagcaaggaggtgagggctagaatatcattcaaaaagagcaaaagaaaatgagtactaccggccgggcacagtggctcacgcctctaatcccaacactttgggaggccgaggcgggcggatcacttgaggtcaggagttcgagaccagcgtggccaacatggtgaaaccccatctgaactaaaaatacaaaaaaattagccgggcgtggtggcacctgcctgtagtcccagctactccagaggctgagtcaggagaactgtttgaaggcgggaggcagaagttgcagtgagccgaggtcgcgcaactgcactccagcctgggcgacagagcgagactccgtctcaaaaaaaaaaaaaaaaagaaagaaaaatgagtactaccatcccaggatgtcaaatcaacgcaaagccaaccaagccaccttccttcaaaagcatctttcacccctctctgctttctacatccactctgggccccttaccctcattccacggagtcccaacctatcgatttactacttctccacttcctgtcccaaactaccttgactgtctccagactggccccttccagcaccacaataaactacggcctccgatcttgtttcctgcccctagtcggggccgcttgggtggcagagcatcccagtcctgtgcctgctccccaccgcttcgttcacgaggcttgaatccatcactgggcgcggccatcttgcaacaataccggaagttgcgctaacgctcttaaataagaacagcgcggcttctaatcacaaatttccttccggctgccattttgaaagtgggccaggaaatggagatgacttgctgtcttgcgctgccctccctgggagggcagccttccagaaaggggcgggacttccgtatgcgcgattcctgtgcgcgaagttcgggtccgtagtgggctaagggggagggtttcaaagggagcgcacttccgctgccctttctttcgccagccttacgggcccgaaccctcgtgtgaagggtgcagtacctaagccggagcggggtagaggcgggccggcacccccttctgacctccagtgccgccggcctcaagatcagacatggcccagaacttg

SEQ ID NO: 8893 - DNA, 2300 bp, Homo sapien
aagttgttaacaaaagactgaacccaaattccagagcggagctctccctcattccccagcctgtgcaatctccctttcagatagcactgagcaaggatcaacaaatctaatttgcccaggatccagctcttgcacaaagtccagagatcaatgccagcaaggcatttgctaaagcagcaacagccagctatgcacacacatacgcatttccacaagaagcaactatttgtcatcccccaaagagaaggctatttgaagaaccccagtcagtggggcacacaggtggggaacactcaaagtggctcttgtggggagattcaaggctatcctgaaccatgcattctcttcttggcatagaattccttgtcctctgagcaacagaaatatgccatacgtggtgttccttccctgctggaagttgctggtttctcctacttctatggggccttcttggtagggccccagttctcaatgaatcactacatgaagctggtgcagggagagctgattgacataccaggaaagataccaaacaggtaattgcccctcttggtccagatgtttgtgtaggtatttcactcactctgaagtgactcttctgaaagctgcattctccagcatgaccctggcatagagacctgagtcatgcaggccctggactgttgtaacaggcactctgtgccaggagtgggccctttttagtttagggttcttccagttatccattctaacactagtacaaacataaaaatccacatttatgccacaggattttgcctgaaccagtcacatttctgcctttaaagcctattttcatgtatatatgaaatatatttatgattgataggtaggtaggcaggttgataggtaggtaggtagatagaggctgggcacagtggtttcacctctataatcccagcactttgggaggccgaggtgggaggatcacttgagcccgtgagttctagaccagcctggcaacatagagagactctgtctctacaaaaaaatacaaaaattatcagacatagtggcatgcatctgtagtccaagctacataggaggctgaagtgggagaattgcttgagtccaggggaggtgggtcaaggctgcagtgagctttgatcacaccactgcactccattctgggcaacatagcaaaatcctgtctcaaaaatatttatcagtaggaaatgcaggagggcacagtggctcatgcctgtaatgccaacgctctgggaggccaaggcaggaggatcactggaggccaggagttcaagaccagcctgggcaacatagtgagaccccatctctacaaaaaaaaattatccaggcaaggtggtacatgcctatagtcccagctactcaggtggccaaggcaaggggatcgcttgagcccaggagttcaaggccacagcgagcaatgactatgcctctgtactctagccggagtggcagagcaaggccctgactctagaaaataaaaattaaaatggtaaaaaaaaaaaaaaaaaaaaagtttaattgccagaagaattccttcactgagaacttgtccatcctgtgtttcagcatcaattcaaccaagaaatgaaggagcagattcaaagtggttatttttattatcttacctccactgggttttcagtcccaatggagattgtgagacctggcaagaccttgagatcagtagcatccctgaggggtaaacacaagactggtccactgtctgctgccctgactttcctacaactcttaagaggtttgcagtccccattcctcatagccagccatagaaatctttccctgaaacaggaaacactttgggcagcagagcttctcatcccattccaggtagacaaccacacccctaaacactcctctccataactgaaggtcagagggtgaagggaatagtctctgctctctgtgaccaggaacttcactcgttcctttccagcatcattcctgctctcaagcgcctgagtctgggccttttctacctagtgggctacacactgctcagcccccacatcacagaagactatctcctcactgaagactatgacgtgagtgtctactaaagcagcagcagcatgactgcaccagagctagaaaatggacaggcaaggatccctacagatagcagagaagtaggaaatatcatctacaagtgcatgttggttttgctctagatctgtgagttgtcaatgccagccgtgctgggacatgttcatcagccagcactgaacaaccttcgcgggcacagggctgtgccaggtgcacatttagcacccgtt

SEQ ID NO: 8894 - DNA, 2300 bp, Homo sapien
caggttcaagtgattctcctgcctcagcctcctgagtagctgggattacaggcacccgccaccacacccagctaattttttatatttttggtagagatggggtttcaccatgttggccagtatggtctcaaactccggatctcaagtgatccacccacctcagcctcccaaagtgccttggtttacaggcgtgagccactgcaccagccagtacagttttttgttttgttttattttggttttttgagacggaatctcgctctgtcgcccaggctggagtgcagtggtgccatctcagctcactgcaagctccgcctcccgtgttcatgccattctcctgcctcagcctccctagtagctgggactataggcgcccgccaccacacccggctaatttttttttttgtatttttagtagagacggggttcaccgtgttagccaggatagtctcgatctcctgtcctcatgatccgcccgtctcagcctcccatagtgctgggattacaggcatgagccaccgcgcccagccttttttttttttttttttttaatgtatgggggaaaaatgactagaaggacagaaaccaacatataacatgattgtgtgcatttacttatttaacaaataattgagcaatttatttctgtatgatactattctaagcgttttagagttaagcaaactcacagtaaactgtattgcccatgataaaaactgcagttacataatttaaaagcaagaatcgcagcaattcatcaggcacagtgactcacgcctgtaatcccaacactttgggaggccaaggcaggaagattccttgagcccaggaggtcaaggccagcctgggcaacatagtgagaactcatgtccacaaaaattacaaaatagccaggcatggtggcaagcacctgtggtcccagctactcaagaggctgaagttggaggatcacttgagcccaggaggtcaaggctgcagtgagcgatgatcgtgccactgcactccagcctgggtgacagagcaagagaccctgtctcaaaataaataaaaataaaagcaagaattgcagaaagtataaaccatgaccaactcaagagaataatcaatgaaagaataggcagaatgtctttccaaaaagcagttgagagatccccatcctccacatatgcactagtgcagtggggatgttgccaggcatggccgccagacctctagatagaacactgaaggtgagtctgcagtaaagccatggaatgtgctaattttagtttaggaataccaaattttattgaccgtttttaattcaataagcaacccttggccatgtataatcagttcatgacccatcagaagatcctctgtggttcactcatggcctttggactatactctgaatcatggctttagaagacatttttttagtatacttaaatggattttataacttggttgatgcccagattacagactgtgaggagtatctccacataacttgtaactgctatatatgcagtcagcaattccagtatttagcctgatattaatttatatttttcctcataatctgataatacagtgctagcaagatagatcacaaagtgtaaatgagtgtttctggagcatagatgggtacgctcaaatctttgtatcttgttttttaatagagacggggtttcgctatgttgctcaggctggtgtcgaactcctcggctcaagcaatccccttgcctcagcctcccagagtgctgggattatacatgggagccaccatgcctagcttccttgtatcattttttaaaattcaagtaagagaaaatgtctggcaatagttcataagctataaatgaaacctagtcttaggacccagctttatattgcctcaatcaaatattaatatctttagttcaaaatttgtatttacaaaaaacttttggttcttggggataccgttattgccttctctgttgccatccatataatgtatgttgttttttttttctctctccctctgggctgcgtttcatgccagataaacttccaaaccaaactgggatggcaccaggcacaaataacactcttcttatcttttcccccatctaggttacccctttgctttgttttatcggcattaccttttctacaaggagacctacctcatccacctcttccatacctttacaggcctctcaattgcttattttaactttggtgagtaaactaaattagcagtgacaccgcaattagtgggaacctggaaggaacagacttgaacaaaatttccttgagagaatctaataggt

SEQ ID NO: 8895 - DNA, 2300 bp, Homo sapien
aaaaaaaaaaaaaaaaaaaaggctgggcgcggtggctcatgcctgtaatcccagcactatgggaggctgagacgggcggatcatgaggacaggagatcgagactatcctggctaacacggtgaaccccgtctctactaaaaatacaaaaaaaaaaattagccgggtgtggtggcgggcgcctatagtcccagctactagggaggctgaggcaggagaatggcatgaacacgggaggcggagcttgcagtgagctgagatggcaccactgcactccagcctgggcgacagagcgagattccgtctcaaaaaaccaaaataaaacaaaacaaaaaactgtactggctggtgcagtggctcacgcctgtaaaccaaggcactttgggaggctgaggtgggtggatcacttgagatccggagtttgagaccatactggccaacatggtgaaaccccatctctaccaaaaatataaaaaattagctgggtgtggtggcgggtgcctgtaatcccagctactcaggaggctgaggcaggagaatcacttgaacctgggaggcagaggttgcagtgagcagagattgcagtgagcagagagagccactgcactccagcctggtgacagagtgagactctgtctcaaaaaaaaaaaaaaaaaaaaaaaaagttacacctgtcggccgggtgcggcagctcacacctgtaatcccctactttgggaggcttaggcgggtgggtcgcctgagatcaggagtttgagacgagcctggccaacatggtgaaaccccatctctactaaaaatacaaaaattagttaggcgtggtgcaggcacctgtaatcccacctacttgggaagctgaggcaggagaattgcttgaacccaggaggcggaggtggcagtgagctgagatcacgccattgcactccagcttgggcaacgagcaagattctgtctcaaaaaaaaaagaaaaaaaagttttatgaggatttttgactgtacaaggggtgggatcccataggacctgcgctgttcaaggctcaactgtaattaattctacagatatcttatggattactggctcatgtattcattcaccaagtgtttagtaaatgcctgctatatgccaggtattctgtttatgaagcacgtaattgggtaggaggtggcatgtgatggttcgttttctagctggctgagatgatgggatataggatcactagctctagggaggtggagacatctatgaccctttcaggtagatcaatgagcaaggaaataggatcaagtctcatatatttcacatgggcagaaatttggcagagacagaacaccaggttagcagcaaatattgctaagaactagagccaggaactagaaagtatatagactaaatgtcaatgccttcaatcttttgctttatttttacttttgttttagtaacggggtataaataaaaaaatataaaacagtagataattatctagagcactcataaataagttctaggtagctaagtttctctctttaagcatgaaaacccttaaccatttggaatgctcgaaattaaaaaacaccacacatattactctgcctctttaagttgaatctaatttaacattttctaggtgtctggatcgtatctattccagagtaaagtcatgatggctttatgacgttctgaggtatgtgaaattgtctgcctgactctaacaaggcctacactgtcctgagttctgagttcttgtgtccacttcttatagcctgtctgtccctttccttgctactctgggatcaacagtcacctcttgaacttttggggtgcttggcaatagttcctctccctactcctaatttacggcaggccttagaaaccataaccttattttaaaggtgtaaaaaaaaaaagatttaagacaaaagcaaggggcttgggtgctttccttatggacttaggcctggtaacatctgttctggccacttagaggccttgtgtgctatttcttgttttcaggtgcgttttgcaggaggggacgttgttgagttccaaacaggtgaggtattgcacactagcaaacacatgagaagaaggcggaggaattgggagaaaaataaaaagaatgcagcaggccaggttagcaggaacgttaagacggtgacggagaacagcaaagcctggaagcaagccgccgtggagaaggaagaactgtgctgaggtgagttgctgtgacaacccaggctgattttgagtatgtaaacaccaaaccttgttcttggctgccgctcagctcagcgggctttggag

SEQ ID NO: 8896 - DNA, 2300 bp, Homo sapien
gggcatggtagcatgtgtctgtagtcccagctactcaggggactgaagtgagaggatgcaccagagccccagaagtcaaggctgcagtgagccatgatcacatcactgcaccagcctgggcaacaggagtgaggccttgtctcagtcagtcaatcaatcaatcaataatggtatttggtcttctgaaagaaagtgacattttagctgggccttaaaggggatggtaagattctagtaaagtagagatgaaagcggaggagctttccagctacaaagagtaatctggagatcaggaagagtaagaccctgtctgtccctgaatctaaggaaaaagaaaaaaaaattttgagaaaaatctgaggaacagcaagtagtcctctttaaccagaacaatagaagatcgtaaaagagcagtagagaaaaacatgataggccttttatgtaggtggaggtcaatgacagagtaaggtagtaacatgtgcattgtctttagagatcttctggcctaggttcaaatgctggatcaaataaatatgtactagctgtttcaccataagctcattaccagagttcaaccacccatttctttatattcccacaggccaattttactaaagaattgcaatgaagagttaagcaatttatctgataaatatttttagatttatatttcattcataactagcagcagtattttgaaacagaatacaaaatttatatgaatttttaaagtaatacagtcatcaaagaaattttctatttctagaagactgcttaggcatactcttttgtgatgtgttcattctcctttggcctggaaaagtttgagaactgttgctcattgggatgttgtaaggactaaataagataaactatgtaaacacttaaccatgcttgacccaagatcatcttaaataattgttcttcccttccctgtcaataaatatttattttctccctttccaaggagacacaaagtatggtcttgtgaccaacagcatctgtatcttatgggagcctgttagaaatgcagattctttggtctactccaaaactactgattgagaaactctgaggatagtgcccagtaatctgttctagcaagccaggttatacttattactctagagtttgaggattactaatttagcatatttcttccggtgcctattttgtagtacttgatgtcctgatagtacctttttggaatgtcattggccaggcgcggtggctcacgcctgtaatcccagcactttgggaggccgaggcaggcagatcacctgaggtcaggagttggagactagcctggccaacatggtgaaacccatttctattaaaaagataaaaattagctgggcatggtggcacatgcctgtagtcccagctacttgggaagctgagacaggataatcgctggaacccaggaggcagaggttgtagtgagccgagattgcaccatggcactccagcctgggtgacagaaaaaaaaagaaaggtcattgtatcctgtactctttggaataaacaaaactcttagattccttatggtttagtttttcccatttgtaggcctgacagataggaaagttgggcctacaaaaattgagtaacttgcttaaagtcacattcagttctgcctgactccagagttcctgctctggatgttatctgaggaataaagagatgttgttgttattatgttcacattgttattatgttcacattgttattatgttcattatcatgatcatcacatacaccatctgtttcacacttttgataagaaggttagatacagaggagttgtgttttttgttttttttttgagatggagtctcactttgttgcccaggctggagtgcagaggtacaatctcagctcactgcaacctccacctccgaggttccagcaattctcctgcctcagcctccggagtagctgggattacaggcgtgagccaccacacccagaggaggaatttttttaataaggttattggactaatggctccatcttttttgtgttgcatcaaccaccttaagcaatatagcattctcctgattgatctccttacgtttcttaatataagtaataaattgtgacttgtagctttaacaaaaattaggttccctagttgcagctgccagggaaagctagtctaatatcaaagcaaaccatccttcttctcaagcacagagtttttaagataggagtgtgtgtgtattgacattttcctagcagtggctgaagtcaaggaccaggagatttagggcccacttggagttcttatggtgaaacag

SEQ ID NO: 8897 - DNA, 2300 bp, Homo sapien
gtatgaatgaatgacttggcaacttattagctggaggataaagtcgtaattttaaaaagactccatcctcctgcctgagtagctggaaagataagggtatctttgaccaatgccagagatcaagtggaggatcagatactcttaagtgccaggaaatgatctggtttggggttcactttaggttccaagggcacttccaggtatcttgggagttgtgaagcctggtcttgagctcaggaaagaagctgggctaaagacagagttttaggagacagtattggtatcataactgactcagggagggaatgaaatgccatggaaaaggttatacagagaagaggatcttattcacgttgattgggtatgttaatgttgctaccccttgataatagtaatagctggcatttattaaggattttctgtgtaccagacattgtcctaaatggtcaacaggcagttccccacctaaacctgccagttacccgtgaggtaattatagtgctgttaagatctcctggtacagataggaaagtcagccctacaaagattgagtaagtcacactgagttctgcctgactccagagttcctgctctttaccgctgagattgggaggagcatgtggggctggaaaagataaatgcccttggtgtccttttctcttttcactctcagtggttaaaccaagatgcaatcagtatatgagccacctctcagtgtccaaagctagagctggccaaatggagcagatggccaccctgcttactgtgagtgttccctagtcttggccatgatggtggcttggctgttagactgatcaaaaattgcagctgggggtaacaattcatccctcagaggttcagaattagcatcactaaagttagcgacctttaaaatcaaaggaggtcctgcagtttagttccctttggaccaaagtcaggtctggcccttcagaaaaaaatccattattcagtgcagaaagctttcttcaggtagcactggaatcacaatataaagagaccaaaggtaagctagatgaaaattaagcagcattaatgaaacaaagagacttctgaccataatacaaagcagggtccaaaaattctactgctataaaatagggagactgtcctaaatgactttcaaggacccttccaattttaaaagtctaggtatattacttctacatgtttagactttattctagttcatagccacaaatttcatcataatctaaaccttcccgtttgggaatttctttttctttctttctttttttttttttttttttttgagacatggtgttactctgtcattcaggctggagtgcagtggtgcaatctcagctcactgcaacgtctgcttcccagatcaagcaattctctagcctcagcctcctgagtagctggaactacaggcgtgagccaccatgcctggctaattttttctgtattttttgtagaaacagggttttaccgtgttgcccagggtggtctcaaactcctgagctcaagcaatccaccagcctcagcctcccaaagtgctgagattacaggcataagccattgcccctggccaagaatttcttttaaatacaattttccaggtcaggcacggtgcttacgcctgtaaccccagcactttgggaggccaaagcaagaggatcacttgagtccgggagttcaagaccagcctgggcaacatagtgatacctcatctctacaaaaagtgaacaaaattaactgggctgggtggcatatgtctgtagtccctgctgcttgggaggctgaggtggaaggatcactggagcccggggtcctccgctcaactcaggacgttgaggctgcattgagccaagatcatacctctacactccagcatgggcaaaagagcaagattctgtctcaaaaataaataaataaattttgtttttaattagccaggcatgatggcatgcacctgtagtcccagctattcaggagaccaaggtgggaggatcatttgagcccaggaatttgagactgcagtgaactatgatgatgccactgcattccaacctagatgacagaaggagacctcatctctaaaaataaatatatatattttttccaaccactttttatctataccccaatgtcttacattccataaaacatcatgttttgaattccagtataactttatcgttaaacatgtttctttgcagaagcatgtataagttagggtccacaagattatttgcataagctaatttacaaaaaaaattatataatcactgacatgaaagcatgtctgggcagcc

SEQ ID NO: 8898 - DNA, 2300 bp, Homo sapien
cacacagagcctgtctggtggtctcttcacacggacgcacatgaaactccatctcccgggttcaagtgattctcgtgcctcagcctcccaagtagctgggattacaggagccggccatcacgcctggctaatttttttgtatttttagtagagacagggttccaccatgttggccaggctggtctctaactcatgacctcaggtgatccacccgtctcagcctcccaaattgctgggattacaggcctatatatataatttttgtttttttttgcaagacagagtctcgctctgtctttcaggttggagcgcagtgtcatgatcacgactcactacagcctcaacctcccaggctcaagtgatcctcccaccttagcttcctgagtagctgggactacaggcatgttccaccatgctcatctaaattttattttattttttttgtagagacagggtctatgttgcccaggctggtctccaactcctgggctcaagcaatcttcccacctcaacctccctaagtactaggattacaggcatgaaccactgtgcccggccaatataaggcatgcaaaactatactaattttcctttctggatatatgctgtatgtaaagtattaaaataggcatgggattgataaataccaaagtcagcaaagtggtgacctctgagaaaggaaggagggaaatgccctcaggaagggatataccggcttttcaaatgtataggtgatgtttgtttcttaacctggagaagttatattatcctctacttttccgtgtgaatgaaatattttgttttttaaaatcttgcccaaaatgggagtaggggtagggaatttgacagacctaggtttaaattctgtctgccgcttacttgtaaaggaacttacccagtttcttaatttctccaagcctctgtgtctgtaagaggacatcatcataataaatattctattgcgcagccaaagcaagtgaaataatacggatgaaagtgctttataaagtgcaagtgctacagaagtataagctgtaattttacaagaatgcgccacaaattattgtaactaagagttattgcaagaaactcttagcattcctttgttacatactctcacagaaccttgaccctttccttcagagcacttaccttctcttgcaataacacgttaattgatgctattatttgtgcatcctcccactccgtggctctgggctcctgattctattcccaagcccagcacagtccctggcatatggtaagtgctcgacagatttttttttttttttttttggcgtaatcttaacaggattacctgtaggaagtgagaatgaaaagcagggaggggaaacaggactcttctgttttacatttctatactgttataacttttatcataaacatgtattactcagtgcaaaattatttgaatttttaattaaaataataagtgttaaataggcatatcttaatttcatcgcctctagggggaaggtcatgttttactacaggaaactgcatggaaaagggatccatgaaataaaaggagcagacaatgtctgttcctggggcactgggctttccgctgaacctccgggagtgaaggcgacgagtctaacaacctaagaatttaagaacgggccgggaggcgccgttagggggcgcgcgaaaggcggcgcgggcgttcccgcctccccgttacatgccccagtaaccccagcgccggcgaccgggagtaacctcgcgcgcgggcggcccccccgcgtccagactctcgcctgctcccgcctcagccaatgggaaggcagcgaaccggccggccggacggtcgccccggagggctcctcctgggagcatttcgaacggagttgaactgtcgccgggccacgggctcagacctttccaatggcagctctgggtcccgacgccaagccccgcccagccctgagcctccccgtgtgcattctcggcaggagtcacctttgccttacaaaccttcagacccgccctcttcctaccttgccgcgctaggccccgccctctgcgcaggtcggccaataacggggtgagctggcgccgcggggcgggcctccagccaatgcgcacgccgtgggcgggccccgagccggaattgggggtgaagcgatagcgttttgcccgcattcggggcgcgcggagctggggggtccctgtggggctcccggagttaagatggcgtcctcagcggagggggacgaggggactgtggtggcgctggcgggggttctgcagtcgggtttccaggagctgagccttaa

SEQ ID NO: 8899 - DNA, 2300 bp, Homo sapien
accagccattgacccctagcttgcctttctataatcctttgctgctcaggagtcatgcggccagaggtcacaagatctgtgacttccccaattgctcctatagataacatcactattgtaaaaccaaatattggtcttctgagatatttttcagacttttgcattctgaaatgattcatgactcaactggtcctgtgacccccacccagaggtggacttagtgcacaaggtctgttttctacactcctatgattttatccccaacgaatcagtagcacccattctctgctcttaccgcccaccaaattctccttaagaaccctagcctctgagttcttgtggggactgatttgagaaataaactcccatcctttcacttggctagctctgtgttgttaaactctttctctactgcaataccatggtctcagtgaattggttttgtctacgcagcaggcaggaagaacccttcgggtgattacaaattagcctgctccagagctgctggaggtgggggtgacacacttcttgtgcctgtgtcttctttcttgggaggtcggctctgttcccaagactgatatcatggggaactcctctaatgtggcaaagcagtttgaatgctgggcagccaggggagtcacagatggttgcatacacatctgtgttctgcatgacactgctagacatggcggacaataccaagacggatcagacccagcacctgtcttccgagaccttacgggctcatgattctcttccttttaacatgcacatttattaggtaccatagtgtgcaaagcttgttcactcgaattatttcattaggtccatctgatagtcatgtagggtaggcagaactgataggatttctgttttatatttgaagaaactaggtctgtcaatagtgagccaggtttaaaaaaaaaaagaaactaggaagttaggtgatgagcctaagacatcaccactggtgaggagcagagctgggacatgagcctatcttctgactccaggcccagtgctaagccaactaaaggggcataaaggggagctgagatcagggaaggctctgtggagtggcactgcccctcagtcccttgtctgcaattctaaaatccaaaggactctgaaaacaaagtctctgtcttttttttgtaatgggatctcattctgttgcccaggctggagtgcagtggtgccctctgcagcctcgacctccctggcacaagtgatcctcttgcctcagcctcctgagtagctgggactacaggcgtgtgtcacaatacctggctattgttttttgtttgtttgttttcaagtttgggactaaaactcaatttggcagcaaaacctgacccgaactgatgtgatttgtaatctttagttatccatttaccgtaagatcaatgtgtttagctgcagaaatcttaatgtttgttaatagggggttatcctggtccataaagggagggagaggaggaggtgttacctaatattgggtccatggactacatagcctaaaaaaatctataaaatttcaaaacacacctggcttcaagggttatggataagggagtctgggttggatctgaaagggggcttggttgtggggtagaatttcgatgtttggaagggatgtggagggatgttatgaagaggaagcctcacgccataccaccttgggtcttggtgttaagtcattatcaaccattacatttgctttaaagcagagatgacttacatttctgataactactttcccttaattcatgattcacacacatttggagggctggactttctgggtttggttatttcccctggtaccaatccccgccttttcccagaaatcacttgactttcccgaaaactcagaaacacaccctttggctgaaaaatagcattaagcaatcggtgaaattccccattcctcctttccccgctggagccctggatagagggctctctggcctgggaggaggacgctgtccttgtttcaaaagcagagggagctccaagatcaaggctgagtttccctaagtcatggtctcccagccccctctgtttagatcagggaatttcagacatgcacactcgggtagggaatcttatgaacagaaccaggacagggaggctggccggaggttcctgcagagggagcgtcaaggccctgtgctgctgtccctgggggccagaggggttgcccagcatgcccactggcaggagagagggaactgacccacttgctcctaccagcttctgaaggtaaaatccttacaaacgaggagcagagctttgat

SEQ ID NO: 8900 - DNA, 2300 bp, Homo sapien
cccactggcaggagagagggaactgacccacttgctcctaccagcttctgaaggtaaaatccttacaaacgaggagcagagctttgatggaggaaaaaggaaaggcagaaaacttcacgtaggagggcttggggcaatgatagagggctgacaaaggcagcataaaaaaaggcagaatatagacaacctatttctcttaggctcaccccatccacccctacttcacccccttacctaccactgttttcagggttaaagcaattttagcaaccctttactaggaactgtggggagatagcttgtattttcagtaagttggcggtggggggcagggacaaactccaaacaaactctggaaaacgaatgtaggaagtttttatgttccttgtcatttggctgtcccttttctccttcctcgcacaaccctgtatcagtggggcagcacttccttctcagaccgcttgtcccagggtccctgccttcccctagtgaaagaagctcctgcctccatcggtgggcgttgggagcatcagcggagatgcacgcaatgataaacagcagacagggctgcttgaggagatgaggtgatcacggttaaagaagaggggctgtcctacatggatgatcatgatgcgccaagactgttgaaaacctgagtggaaatgggagcatcgttcttgagggcaggagagagactgataccgcgggggtggggctggtggaggacaatagaggaagaagaaaactgggagaaagtactcgattcctttggagaaaaattaggagaaagtctagagaagcaatgagggaaggatacaatttagctatagtctagaaagttagtcgaagttaactagggagggtgtgaggggcacggtgccatgtggggatgttggtgatatggccctgtgtgttatacctttgaaggtgacactgagccccaggtgacgccgcaccaccaaagaaggtgcttgtgtttgtcagacaaatacagccaggcctgccaccccttaggctccaaagtccggaggtgcagaaagccaggaccaagagacaggcagctcaccagggtggacaaatcgccagagatgtggtaagtgatcaagggtccctgagatgacacagactccattcccttcatcttctcaagaaaagcgctcaagggccaggcatgatggctcacacctgtaaccccagcactttgggaggctgaggcgggaggattgcttgagcccaggactttgagaccagcctgggcaacataaggagaccctgtctctattaaaaaaaaaaaaaattagcccagcgtcatgcgtgtcacctgtggtccctgctactcaaaaggctgaggtggtagaatcacttgagcgcgggaggtcaaggctgcagtgacctgagatcgcaccactgcactccagcctgggtgacagagtgagaacctgtctcaaaaaaaaaaaaaaaagggctcttgtctgaagcctgggttttggtttgacctgggccttttctttattccgacctaagattctcccccatggccgattgactgcctctcttcttccccctttcttctgcctctggcaaatagcgcgttctgtcctaggctactggtgcctggtcacccgccaatctatgcctctgttttttcaggtgcattgtcctgttttcacttttggcatgggtttatgctgagcctaccatgtatggggagatcctgtcccctaactatcctcaggcatatcccagtgaggtagagaaatcttgggacatagaagttcctgaagggtatgggattcacctctacttcacccatctggacattgagctgtcagagaactgtgcgtatgactcagtgcaggtatgttataagcacaaaaagaatagagatggaagactagggctaaggtagcggaataaggatgtgggagggagtgccacctgtactcacagtgaactggagtcaagtcctagtggcataaatgttctattctctctgtcccttcttttaactccataccaaaatattaccctttcctagattttttttttgtgactcttctcttagataatctcaggagacactgaagaagggaggctctgtggacagaggagcagtaacaatccccactctccaattgtggaagagttccaagtcccatacaacaaactccaggtgatctttaagtcagacttttccaatgaagagcgttttacggggtttgctgcatactatgttgccacaggtaaggctcacccttctgcatgtgccttattgacccagctaaaagattagaaatgag

SEQ ID NO: 8901 - DNA, 2300 bp, Homo sapien
tgtgtatgtctagatctatatctctacatctccatcgctgtctctgtctagagatagagatatcgacaatgagagagagagggaggtaagagatagacttgatggagatagatgagctagcgatagagacatatccacagaggaaaacctaccactactttaagagagaaatctttttcccaagaatcaaatccttaaaggaacaaacactgtaaccgactatatcctcaataattgttttaaaacaaatgcagcagcatttcatatggcatttttttccttcttggtatgagtcaaggacaaaacaaagtcaaggacataacaaaaatgtgtgagtaaaggttattttgaatggttgggcagagtggagacagggctgggactgagctaatgacatccaggtttgccgctctccaagcgtgttgcacaatgccaatgcagaactgagaatccctaggatggacggaagagcttcagctaagacttacctccttacctgttccctctgcctccattatgaacatacggcacatgcgcgcgtgcacacacacacacacacacaaactgctgctaggatattaatgtgcagtttgttagacgagattccccttccttctcgtcctctgatctggtgcttttccttctcccccatcttttgtctttcctgatctaacaaggctgtggatcatatgctgatcccatcacagaccagccctccgttaggttcagtcctcagctctgacacacaggcctgctggagaaaccctccaagcgttggtggatcttgcaccttctgtgtgcctgctgtctaactactgatgatgtggtcactgcctgatggggaactgcatcagctctgtgaattcttgcaatctattgcctgggaaagtgtcttgcacattaaacaggtagcccataaatggatgaacgggggtgggggcagaagggtggaggttggagggattcatctaataagggaaacaagcagaacagcctacaaaggcttaagaacgcagagtcctgctctgcagcccaagcccctccgtgggatgaagtgccatcagatatttggtgccatggagagttgatgaagaaagccttccaaaaacaatgaaattgttttttaatttattttaacttttagagacgagatctcactatgttgcccaggctggtttcgaactcctgggctcaagagatcttcccaccctggcctcgaaaagtgctggcatcacaggcatgagccaccacacgtggccaagagcaaaagttttaaagcaggacactatggcctgatggacaggagagactagggtccctcctccctcccaggggcctggcttcatctcagaaaaaccgagtccctcttgctccacacccgcatccttagcttcagccctggcagttgtgttgagcagatgctaaggagatggggacattttaccccctccgcagccgccccagagggtctcaaacccagggctgatttagggttgccctgacatggccaaccctattctatgtccaagtgtcattcatggctaaagcaggccagggccccaaggcaaccaagctcctctctcctctgcccgctcccacacaccctcctctgccccagtgttcctatcattacgtcctgggcattgaaacccgggccattcttggaccagggctgtgggctgaatgagggcaggaagaacagggtcaatgggaaaggacagcccagaaaagagaattcaccaccacctgtggtctcccactgctttggtaggaaccttgtaaacacagcagcagcccccaggaaagtcttggaagaagggagaagctgatcagatttagagactgagacatctgggcctccaacccaaggctccccgggccctaaaaagccagactcccgtctccttagccctttccctcaccgaccagcaggtggcaccacaaacagggatttcaaaaccaaaactaaattaaagtggaaactcagatcttttgtttatgcaaatagttcattccctccaacattcctccgggaatggtcccccctccactccacagaaaaccctcccctccctgctgtgcatgacgcgggctccctctgcacacagtgcacgaagacgctgtcgggagagcccaggattcaacacgggccttgagaaatgtgagtaagggtgatgggcaaccaggtgggagggagaagccaggggagaagccagggcatgggaggcaattcagggagacaggaacacccttctctcttcacacacctcatcagttccactgtgcacacgcgtggacac

SEQ ID NO: 8902 - DNA, 2300 bp, Homo sapien
atcaaacttcttaacaaagtctagacctagaagacaatatcatcaaaattctggaagaaaaaggtttccaatctagaatgctatacccagatcaactatccctccactgtgagggtagaactgagacatttagacatatataagatcttctaaaattcactctaaaataccctttctaaggaagccactggtgaaggtgctcctccaaaatgggagagtaaaccaaaaaagagaaaggtatgggattcaggttcagcacaggtaaaggaaatccccagaaagagggagaagagaactcccagaatgtgtgacggcttagagagcaaagaactcaggctgtgaaaataaatcgagagatcttcaggagggatgtcaccaattaaaaggaggaccgatagactgaaattcatgcttgagtatttcagaagaagatttacactcctggttaagagtctggtgagattagttacagagacaactaagcaaactaaaaagcaaaacaaaaacaaacaccccccaccaaaaaacaaaacaaaacaaaacaaaaaaactccatgtaactattgactcctaggaaacccaaaagttggagaagaaaagaaatataattattttatgctatgtgctcagatgtgaatattttacagtcataataatgtaaataatgaataaagatttaactaaaaatgataatataggtaaactggcagaatgaggaggggaaatgtgggtggtgaagactgaagacagataaagctagtccttatcttctatactgtagttgagcattaatagaaaatacgtaaaaatgaaagacaaataagcatgttatttatacatatgaagttaaagaccagatgaaacagctacatgaattggcaaatgactgctcctgaggagcagcactcaggggcggggaggaacagcttggagactgctgttattcataaacctttttaaaaacctttttttttttttggagacagggtctcactctgtcacccaggctggagtacggtgtcatgatcagagctcactgcagcctctaccttccaggctcaagtgatcctctcacttcagcgtcccttgtagctgggaccacaggtgcgtgccaccacacttggctaatttttaaatttttttgtagagatggggtcttgctatgttgcccaggctggtctcaaattcctgggctcaagtgcttctttcgcctcagcctcccaaagtgctgggactacagacatgagctactgcgcccagccttagaaaactttaattaaaaaacaaaaagtcttacaactattatgtatccataataattaaaaattttaaaattaaaaaataaagttcaaaaatttatgtcattttgatataaataaaatttaaatcaaaagataatgtgctctttttatttttatttattatttacttatttttgagatggggtcttgctatgttgcttaggctggccttgaaccctgggctccagccctctgatcctccagcctcagtctcctgactatactgctgggactgcaagcttgcatcactccatcaagtactgtttttaaaatgtccttattctgaataaggctttggcgttagaagttttgtaatagctcttccaaggtaagtgtgaacggtgacttaatcttttgttattatttgtgtccagcttcctcacctgatagagcaggcactcaacaaatacatgatgacatatttttaacaaccaatatgtgcgtccctgcccctggctccatagatttgcaagatttgtgtgtccattcataagccttccaaacgcagggcctgcttgctgccctctttgctctgtggggcccagatggcagccccggaggcgctggtgggaggctgtgtcctggggtccaccactgctccccggtaagccaagcccgactgcccctacatggaaaattcatccctcctccagatgggggattcagggcaccgccacttcccacaaccccgggaatctccctggccacagtcctggcgggaccccccccatccccagctcactgtgacagagtcccctgcacagtcctgggacggctccaggtcgaagtcctggaagacgagcctcacagcaaagccctctggagccttgatgtccgtgctgctctcttggcctttgccatacggctctgggtacccgggggatgtcagctgctggggtagctcttgggccaagaggacggagccccgggttgggcaagcctggaggactccccagagaagcagccaccacctgtgagttggggggagggcaaggtggg

SEQ ID NO: 8903 - DNA, 2300 bp, Homo sapien
agaatctctgttttcttttatctgaaaatagctttatttcatcttcattctggaagaatactttcactagaaaaacaattctgagttgactttttttttccttcagcattttagagatattccactgtcttctggtctatattggttttgatgagaaaagagtgacattgaaaatattgttctgtctagtctttaggatgggattaaaaaaaagaaaagattttctcttgtctttggcttttagcagtttgaccatgatgtgccaaggcatgccctttttttcattgaccactctgccagttagagacgaggtcccagtgtaggggaggtggtgctgaaaacacagcggggcacagctcagccctagcccacaggggcctgcagtgaccagctatgcacagagccatcagctccttctccagtctcacatcaccagccattcctccccttgcccttgaccctaactcatgctgcagccgcacacgccacctaggtgagaccaaggtgggccctcatattcagagtgctggattaccccaaacagggaccacatccagaccctggactgcccagtcacctggggctgccggtgcatcactgcctccccaccctcttggctccctgtcctctttctcacccagcctcactccagcactttaacccctatccatttagggtgaccaccagtcctggcttgcccagaacttccctcattttaaaacggaaagcctcatgtcctgggaaacccgtcggtcccacgcaaatcagaacagtcggtcaccctacctgtcctggagtttccttccaaggccttactcctccctcctccagctcatctccaggaaagtcttctcagatgggctagcctgagttttccagttcctgcccctcttagcaaacaaggaaataatgctctgaagggaaacgaggggtggactccccaatcctgatctgagtcttggctggtttcttcttaacacatgggtcttgggattggtaccattgttcactctttggctgcatctctggctcccaaggtgctccaggtgaccctaagagttctatgagagagcaggtttcagtggtctcaggggaggaaagaagtcctagtcagagaggcccactcctcgaagatgggtatgggagatcatccccagttgtgtttggggttggggtgtggcagacaggtaggcttgatctcaagactgtacctgagacattgcatctgtcctggccatcactctcttatcatctccttgtagccatagactgtggctctcctaaatctctctagcctagaaaaaccaaagatgcagagcacaccctgtttgggtctgtaacttgcctccatattactatatgcaaaatgggggaagcaatagattcttctctgagaggtgtgtgtgcgcgcgcacatgcatttgtgtgtgcatacaacgtaaggccttccacacacctgccttctctgaggacgggaccacccatctccataagagccttctggcctcctaccaagctgtgggtgagtgtccttcctcggggagcggtgagagcaggcaggggctctagtatctgcctaaagaagcttgagtgacggcttgagtgatgactgggactagggactgagggacacctgggctcgaccccagccctgaccatgctggacaagcagcctccagaggttgtgaataggattcaaaagaccacctaagcgcatgtcccccacccctgcttggggaggagggaaaggaagagaaagctcaagttcaaggatcacaaacttcaattctacaagagggaggctccccgggtatgtcgtgaacggaaaggtcggggaggaagagacatggctgattgaaggcagcagccataactcacaaggagccatcctacacacatggcaaaaattaatgttaaatagtacaaaagggtcgagtcagtgccctgccaccctgacctctgagggccagcgaggtttttggacgtttctcccctaagctgcggcgggcccgctgttcctgagtcagacggcaggtggcgctcagcccggagaattggagaaggggaactgtggagttgcttaacatttccaggaacttcctcctcccccaccggccttcaccttttgttccctatcctgggccagttctctcgcaggtcccagatgtccagttccagatgcctggacccagagtgtgggggaaatatctctggagaagccctcactccaaaggctgtccaggcgcaatgtgagtgtggccccggcagaggaggagggaagaggacgggaggggaagaga

SEQ ID NO: 8904 - DNA, 2300 bp, Homo sapien
tcctcaaactccactcccacatcaaactgcacagtgtagtttcggaaggtgctgagcgtcctcaccgtcatgtggttgccctggtgttcgatctccttgtccggcttcagcagcagcgcgatcttccgcacagccaagctgatgtctgtgggggctgcctgttagtaggggtgctgctagccagccaggagctcctctgcctgcagcagcccctcagggctgtgagtttcccttctttgggtctgggactgtggattcaccccctcctaccaatgcctggttagaaatggatcccaggtctggtgccagccgcctgagcctttccacagtgtccaaccccgggcattccctcttctccatgggaccaagaagcaggaaggaagaggggagaaagggagtgacaggggtctgggagggcgaggccattacttagggcttgcaggtagtcctccatgttcttctgcgagacaaagcggtagtagccagtgaggttgggaggcattgtgtggatgaaggtttcaggagaatgcaggagacagggtgaggaaggagggggtgttgtctggcaggtgaggctgagagattccagccagctccacacacagagacaggatgtgtaatggccgggttaccagggctttttataaggctggggccctgttgcaataagagtccctaccagacttcttccctccccgcatggtgagtttgggggtggtgtctccagcctgaaggaggggcagggatttggcaaagttgcgcctgaccttggcttttcctgaggaaggaacctggagcaggatccttcctgaggaaggaacctggagcaggatctggggctgtcagtcatccaaaactcagccatccaaaggtcagtgttggcctccacctcatttctggcaggcttgggaaccgtcccagggcctgaggggcagtctttcctgggagacacctgaggctggtctggctgtgtgaggtggagatgagttccaacaatatcctgagatcctgggactgagtgatgttggaagatgtgaggggagggggtgaggatggccagctgccaccatgaagagcaccctgtaggcctggctctcagagctccctcaggtagtgtgctcaactgggaccccaaagtggcattccagactcttggtcctaaagagccattaggagggaggtggagcccgaggggtgctgagttcaaagtccggaacagacagcctgagaggagtttgttggctattctggagaattttattctttttggcttgggacccagggggttttctctccctctgagtcatcgatgagaccgtaacccccagtccccagccctaggacagcccatgctttccagatgtatttctgtgaaggtggggtggaggcgcctaaataatattgtgccccgcccccagctgcccaattctctctcgaacctgccatcgtcccgggcttcagaatccactgggcttggttcatcatggtttaaggtgaaattcggggcgaaggaggcaggacaggtaggcaggaggaggcggccggtcccgacaggtgcgtgcgcgaggggtgcacgacgtcctgcccctccttgggtcccagagcctcgataccgccctgcggaccgccctgtggcttcctcgcagccctgggctacaaatgccaggatttctcaggctcagactgagggttttacttcacccttcccagagggcacgcagcacggatctgtggatggaaggggctgtggaaacaggttatggcagagttggggggcggggtgacgcggtgccacccctcctggccgccctcaggtcccgctgacgtctctcttccccaccccctggcttctggcttctttctccccacgtccctcttctttcccaccccctccgtggctctccagcttcctccccagcccccgcagttcctcggctcccccaaaattgcagccaggggaaggagccttgaaactctccagccccgacgccccagtctcattggctccctcccccgctgcagcacctggtccccccccctcccagtcacctgattggccggcggccccatcaatcgttgcccggctgtgctgacgtcatcctgcagtagcggggttggggtgggagtgagagagtgaggacgctgggctgggggaaacgggaagccgctgcaagtccaccgcctcagctacccagattgggatctgcccaggcccgctttatggactagtgtgggcggcaggctcctttccgtccctgccctgctgtaccccgctccttggagaccccctgtatccctcc

SEQ ID NO: 8905 - DNA, 2300 bp, Homo sapien
gagaatagagaccccaggacgggaatggagaccaaatgggagcaagatgaccagcaagagaaacgcatgggtagagatggaccagaaaggaagatgtagctgggggaagagaaagagaggagacggagcaggtctgagaacggatgggaaggagggtgatcagaagagggccagacacctgtcaggtgccagggagcctcgacacctccttcccacccccaccccgcacggcgctgcccgacgcccctctttcggtacccccacccccacctcactcacctttgttacaggagcaggacgcgagcagagaggccagcagaaggggcagcagcaggagggtcatggtgcggcgtggggcagggcagggccaggcgtttgcctcccctgggagcctccagcctgcggattccaccttgcgggagggatacagggggtctccaaggagcggggtacagcagggcagggacggaaaggagcctgccgcccacactagtccataaagcgggcctgggcagatcccaatctgggtagctgaggcggtggacttgcagcggcttcccgtttcccccagcccagcgtcctcactctctcactcccaccccaaccccgctactgcaggatgacgtcagcacagccgggcaacgattgatggggccgccggccaatcaggtgactgggagggggggggaccaggtgctgcagcgggggagggagccaatgagactggggcgtcggggctggagagtttcaaggctccttcccctggctgcaattttgggggagccgaggaactgcgggggctggggaggaagctggagagccacggagggggtgggaaagaagagggacgtggggagaaagaagccagaagccagggggtggggaagagagacgtcagcgggacctgagggcggccaggaggggtggcaccgcgtcaccccgccccccaactctgccataacctgtttccacagccccttccatccacagatccgtgctgcgtgccctctgggaagggtgaagtaaaaccctcagtctgagcctgagaaatcctggcatttgtagcccagggctgcgaggaagccacagggcggtccgcagggcggtatcgaggctctgggacccaaggaggggcaggacgtcgtgcacccctcgcgcacgcacctgtcgggaccggccgcctcctcctgcctacctgtcctgcctccttcgccccgaatttcaccttaaaccatgatgaaccaagcccagtggattctgaagcccgggacgatggcaggttcgagagagaattgggcagctgggggcggggcacaatattatttaggcgcctccaccccaccttcacagaaatacatctggaaagcatgggctgtcctagggctggggactgggggttacggtctcatcgatgactcagagggagagaaaaccccctgggtcccaagccaaaaagaataaaattctccagaatagccaacaaactcctctcaggctgtctgttccggactttgaactcagcacccctcgggctccacctccctcctaatggctctttaggaccaagagtctggaatgccactttggggtcccagttgagcacactacctgagggagctctgagagccaggcctacagggtgctcttcatggtggcagctggccatcctcaccccctcccctcacatcttccaacatcactcagtcccaggatctcaggatattgttggaactcatctccacctcacacagccagaccagcctcaggtgtctcccaggaaagactgcccctcaggccctgggacggttcccaagcctgccagaaatgaggtggaggccaacactgacctttggatggctgagttttggatgactgacagccccagatcctgctccaggttccttcctcaggaaggatcctgctccaggttccttcctcaggaaaagccaaggtcaggcgcaactttgccaaatccctgcccctccttcaggctggagacaccacccccaaactcaccatgcggggagggaagaagtctggtagggactcttattgcaacagggccccagccttataaaaagccctggtaacccggccattacacatcctgtctctgtgtgtggagctggctggaatctctcagcctcacctgccagacaacaccccctccttcctcaccctgtctcctgcattctcctgaaaccttcatccacacaatgcctcccaacctcactggctactaccgctttgtctcgcagaagaacatggaggactacctgcaagccctaagtaatggcctc

SEQ ID NO: 8906 - DNA, 2300 bp, Homo sapien
taaggccccaggtgagagacttcttgttctaggagcccagcaccttctcccctgagtgtccagctgccctgcatgggctggtctggcgggcagcgtttctcacccctcagcccctggaggagtgtctgttcacggcaccctttcacctcccctcggtgaagcccagtctccccatcctttgttctgagctcatgtccaggctgatcaagcttccctcagatttcagttgagagcagcagttttcctttgcttcttctcttattttgacctgaataggacacagagttcgtagcttccctgagggcactggtgattggcatgcctgagctgacaggccattcacggcataaaaccctttccatatgccttttctgactccgcaaggtgctccctccctttcacctacaaatctcgagtggtgttgcagaactgtggtttcacaatatcaaaccattctaaacatgcagaagcagtgagaggtacgatctcctccagtggcacggaggcccattgctctaaatctcctaagtgcactagagaaagagagatgaatgtgaactggaaccagggtaaactggaacagtcaggggagattttgtggcacatgtagagtttgcatttggacctgaactgtaaaagggatttttggatgggtgtgagagagaatgggaatttgagaaccgggggtagataggtggttaagagtgtttatggttagagagaataaggttggttgagaagagcaagccggatgatgagggtattatgtatctactcatatcaaattttgatgactgccagaatcacctggggagctttaaaaactctcggcacctaaattataccctagaatgtctagggggtgggagccacgtgtcagtggtttttaaaaatcccatgtaatctttaaaagtttgggaataattttcctcttttgtttcctacaagtatctgaagctttgcagaaagagttacaaagcaataggacaaaaagaaaatgaatgaggaagtaaggaggaacaggtaatgatgaaataaggatccaatgaagccagggaataaagtcagctcataacatgcgtactatgagatgctatgcagttgctaccacgggccagaattttgaccctgagcttcttcaaagctaaagcaaaaggaaacctgagcagttctgagagccgtgataggagccaaacgctatttcatgaaaagccctgggagtgcggggggcagaaagaaatctctcccaaggctctttgcaaagagagcaccgtgtggggccatggacagggctttccactgtcctcgcaatcccatggaccatttgctaagtcaccccttaatgttggctctggaggtcattcaaggccagaattaactgctcagatctcatgtagcaagaaaagctgaacgcacttcttaaattcttgatttttatctgtagctgatttaaaaatcctcccatctccccgggctcctgactcatcttaaactaattaaccagacttgtttgcttgtagatagagtgtctgcattttgtctttcctgtggtcatttcttattgtcctggcaatcaacttgtcatttccttcattaggccaggagctcggagggacactgcattgattagggcgcaaaccagctttagctcgtcatcgttgtgtgcttagaggaagttcacctgctttggcctccactctgagggtggggtcaccaccccttctggagcctgggcttagccactgggcccatctgccagtgaaggcactgcccctggctctggtctgttgacgtggagacctgagagacactatttcctgcagatgggcaggagagacagctctgtcccctcctcccttatcccccgttcccaggaagttgagaaatactgatccagccagtcctgtcttcaccttggaaccagtgtcgagggagtgtgccccagcagagtccgttctaattggctggtggcctcaagtgggctgtgggtcaggatggggaccaacttggcagacagccatcagggtggcctcagggaggtgtgtggcctgcccaggcagggcattctccacacacctagttggccctggagtgcgtggcagctgagtgtgctggctgctggggagaggggcgctgcagcagggtgtgggtgtgagtgtgaggagctcctgggccatgcgcttccctacgctctgctctgtctgttgacacatgagtctcaggctgtaggtaatttgcggacggggctggaatgcgatgtgtgtatttttctaggggcttgcttgtgtgactgctggtct

SEQ ID NO: 8907 - DNA, 2300 bp, Homo sapien
gcttgaaacaatgcctggcacacagtcaatgcaatgtgtgtctaaacatctattgaacttgaattcgtcaaacattaaagaataagtaaaaattatttttattttataaaaattactacttttatgaatagaacaagaatttaaagttgaacctggattaacaaaatctagggtttcaaatctagagcttcagtaaattaaatattaaacaccaaagtcactctattagccctttcccagcacctctggctgggactgtggaccaagttctgtgaatgattctatggcctaggagatcaaagatctccatggtttatcagtaagtcttctctaagactgggaagtaggtgcctagagttatgcctggattaaattttgacttcctagccatctgattttgcacaagtcttatctgtaaagtgggtctactaatatctatttaataggggtattaagaagattaaaaacattgagatacataaagtgttttacacaacacctggattttagtaaacatcagttattattattagcattcttccaagatctgcacacaaagtgagttacggctaatcagttgataaactcctagcagagcagaaggttatgtgtgttgtgatgtttaagtggtactgggaaactctggttgccttgaggttctgaaattctactgtatcagatgggttcctttaaacattgctctctctagggggtcctctttttaaaagtatgcaccttctggagggcatctcttcatccttgtgtggtttagtttatcaggtattttcctcacgatggcagcctgagaacaggggacgcccaagggctgggatttgtgtgctccggaagaaaacggggtgtagaagtggggcctctgaaagagggcgaaaaggcaaggaaaaggagaaatgttgcacagtcttatggtctgtcccctgccattctgttcccctgaggtgtcagagcagcttctctgtcttcccagggatgagtttacacagacattccctgtggccccctgaggcctccacctctgaaatctgcagaacagccaggaaacaagcccggcccatggcgccacctgctgcctgcctgcctccgctcatgcaccctgggctgggatggtacttctgttcgtctggcattattgcccttggtcatttaccggcagccctgggcccctccttgctcttctccatgacactaggactcccttggtcttgaagctgggtgagattatcagggtttgtttctcaatgactttgaggtttgacagcagagcacactctttggcagatgagggggcttgaggcttagtcttattccgtgattaaaagcatttcttgtatgtttgtcctttcccagcctggagtgatgggaataaggccactatgttgacttagcggaaggaagggctgactcactgttcaccttccctgtacgttaccagctcgaggtctcaggatgcgttggaccctattttggtctccggaatttgtcatcatgcagtgctattttccccattatgcagaggtggagagggattaaggcgggggcgggcccctgtctccatggagacagtgacgctaccccgctaggggttatttggaagcggggcaggcctaggaggctgaagaaggcttcggactggactccccagcccctggtgttagggcttttctctttcttgggcttgggaacattagccagccccattttagaggggaaaactgaggctcagaaagggcactgaatccccttaggtcacaatgcgcccaagggaagaggcaggatcgactgagcctaggatctcgcgtcttcggctttcccccagagcctgggaagcccttcttagctccactcttctttgagctttccgtcaaacaaatcctagggcccgtggccttttcgagcgctcctaaaggcgactctccaagacccgctctctaaggtgctcttcccctttaagactcacggctcttcccgtcaggctgcgtcgcagtcttaaggccccgccttttcagacagcttccgctgggcctgggccgctgcggggcggtcacggcccctttaagcctgagccccgccccctggctccccgccccctcttctcccctcccccaagccagcacctggtgccccggcgggtcgtgcggcgcggcgctccgcggtgagcgcctgaccccgagggggcccggggccgcgtccctgggccctccccacccttgcggtggcctcgcgggtcccaggggcggggctggagcggcagcagggccggggagatgggcggtggggagcgc

SEQ ID NO: 8908 - DNA, 2300 bp, Homo sapien
tgggttcctttaaacattgctctctctagggggtcctctttttaaaagtatgcaccttctggagggcatctcttcatccttgtgtggtttagtttatcaggtattttcctcacgatggcagcctgagaacaggggacgcccaagggctgggatttgtgtgctccggaagaaaacggggtgtagaagtggggcctctgaaagagggcgaaaaggcaaggaaaaggagaaatgttgcacagtcttatggtctgtcccctgccattctgttcccctgaggtgtcagagcagcttctctgtcttcccagggatgagtttacacagacattccctgtggccccctgaggcctccacctctgaaatctgcagaacagccaggaaacaagcccggcccatggcgccacctgctgcctgcctgcctccgctcatgcaccctgggctgggatggtacttctgttcgtctggcattattgcccttggtcatttaccggcagccctgggcccctccttgctcttctccatgacactaggactcccttggtcttgaagctgggtgagattatcagggtttgtttctcaatgactttgaggtttgacagcagagcacactctttggcagatgagggggcttgaggcttagtcttattccgtgattaaaagcatttcttgtatgtttgtcctttcccagcctggagtgatgggaataaggccactatgttgacttagcggaaggaagggctgactcactgttcaccttccctgtacgttaccagctcgaggtctcaggatgcgttggaccctattttggtctccggaatttgtcatcatgcagtgctattttccccattatgcagaggtggagagggattaaggcgggggcgggcccctgtctccatggagacagtgacgctaccccgctaggggttatttggaagcggggcaggcctaggaggctgaagaaggcttcggactggactccccagcccctggtgttagggcttttctctttcttgggcttgggaacattagccagccccattttagaggggaaaactgaggctcagaaagggcactgaatccccttaggtcacaatgcgcccaagggaagaggcaggatcgactgagcctaggatctcgcgtcttcggctttcccccagagcctgggaagcccttcttagctccactcttctttgagctttccgtcaaacaaatcctagggcccgtggccttttcgagcgctcctaaaggcgactctccaagacccgctctctaaggtgctcttcccctttaagactcacggctcttcccgtcaggctgcgtcgcagtcttaaggccccgccttttcagacagcttccgctgggcctgggccgctgcggggcggtcacggcccctttaagcctgagccccgccccctggctccccgccccctcttctcccctcccccaagccagcacctggtgccccggcgggtcgtgcggcgcggcgctccgcggtgagcgcctgaccccgagggggcccggggccgcgtccctgggccctccccacccttgcggtggcctcgcgggtcccaggggcggggctggagcggcagcagggccggggagatgggcggtggggagcgcgggagggaccgggccgagccgggggaagggctccggtgacttaaggggagggaatgctcctctgccgtgctcaccgcgtgctggggctgcgcggggctaggtatggtcgggctgttttcccactgtcccttcttcgggcagtgtcgccgtccagcctggttgttgaagcgtccccgtggtcccccggggtccaggcccctttgtggaggcagctgctggcccccagcccatgggaccgtagtcgcggaggcctctgcagaggcgcaggctggaagcggtggcctttgaggggggcggcaggagagagtaccgacctccctcgaactcctggcagaggtgggggtcgcagcaaaagcactggggtggagggcggccagtgtggggcagacgcctgtgtgccttcctcagatacgggcagagttgtggatgtgagaagggtctggcttgggtacctcagttccaaacctcctgtgtccatcagagagctggcggtcaccatggcaatgcgggagctggtggaggccgaatgcgggggtgccaacccgctcatgaagctcgccgggcacttcacccaggacaaggcccttcggcaggagggattgaggcctggcccctggccccccggagccccggcctctgaggcagtgagtgttcttgaggtggaaagcccaggtgcagcc

SEQ ID NO: 8909 - DNA, 2300 bp, Homo sapien
agaaaaatagtatgatatcacatagacatttaataatgtgaatttttatttttaactaaaacaatagaaaagaagctgataccatttatagtttttaattagataaagaagtattacattgttatataattagatatattctcaaattagtaggcaatattatttgtgtttcacagactatgccacagcacactcaaagctaccaaactgccctaaaaagataaagtaacctttctagaatgagattcatttcattttatgtcaatactgctaaaaatttccttcaaaagctgactctttcaattaggctcagaattaatttctgatttaattcttcgtttcctcttttttaaaaagttttttatttccataggtttttagggaacagatggtaatagttacatgagtaagttctttagttttgatttgtgagattttgatgcactcatcacccaagcagtatacactgaacccaatttgtagtcttttcttcctcaaacccctcgtaccctttcccctgagtcctcaaagtccattgtattattcttatgtctttgcatcgtcatagcttagccccccacttatgagtgagaacatacaatatttggttttccattcctgagttacttcacttagaataatagtcttcaattccatccatgttgctgtgaatgccattaattcattcctctttatggctgagtagtattccatcatgtgtatatatatacacacatacatgtgtgtatacgcatatacacacatacatgtatgtatacgcgtatacacacatacatgtatgtatacgtgtatacatacatatatgtatgtatatgtgtatacacacacacacacacacacacacacaccacagtttctttatccacttgttgattgatgggcatttgggctggttccatatttttgcaattgcgatttatgctgctataaacatgcgtgtgcaagtatctttttcagataatgacttattttcctctgggtagatacctagtagtgggattgctggatcaaatggtagctctgcttttagttctttaaagaatctccactgtttttcatagcggttgtactagttacattcccaccagcagtgtagaagtgttccctttccactgcatccatgaaaactctattcttttttgattttttggttatggccattcttgcaggagtaaagtggcattgcattgtggttttgatttgcattttcctgatcattagtgatgatgagcatttttcattaaaaaaaaaaaaacttacctactcctcttctcacatacagtgaattttgtgttttcttttcccgagctccaatttctttttagaattacttcatttggcatcactaataggcaagtttctccatttttctggatttggtaatatcacagccctatgcagtttttccttgacttttcattaaattatatcacctcttcctaacattctctttagtatctaacatgtaatatgtaattcttcaaatattcaggcaagaattagggccattaagtaacactattttttatcctaagtctctgataagattttgtaagtaaaactatatccttgctttgtaagccagaaatgttcatggattgaaacataccttggtgtacttttgttattttattttttatccaataaaaaggaaaattaagtttgaaggaaagtaaaaaataaaattaaacactggtgaagccgggacctaaacaatctctcaacttttggccactggtctatgttagtgtacaggaatggataagaatctttaatgtctcacatagagtgcttctctaaaatcattgtggtatttggtttcagatgcatcggatatggagctgaggcttgtgggtggaagcagcaggtgtgctggaaaagttgaggtgaatgtccagggtgccgtgggaattctgtgtgctaatggctggggaatgaacattgctgaagttgtttgcaggcaacttgaatgtgggtctgcaatcagggtctccagagagcctcatttcacagaaagaacattacacatcttaatgtcgaattctggctgcactggaggggaagcctctctctgggattgtatacgatgggagtggaaacagactgcgtgtcatttaaatatggaagcaagtttgatctgctcaggtaatttctggacaaagataaacacatttatttaattatttatttttgcacttatttaatacgtgtttatgaagtggctatttaacagtattaggtcaaaagtaaatgaactagataaaagtaatcctaccctc

SEQ ID NO: 8910 - DNA, 2300 bp, Homo sapien
agtgagggctctcttgctggcttttagacatccactttttgtctgtgtcctcacgtggcctttcttctgcacatttgtggaaagagagagaacaagctctggtgtcccttcttgtaaggacatcaatcctattggattagggcctcacccttataatctcaagtaaccttaattacctccttaaaggccctgtcttgaaacatagtcacactggggggttattgctttaatctataaattttgaggagacacaattcagtccatggaatagcagtggccatgggagcagatccttcctcagtcaagcttccaggtgagaccacagccccagtttacaatgtaattatagccctgtgtgagatcttgaagcagaatatccagctatttccccaaagagatagttatcacatcccttatgcttttttatcataaaggcaagaaagggactcatttagattagaacctgctacgaaatatttgagagtgagagaacttgggtgtctagaaatgggagaaactcaaaacagtagcagagatattgtggagacatttattctatcaaagaatagcaataatcaggttttcattgttttctattttcagttcccacttctgtgagatcattttatcagcagttagtttgctatggattctgttagcatgaaagcgtttccggtcatactgtattttaaaaatttcaggaaattttctcagcatggctgagaaataatatactaaaacaagtttcagcatcctctttttgtgtcttccattcttccatcatgtgacttatcctagttagtgaattacatttccccaaagacatttcatctcaagctttccaagaaaaaattctccctgttttcctcctgatttcttctgactttgggcacctacctcagttctgagaagtaagaaagagactatattttgagaatggcactttatcatttcagaggcacatctcgctcatatctagcaagctccgatgtttaattggacttcaaaatacatttggcattaattgcagcagaattttatttaacctctgttatataaagccttgtcaggtatctaagttgaaaagggacaagaaaaaataaagttcttgaatttatcaatggagatttataaggacttatttatctaaagtatttagatattttatatctcattttaatttctgtatatattagcttcttttttactaataggcctactcgacatggaagtataggacgaaaaatcctggcaaacactctgatgggctcacttgggtcattggcttttccttgaacttgtcactgtaatcggggagacgtgggcgtgtgaaaagatgtgatctaccattcttaacatatcaaggaagggaaaaagcaattttcccaaagaagcagggcaggacatacaggcctatccgaacacagaacaatcactatgagctcagaagccactcatggttttctacctaatggttgaaatcatttaaatgaatgttttccaaactcatttgatgactaagctttattttcttttacataatcattaacaataaaaaactaattttaaaggactccattttgttaaacatttttatagacatgaaattttttcaaatatgtttatctgtgctcatgtttcatcagcaaagctttcgtagactagccagttttcagcaatgtaacctcttctgatccttttagcataactggttgaaatatgtatgctaaagtaaacaaacctgatgatatattttatcttttagataaatatctataaaactgtgctgacaagatcacatttatggaacaaaaatttttaaatgtgaaacatgagtctttttgaaaatttagagtggcaatttacagttccctttattctgtgagactttccaggcatattatttaacttcctttgttttccatatcctaacgtgataaggaagtagcaaagaaaaaacaacctcagcttttataatgacttcccctttggaaaactatgaactcaattttacagtattgtcatttccaaatagcagatctgttttcacctcatgagcagttctgagattatatataagaggacccaggagttacatcaggactcaggaagagatagacccataatgatgctgcctcaaaactcgtggcatattggtaaggttttgcttttattttgctctgccatttgggagatggtgggtatactaagaatatgtgtaacaacaaacagatataaatattatgtagtaaggtaaaaagaaaacaggacatgagaaatataaaaaaattgaaagtttt

SEQ ID NO: 8911 - DNA, 2300 bp, Homo sapien
tctgacaaagggttaatatccagaatctacaatgacctcaaacaaatttacaagaaaaaaacaaacaaccccatcaaaaattggcgaaggatatgaacagatacttctcaaaagaagacatttatgcagccaaaaaacacatgaaaaaatgctcatcatcactggccatcagagaaatgcaaaccaaaaccacaacgagataccatctcacaccagttagaatggtgatcattaaaaagtcaggaaacaataggtgctggagaggatgtggagaaataggcatgcttttacactgttggtgggactgtaaactaattcaaccattgtggaagtcagtgtggcaattcctcagggatctagaactagaaataccatttgacccagccatcccatttctgggtatatacccaaaggattataaatcatgctgctataaagacacatgcacacgtacgtttatagcggcactactcgcaatagcaaagacttggaaccaacccaaatgtccatcaatgatagactggattaagaaaatgtggcacatatataccatggaatactatgcagccataaaaaatgatgagttcatgtcctttgtagggacatggatgaaactggaaaccatcattctcagcaaaccatcgcaaggacaaaaaaccaaacaccacatgttctcactcataggtgggaattgaacaatgagaacacatggacacaggaaggggaacatcccactccagggacggttgtggggtcaggggaggggggagggataacattaggagatatacctaatgctaaatgacgagttaatgggtgcagcacaccagcattgcacatgtatacatacgtaacaaacctgcatgttgtgcacatgtatcctaaaacttaaagtataataataatttaaaaaaaggaaaaaaatatatatataattgacaaccctcataagtacaggctatcatgagtgcatattttctggggtctttcagcgttagagttatttctcctagtgaagggaggtttaactgagaaataaagtatacgtgagtgagagttatcttagagaaaggtacgggtagggaggcagtaaacacagaaggaacaatatgtatgacataccatgaggcagggagagatttggcatgcctgagaagtggaagaaaactggggtgcctttgttgactgggttctagtgaatgtctctctggaaggctggagttgctctttaattccccatttcaggcccatcactaacacctgacaatatgtatgccatgatgaactattagtagttcttttgagcttatatgtttttatatacaaatattcatttgtatgtgctattttttatgccttaaactcctttatcatttgtccctttggcaatgtttttctcatcttttaggacacaatttaagcctgtcctcagagaaaatagttttctgactgttcattcctttctctcaatagataggactactttgtccattatttttaacactgcactttagctttatgttcattgttgttatcatatgtgtttctcttacttgaatctgagttatatagagctaaaatcatgtgttgctaatttttgtttcaccatttgtaatatcagtaatagtcatggctaattctcttggtgtacttcatcccattagaaaagaaatgacaaatgctgtgtctcaacaacttacacaaaattactcattagacacatttgattatggaaataaaattaaaagtgcatatgataaaatgttatttaattatgttttgcctgttttgctttagttttttacataatttttctacatgacaattagtaattttttgtgtcttatatatttgtccaaaatgaagttcaaaaatgtaaaatatttaattcagcaacagcagcatatgagttagtatttcctctaatttttcgaaatctgtgggaagtgtttcccaatttcctttggttgtttcatgtgctatattgaagaaaacatgagtatgaaatggaacctcagctctttcaatgacttccctttttgagttgactccgcctccatatgtagccttttcattttcatgaaagtgaagtgatttttagaattcttagttgttttctttagaagaacatttctagggaataatacaagaagatttaggaatcattgaagttataaatctttggaatgagcaaactcagaatggtgctacttgaagactctggatctgctggtaaaagcttctcatttattctacatttcccctttaatggggtatgtaattattatgacagtcaatgg

SEQ ID NO: 8912 - DNA, 2300 bp, Homo sapien
cacttaagttcatatgtttaacagattccagggatcaggacatggatatcgttgatggctattatcttacctttttttttttttctttttttttttagacgtagtctcactctgttgcccaggctgcagtgcaatggtgagatctcggctaactgcaaacttccctcctgggttcgagcaattctcatgcctcagccttccgagaagctgggattacagtcacctgccaccacacccagctgacttttatatttttaggagactgggttttgccatgttggccagggtggtcttgaactcctgacctcaggtgatcctcccatctctgcctctcatagtgctgggattacaggcgcgagccactgcgcctggcctaacctacttttattctacaatgattctactcttacctaacttagaaaaacttggtctctgaagggcctttattgatgatgtgggatttctgccccttcttcaaaacactggtctgcccctgtcgaaacacctgctttatctcatggaggctccaggttgactttcataactaagtaaagtcttgtatgtaggattcgggtttcaggttcatggggccttgagattcaaagttcaggagttctagatttgagacactagagggagacttaggccttgaaaaagtgacctcaattctaggagtaagtgctgagactcagaggaatttttggcttgaacttgacccagggttcaggcaacagagagcaatggcatagggaagtatggcatttactttttcaagggggataaaaaagcagaagtggctgggagaggtggctcacgcctgtaatcctagcattttgggaagctgaggcgggtggatcacctgaggtcaggagtttgagaccagcctggccaacatggagaaaccctgtctctactaaaaatataaaaattagcctggtgtggtggtgggtgcctgtaatccctgctacttgggaggctgaggcaggagaatcacttgaacctgggaggcagaggttgcagtgagccgagatcgcgccattgcacttcagcctgggtgacaagagcgaaactctgtctcaaaaaaaaaaaaaaagggcagaagtggacttggccacacacttaatcttagattcaaggatgaagagagcaccaaagacctgtacacaaattagctgactcagaggccaaggtccttctcattttgtatctaatagctcccctcccctctccaacacggatgtaggacagagagcaaaatgagaggaagttggaaataggtgaataacagctgaaagccaaggccacagtgtgctcaccagataacataaaaattttcaagctatagttacagattaagtctctcttaactttatttttcctctcatctctccattaaagaatgatgcatcctaggctaggcacggtggctcatgcctgtaatcccagcactttgggaggacgaggcgggtggatcacctgaggtcaagagttcaaaaacagcctgaccaacatggtgaaaccccgtctctactaaaaatacaaaaaattagccgggcgtggtgttgggcgcctgtaatcccagctactcgggaggctgaggcaggggaatcgcttgaacctgggaggcagaggttgcagtgagccaagattgtgccattgcactccagcctgggcgacaagagcaaaactccgtctcaaagaaaaaaaaaaagaatgatgcatccttgatgcagagtaggagataatgaaaaataaataaataaaacaaaacaaaacaaaaaagaatgatggatccaccttgccttaatctttatttaaagaaagagaaagtttaccaaattcagatgtcattgaagaactttggaatttggtacccagtgatccaccctacaaaattcatgtcatttgcatcataggctttctcatcactaaagatgcaaatccccacgataatgtccctctcagtcggccccctgtttgtacagacagctcagattcccataactgcctgagatgcgggaatgagtcatcctctgcccaagcaggtggcagtgggcacacctgaagcaacaaagtccaggaacaatcagcacaacttatgactccagaggaggaagtccagagacagagcaccatgacttctgagaaaggtaaaatggatccgggggcttggcaagtattcttgaacaatgcaagaatggtgtgtgtgtgtgtgtgtgtgtgtgtgtgtgtgtgtgtgtgtgtgtgtgtgtgtcctgctgattcttgcatctgtgggtgttttcaaacttccctattat

SEQ ID NO: 8913 - DNA, 2300 bp, Homo sapien
caggcgtggtggtgggcgcctgtaatcacagctactcggcaggctgaggcaggagaatcacttgaacctgggggggctgaggttgcagggagccgagatcacgccgttgcactccagcctgggtgacaagaaactccatcttaaaaaaaaaaaacttactggccgggcgcggaggctcacgcctgtaatcccagcactttgggaggccgaggcgggcggatcacgaggtcacgagattgagaccgtcctggctaacacagtgaaaccccgtctctactaaaaatacaaaaactaaggcgggcttggttgcaggtgcctgtagtcccagctactcgggaggctgaggaaggagaatggcctgaacccgggaggtagagcttgcagtgagccgagatcacgccactgcactccagcctgggcgacagagcgagactccgtctcaaaacgaaaaaaaataaaaaataaaacttactataaatttatgataatcataacaatgtggtgtaaacataataatggacatatagatcaatggaatgagaggattccaaaatgaattcatgcacatatatggccaattagtttttgtttgtttgtttgtttgtttgtttgtttgttttgagatggagtcgcactctgttacccaggctggagtgcagtggcacgatcttggcttgctgcaacctttgcttcctgggttcaagcgattttcccgcctcagtctcccgagtagctgagactacaggcacaggccaacacgctaggctatttttgtatttttagtagagacagggtttcactatgttggccaggctggtctcaaacttctgacctcaagtgatccacctgccttggcctcccaaagtgctgggattacaggcatgagccaccgcacccagtttttttttgtttgtttgtttgttttttgagatggagttgcactctgtcacccaggctggagtgtagtggaacgatcttggcttactgcaacctccaccctctggattcaagcgattctcctgccttagcctcctgaatagctgggattacaggtgcgcaccaccacacccagctaatttttgtatttttagtagaaatgtagtttcaccgtgttggccatgctggtctcgaactctggacctcaagtgatccacctacctcggcctcccaaagtgctgggattgcaggcctaagccattgcgcctagctgccaattgattttgtattttttgtattttttattttttgagactgagttttgctctttcacccaggctggagtgaagtggctagatcttggctcactgcaacccccgccccccagattgaagagattctctgcttcagcctcccgagtagctggaattacaggcacctgccaccacgcctggttaatttttgtattttatttttttgagacggagtttcactcttgttgcccaggctagagtgcaaaggctcgatctcggctcaccacaacctccacctcccaggttcaagcaattctcccacctcagcctcccaagttgctgggattacgggcatgcaccaacatgcccggctaatttttgcatttttagtagagacagggtttcaccatgttggtcaggctggtctcatactcccgacctcagatgatctgcccgcctcggcctcccaacatgctgggattacaggcgtgagctacagtgcccagcctaatttttgtatttttagtagagaagaggtttcatcatgttggccaggctggtctcgaactcctgacctcaggtgatccacccgcttctgccttccaaagtgctaggattacaggtgtgagccacagtgtccagcctgccaattggtttttaaataaaggtgccaagataatccaatgggaaaagtgtatacacacacacacacacacacacacatacacatatatgtgtttctttctttcttttttgagatggagtctcactctgtcacccagcctggagtactttggcgagatcttggctcactgtaacctctgccttccgggttcaaggacttttcctgtctcagcctcccgagtagttgggattacaggcatgcaccaccacgcccggctaatttttgtatttttaatagagacagttttaccacgttggccaggttggtcttgaactcctgaccttaagtagtctgtccgcctcggtttcccaaagtgttaggattacaagcgtgagccatggtgcttggtcagaaaagtatatattttttaaaacaaatgatgctataaaactaaatatccatatgagggaaaaataatgcagata

SEQ ID NO: 8914 - DNA, 2300 bp, Homo sapien
gtgctaggattacaggcatgagccaccgcgcccagcaacgaagaatattttattcccattttacacttgagtggcttgctcatggtcacataactaatcagtagtggaaccagaatttgaaccagttagtctgatttctgaccttaagtcaggaaagtcaaataaagaaaacccaaatacaacctactcttattgttgaaaaaaggttaagattgtagattaatttaaaagtgttaaataagatagaaacaggagataagagaagtgggacctgcgagcagtggcacctgcctgtagttctagttacttggaggctgaggcagaagattcccttgatccagtaattcaaggccagcctgggcaacacagtgagacactccccaaacctagtctctaaaaaaaaaaaagaaaaaaaagaaatggggaagacctcactatataaaagagtgagacctctagaaatagcaaccaattaattccttaatttattttttgcacagatacttatcaaatgtctgctacctgccggacactttcttcaccagtggagatactttggggaaaaagacacactgaagatacttaggcaaagagacacagttctgatcctcaaggtgtgagttgtctgaaaaggaaggaggcaaacacagtaaaatgcactgcagaaactgtaatggagggccgggtgcagtggctcacacctataatcccaacactttgggaggccgaggtgggtggattacctgaggtcaggagtttgagaccagcctgaccgacatggagaaaccccgtctctactaaaaatacaaaagtagccgggcatggtagcgcatgcctgtaatcccagctactagggaggctgaggcaggagaattgcttgaacctgggaggcagaggttgtggtgagctgagatcgtgccattgcactgcagccagggcaacaagagcgaaactccgtctcaaaaaaaacaaaaaaacaaaaaaactgtaatggatgcccaagtatggctcagtgggagaaagaagtatctcaatctattttggtgagtcgaaactgtggaagtagaggtgacctttgaacttggtctgtgtaaaggctctgagatgaaatgagctcacagagctacaaataggtcaatgtaattagagcatccacactaaggatggtgggtggtgagaaacaaggctggcggctgggtgtagtggctcatgcctacaatcccagcactttgggaggccgaggtgggaagactgcttgagaccaggagttcaagaccagtctggacaacatggcaaggccccatctctgtaaaaaataaaacaattagctggaagtggtgccctatgcctgtagtctcaactactccagaggctgaggtgggatgatctcttgagctcagggggtcgaggcttgcagtgagccaagatcaggccactgcactccagcctgggcaacagagcgagaccctgtctcaaaaataaataaatacataaataaaaataaaaataaaaataaaataatgaaatctacttgagtatttgtctaatccaggggtgtccaatcttttggcttccctgggtcacattggaagaagaagaattgttttgggccacacgtaaaatatactaacactaatgatagctgatgagcttaaaaaaatcacaagaaagtttcataatgttttacggaagtttatgaatctgtgtggggctgcattcaaagccatcgtgagcctcatgtgaccctccggccgcaggttggacaagcttggtctatgtagatgattaattacaagtctatgaattattcactgctctattcctagcacctatctcagcaccgtgcacataatagatgcttagtaactgtttgttaaatgaataaatgcatgtctccttttcactctgtctactgctgacaacctcacattgttgtagaatttatgtccatgcattggtaatctttgttctgtgaactttttcctggaagagtagagcaagagaagagaaaaaaaaattccctcttcacatccaatggcctttgaggagctgggaagagagcaattcacacttgattatcttacatcagataaattagcagcctctgaattgttgggcagtctggcagtggagctctccccggtctgacagccactccagaggccatgcttcgtttcttgccagatttggctttcagcttcctgttaattctggctttgggccaggcagtccaatttcaagaatatgtctttctccaatttctgggcttagataaggcgccttcaccccagaagttccaa

SEQ ID NO: 8915 - DNA, 2300 bp, Homo sapien
tttgcttcttttcttttttatttgtcttttttttttttttttgagactgagtcttgctctgtcacccaggttggagtgcagtggcacgatcttggctcaccgcaacctccacctcctagattcaagtgattctcctgccccaacctcttgggtagctgtgattacaggtggttgccaccatgcccggctaattgttgtatttattttgttctgagatggagtcttgctctgttgcccagtctggagtgcagtggcatgatctcggctcactgcaacctgcacctcctgggttcaagcaattcttctgcctcagcctcctgagtagctgggactacaggcgcctgccactacgctcagctaaatttttgtatttttagtagagatggggtttcactgtgttaggcaggatggtcttgatctcctgaccttgtgatccgcccacttcggcctcccaaagtgctgggattacaggcgtgagccactgtgcctggcctaatttttgtatttttagtggagacagtgtttcaccatgttggccaggttagtcccgaactcctggcttcaagcaatccacctgccttagcctcccaaagtgctgggattacaggcgtgagccactgtgcccagcctaggttttttacaaatgagagtctatttcagccctttttgttatctcacctcctaatcctaaaccccctgcaatgggatttttttgtatttatctctccagtgaaattcttgcggactgattatcagagattccccaggcaagagggagattagccaagagctgaacaacagaagtagaaagttcacagtgccgtaaagcagggctgcttaacttgagcacccatcagaatcacctggggatcacttctgggtcttctggctaaatgcagaattgcctgggaggcttgttaaagcattaccactgggcgccagtctttgattcagtagggctggtttggagctcagaatttgtatatctaagttaactaggtgcttgttgtaaactgcacttttttttttttcccaagaggcagggtcctgccctgtctaccaggctggagtgcagtggcacgatcataggtcactgcagcctttaactgctgggtgattaagcgatcctggagaccacacttttgagaatcacttgcataaagtgttgggacatgatctatgcctatggctgctcattctctatgaaaatatttcttaatcataacttcaatttttgctttttaccaaacccaaacaaggttgcctttgagtattttctcgtggtttccacctagagagggaatgggggaacgtgcgtatttgaataagacgggaaaaagatgagaggggcagctggggacttgttcttccacctcctgcagacaatcagtggttaaatgttgttgtgctttgctacaaatacaagcatttttttgtggggagggagtagcaatttgtaaggttagttaatttcagctgctcagaaatgttaggtactgtttatagtttataaagcaaattaacaaataaaaaatacatgtccctaaaatatcaagctatgaaagtgttcataacagatacttcttcattattcctctcttcttagtagcagcaaaggtttaagatgattgaagcaaggaaaacttaaaggaaactttctcagcttaattgggagtttatgggcagtggtggtggtggggcgggggcggtaaaaactgccattctcctctgcactagaacacttaagcccagttcacaaaacagaagccatctccaggagtagagtttgggaaaaaaaaaaaaaaaaaaaaacaagaaaaaaacaacttatatgtaaggcaacctcagggagacagaaccacaaaaagaggattttaataaattttctagcagatatgacatccgacagattattttaatgcaaagcagatgaagaactaccctatgagtctaaactacacccattcacctttaatcatttggatcccttaatcctctaatcatgggatcattaacattcaaatatcctggaagattggcttatctgtattttaaaaggaagccggacctatagtttacgtcagttctttgaccattcgttggagctccggttttcagcctctttccgggctacctggtagcaatttgaggctctgtcatcagtttctgctacgtttcaaagatcctggagaagcctagtgttgtgtcaagacgccgatggacccatcacagtttaatccaacctacatcccagggtctccacaaatgctcaccgaagaaaattcccgggacgattcagg

SEQ ID NO: 8916 - DNA, 2300 bp, Homo sapien
cctcaagctaatagatttcacttccctgaaggcccacaaaatcttttttttctcttttttttttcgttgacacagaatctcactctgtcacccaggctggagtgaagtggtacgattacggctcactgcaatccctgcctcccaaattccagtgattctcgtgcctcagcctcctgagtagccgaaattacagacgtgtgccaccatgcttggctaattttttggatttttagtagagatggggtttcactatgttggccaggctagtcttgaactcctggcctgaagcaatccgcccacctcagcctcccaaagtgctgagattataggcacgagccactacacctggccacaaaattctttaaagaagccaatcccatcctccctcaagagccaaggggccacctcaccctcttgttacagcagatcctgcctcccacagtcaccctgctcccaagtgcaacctctgtctgaccctgcatggtgtgcggtgccctcctgcctcaggccgtgagtacatgcagctgaactgctgtcagtcttatctgtccagtgtcgggtgttgtgtgtccagccacccataaccctgggttgggactccctccctcaccaaccgggggaagaagtagtgagcaaaccatctaccaattcttatctagatttatcctcttcagctgtagcttttgcaatactctggtcatactcaaagcattctgctgggatgtcacctgagctgggcctacatgcaattctgcttttcttctgagaaaataatttgtcattctttctgcttttataatttgttctattttaaattatttttctcatttttgcctttgctcctttcttctcagcattgtatactcaaaggaataccctcatactctacattttaatccaagacagaggaaagcaacagggagaacccctgaggcaggggcagagggaggttcagggaactgtaaatgggaggtagacaagagaccaaacaggactttaagttgtttcagcaagtatacagcttagaaaggatctcattggtctgggtcctaaaatatctcaaaggatggctgctaactcaaaacttttttttttttgagactgagtcttgctctgtcacccagggtggagtgcagtggcacgatctcggctcactgtaagctccgcctcccgggttcaagcaattttcctgcctcagcctcctgagtagctgggactacaggcatgcaccaccacacctggctaatttttgtatttttagtagaaacggggtttcaccatgttggccaggatggtctcgatctcttgacctcgtgatccgcccacctcagcttcccaaagtgctgggattataggcatgagccaccgtgcccagctcaaaacttttttctcactactctacaattaaatctcagttgaactctgggaagattctggaatacctaggttctttctttctcagtgtctatttcaccagtagttgtaaccatccttcaaccaaacatctccatttgagtagcataggctataatggattttctctatttaagattactcagcagtggccgggcacgtggtggctcacaacggtaaccccaggactttgggaggctgtattagtccgttttcatactgctgataaagacatacctgagactgggcaatttacaaatgaaagaggcttttttttttttttttttggagatggagttttgctcttgttgcccaggctggagtgcaacggcaggaggtcaggagttcgagacaagcctggccagtatgatgaaaccctgtcactactaaaaatacaaaaattagctgggcatggtggcacatgcctgtagtcccagctgctcgggaggctgaggcaggagaatcgcttgaacccgcgaggcagaggtagtagtgagctgagattgcaccactatactccagcctgggtggcagagtgagaccctgtctagaaaaaaaaaaaaaaaaaaaaaaaaaagacaatcagacctgcaaccatgaactgtttttcatgtatttctcgatttccttgtttgtgtttccttatttctgaacatgatgtatgttttaaattgaaagctttagctcactgcagagtctcctaagtcacatctcttcctttgcaagagtaggcgaagaaggatctaagggcttggcttgtttgaaagaaccacaccccgaaagtaacatctttggagaaagtgatacaagagcttctgcacccacctgatagaggaagtccaaagggtgtgcgcacacacaatggtgcctgaagaagagcctcaaga

SEQ ID NO: 8917 - DNA, 2300 bp, Homo sapien
cgctgtttgggtccacggttcttttatgagctgtgataccgcggaagtctgtagcttcactcctgaagctagcaagaccacaagctcgccgagagaaacgagtaactctagacgtgccatcttaaaagctgtaacaccgcgagggtacgtggtttcattcttgaagtcagtgagaccaagaacctatcaattctggacacacgatctcggctcattgcaatctctgcctttgggttcaagtgattctcctgcttcagcctcctgagtagctaggattacaggctagtgccaccacactaagctaatttttgtatttttagcagagatggggtttcatcatgttgggcagcctggtcttaagctcctgacttcaggtgatccacctgccacacacttccaaagtgctgggattacaggtgtgagccactgtgcctggcctcttactggtttctttgcttgataatatgttgcaaatatataacattattcacatagaaatctttttctgaaggcgtaaatactgacatattggggaggtttctttttcttcttggtttttattttatcttagaggtagggtctttgtcactcaggctggagcaccgtggcttgattatagctcactgcagccctgatctctaaggctcaggtgattctcccacctcagcccctcaagtagttgggactacaggtacatgctaccatacctggctaatttttgtttgtttgtttgtttgtttttttttttttggtagagagaaggtctcactatgttgcccaggcctcaagtaatcctcctgcctttgccccacaaagtgctgggattacaggtgtgaggcattgtggccagccaataagttttaagtggaagagagtggttgtcttttaatgttatagctggagtgatttggtgatttcctggcacacaggtttttaaaagcatgtacacaatagggtttgttttcttgctactactggaatcctcctgccacaatgtacgtaaatccaggctaatccgctagaggatgaccaaagagagacgtgaatcagccagccccacccagcccaccagcttattgcagagtgagctcagctgagatggaaccgatccgatccaatccaaaccagaatcacccagtggtgttcagcccaaattgctgactctcgggaactatgaactaattgaatagctgtgtattttaagttttaagttaattgattatacagcaaaacctaactgatgccctgtcctgattccaaacactgggtactcatgttaaaagagcatcaccggccaggcatgctggtttacatctgtaatcctagcactttgggagaccaaggcaagaggatcacctgagcccaggtgttcgagatcagcctgggaaataacatagcgagaccctgtctctacaaaaaaaatttaaaagatccccaggtgtaatgacgtgtatctatagtcccagttactcgggaggctgaggtgggaggatcacttgatcccaggaggtcaaggctacagtgagtgaaggtcgagacactgcacttcagtctgggcaacagactgatatcctgtctcaaaaacaaaaaatggccaggcattgtggctcacacctgtaatcccagcactttgggtggctgaggtgggcggatcacctgaggttgggagttcaagaccagtctgaccaacatggagaaaccctgtctctactaaaaatacaaaattagacagtcgtggtggcgcatgcctgtagtcccagctactcgggatgctgaggcaggagaattgcttaaacccgggaggtggaggttgcagtgagccaagatttagccactgcactcactccagcctaggtgaccagagaaagactccatctcaaaaaaaaaaaatatttctgtttctcactcagccagtttccatctcagctgggccagctgcactccacctggtcctcaagctaatagatttcacttccctgaaggcccacaaaatcttttttttctcttttttttttcgttgacacagaatctcactctgtcacccaggctggagtgaagtggtacgattacggctcactgcaatccctgcctcccaaattccagtgattctcgtgcctcagcctcctgagtagccgaaattacagacgtgtgccaccatgcttggctaattttttggatttttagtagagatggggtttcactatgttggccaggctagtcttgaactcctggcctgaagcaatccgcccacctcagcctcccaaagtgctgagattataggcacgagccactacacctgg

SEQ ID NO: 8918 - DNA, 2300 bp, Homo sapien
cagagtcttgctctgtcacccaggctggagtgctgtcgcgtgatctcagctcactgcaaccttcacctcctagattcaagcaattctcttgccttagcctctggagtagctgggattacggggtgtgccaccacgccaagctaatttttgtatttttagtagagatgtgattccaccatgttggccaggctggtctcgaactccagacctcaaatgatccgcctgcctcagcctcccaaagtgctgggattacaagcatgagcctccgcactcggtcttcagtgattctttaaaattctcttctctgccgggcgcggtggctcacgcctgtaatcccagcactttcggaggctgaggcagacggatcacgaggtcaggagattgagaccatcctggctaacatggtgaaaccccgtctctactaaaactacaaaaaattattagccgggcgtggtggcgggcgcctgtagttccagctacttgggaggatgaggcaggagaatggtgtgaacccgggaggcggagcttgcagtgagccaagatcatgccactgcactccagcctgggtgacagagcaagactccgtctcaaaaataaataaataaataaatgaaatgaaataaaataaaataaaattctcttctcttagctgagattaacgaagtggttaacaagtggttaacaagtggtttcttctaccagagtgtgaggctggttgtgtgaccaggtaagagtatagtcggaggccaggcacgatggttcatgcctatgatcccagtactttgggaggccaaggcaggcagatcgcttgaggtcaggaattccaaaccagcctggccaacatggagaaaccctcatctctcctaaaaatacaaaaaattagctgggcatagtggcacttggttgtaatcccagctacttggagctgaggtaggagaatcacttgaaactgggaggtggaggttgcagtgagccgagatcacacaagtgcactccagcctggtgacagagtaagactctgtctcaaaaataaataaataaataaataaataaataaataaataaataaataaaatgggctgggcagcggtggctcacacctgtaatcccagcactttgggaggccaaggcaggaagatcacctcatgtcaggaattcgaggccagcctggccaacatggtgaaaccctgtctccactaaaaatacaaaaattacccgggcgtggtggcaggtgcctgtaatcccagctactcgggaagctgaggcaggagaatcgcttgaacctgggaggcggaggttgcagtgagccaagattgcaccattgcactccagcctgggggacaagaaaggagacttcgtctcaaaaattaaaataataataataataataataataataataataataataatggaatcaggggtctcaccgtgatgcccaagctgttcttgaactcctgagctcaaacaattcttctgccttggccttccaaaatactaggattacagatgtgagacacctcacccgaccaagtagcattttcataaaatatttatgtatttatttatttttaacatggagtctcactgtctgtccccgaatggagtgcagtggcagtatcttggctcactgcaacctctgcctcttaggttcaagcgattctcctgcctcagcctccaagtagctgggatcacaagcacgtacttctacacaagctaagttttgtatttttagtagagatggagttttaccatgttggtcaggctggtcttgaacttctgatcttaaatgatctgcccgccttgacctcccaaagtgctaggattacaggcatgagccaccacgcccagccctacattttttttttcctgtctctccactgtattttggaaagcattttcttatcagtatatctcactatttgggacactctgcaacatgtaaattgaacatttttcatatggctatttgaaaagttttttttcttcatggctccaaaaatagatgtcaggaaatgtgttctttttgtggaattccttttgtgaattgccactgggtgctcatatttgtggcccactgacatccaaaagatggatgacatctaccttatctggtcggtcatctctgtaacctccctaccaaggactaattggtctttaaaactcctcaatgcaccgggcgcggtggctcacgcctgtaatcccagcactttgggaggccgaggcgggcagatcacgaggtcaggaaatcgagaccatcttggctaacaaggtaaaaccccgtttctactaaaaataca

SEQ ID NO: 8919 - DNA, 2300 bp, Homo sapien
tgatctcggctcgctgcaacctccgcctctggagttcaagtgattctcctgtctcagcctccctagtagatgggattacaggcgtgcaccaccacgcccagcccagttaatttttgtatttttagtacagacagggtttcaccatgttggtcaggctggtcttgaactcctgatctcagatgatgcacctggctcggcctcgcaaagtgctgggattacaggtgtgagccaccgtgcccagccgttagctcattttaacacatccttagtccagcctgttccaaaaaatctaaagtcagatagcttcctaaacctcaactttattccaattgctttccttggcgaagaatgtagtaagtcggccttccagccaccagccccttccctttggtctttcactccggaggctcttaccctagacacaatgggacagggagcgggggatgggggaattcagctcaggcttttatgcaaagacccccttctgcaaagaacaaagcttctggtacctgccctttggagagctgcgggcaagctcagcctcggtgagtcttggtggccttgacagcccccacttaacaaactgtgctgattaagagagacaggagggcaagtttttcccttcttttaaagaaatcatcctatttcctacgagacatagactatctgcctgaagcatgatgtactagccccactcaccggctccctgatgcccctatgcttaatcttctccggaatggtagtctgagaagaaaaaagattacgcccaatttcatttccttgtttcacatcaagcaatacttttcgagtctttgcattgtgaacaaaagtcagcttgtgtgggagcaaagccagctgctctgggtgcagacccaggagcagagtgcagaggagaatgagtcaaagagttttgtcttcaaaaattacataatcgggatttgctaagagtttacttttcggtatggaagactggaaaagagaaagaaatcttaggtttcttgaatgttgggtttgggaataggaaggaaaatcgaaaactgtagactttgtccataaatgttagtgctggaaccccactctaaaaactttgttcctttggaaaacacctcccttcccccagaaacacacacacccacacgagatgggcacggagtagtcttgaaagacatgacaaatcaccagacctgggaagaagctaaagagccagagggaaaaagccagaagtcgactacctgggaggagggatagacaagaaaccaaactaaaggaaactaaggtaggtgctgaaaacaagtaccattttcaacattaactgatgccttggcttcatgctataatgccatgttgtgtttcactataacctcagagtgaatgaaagaggaaaatggagctagttgaaatttctgcctaaactagccagattttgagacactaagttatctcaaatcaagaaatcaccctaatgagaatttcaataacctcaggaatttaaggtgcatgcatcccccaccccccccttttttttttgagacgtagtcccgctctgttgcccaggctggagtacagtggcgcgatatcggctcaccacaacctctgcctcccaggttcaagggattctcccgcctcagcttccagagtagctgggactacagacacccaccaccatgcgtggctaatttttgtatttttagtagagagggggtttcgccatgttggccaggctggtttcaaactcctgacttcaggtgatccgcctgccacggcctcccaatttactgggattacaggggtgggccaccgcgcccggcctttttcttaatttttaaaaatattaaagttttatcccattcctgttgaaccatattcctgatttaaaagttggaaacgtggtgaacctagaagtatttgttgctgggtttgtcttcaggttctgttgctcggttttctagttccccacctagtctgggttactctgcagctacttttgcattacaatggccttggtgagactggtagacgggattaactgagaattcacaagggtgggtcagtagggggtgtgcccgccaggaggggtgggtctaaggtgatagagccttcattataaatctagagactccaggattttaacgttctgctggactgagctggttgcctcatgttattatgcaggcaactcactttatcccaatttcttgatacttttccttctggaggtcctatttctctaacatcttccagaaaagtcttaaagctgccttaaccttttttccagtccacctcttaaattttttcctcct

SEQ ID NO: 8920 - DNA, 2300 bp, Homo sapien
cacctgaagccaaaatgttcagcaagtggaccaaagccaagaccaccaagaagcgaccacagcacaaggggccacatccaatgtcttcgtgatgttcgaccagttccacatccaggagtttaaggaggctttcaacatgattgaccagaaccatgatggcttcaatgacaagggggacagcacgacaagctggcttcaccgcggaagaaccccatggatgaatacctgcagggcatgatgagcgaggccccagggcccatcaacttcaccacttccctcaccatgtttggggagaagctgaatggaacagacccccaggatgtgatccaaaacgccttcacctgcttcaacgaggaatcctcaggtttcattcatgaggaccacctccaggagctgctcaccaccatgggtgacagcttcacagatgaagaagtggatgagatgtactgggaggcacccattgataaaaaaagacaagttcaactaggtggagttcacctgcatcctcatacatggcgccaagggcaaagatgactaggccaccccagccctcgcgacaccctggcccccccgccagtcatctccccacccccggcacacactggtctgtaccagctctctgcccacgaccttctctcaggggatcctccctttgagggcttcgggtcccagctcccagtggagaaatcacgccaagagaagtgcagtgcaggactgaggcaggtgttctcactgtgaccctagggccctgggctggagtctctgacccctccagggaaagaccgccttatgaagagatgggcctccaggacctggaggtactgagagaaagcccccaagacagccattcctgggctgctccccaaggaggaagggaacctgtgtgcccccaggaggaagggacccttagtcctgagatccaataccatttcacatgcatccccacccaaacacaagttcaccaaagtcccctctcagaggacaggacactagactcctcccctacaccctgttgagacaccagcgcacacccacccagagcagccacccatcgtgggagtgtgctcaagaagccatctgtcccaggggaggcagaatctccaatagagggctgagcatggaaaaaaaacaaaaaaaagaaaaagaaaaaaaaagtaaggtactatttatttatctgtaaaattaactcagattaattcttcttaaaaatcaatggaaattctaaatttagtctgtgtattaaactgggacaaaactaataacagtattttaccaaggacacttggccttactccccttctgtcacacttcagacataaatcactgaatgaatccagcactgaataaatgaatgatccataatttcctaagacaattccaattttcatcttgcacaaatctacaaagctgatgcacccgcacagcacttgaactcctggtaggtatctttcaaggccaaggcagttcctcctcccgaatccagttccctccgcctggatcatgctcccaaggctccctcatttcattcaggtctcctgccaaaagacacttcctcacaaaggcctctcagaccgaccccttccccactcccaacttcacagtccactcccctagccctactacatttttattcatgaagatttacggcattttgttacgtatctatacattttcttgtctgtctcttccctagaatatacagtccagcaaggcaagggctggggtggcttcgtttgctgtgggatcccagcacctagagcggagcccaggacatagtaggtgctcagtaaatcacaaatctcttctccaaggctccaaggctagtttcccagagccgcagctctcttctttcttagcccggcccacctccgagtagccgcccacctctactctagctcggccacctctaccccagctcaggtcctcattcccgcaccccccggccgcagggacggcgcggcgcacccacctcccagaccccgcgactgcggttgggccccgcggcttcgctcaaccacgcacctcccgggccgctgcgcccccgccggccccgcctgcagccgttgggacccactaactgcctcgaaaagcctaggattcgactttgaatggtccgttaatgtggttacaaaacgtgactcggttcatcgggagccctccgtaagcaagacaagcacccacctgcggtcagagcaggggtccggctcgcggtcggggttgtccggcccctcccggcttctcacctgcgcaccgcacggtccagccccggcggctgctggggatccctccgagcgccccct

SEQ ID NO: 8921 - DNA, 2300 bp, Homo sapien
atatataatttatatataaatatatttatatataatttatatataaatatatttatatataaattatatataaatatatatttatatatgtatttatatataatttttatataaatatatatttatatatgtatttatatataatttatatataaatacgtatttatatataatttatatataaatacgtatttatatattatttatatatttatatatttatatatgtttatatagttatataaatatttatatatatttttatatattttttatatatttatatacatatttatatatatttatatatatatttatatatttttttgagatggaatcttgctctctggcccaggctggagtgcagtggcgtgatctcggctcactgcaacctccacctcccgggttcaagcaattttcctgcctcagtctccggagtagctgggattacaggcgcatgccaccacgcccggctagtttttgtcttttcagtagagacggggtttcaccatgttggccaggctggtcttgaactcttgatctcatgatccacctgcctcggcctcccaaagtgctgggattacaggcatgagccactgcatcctgcctaaatatacttttaaaatactgattgcaaaggccaggctgagatgaacattttagtacctactttttggtgaatatatgtatacatttctgttgagtgtatacctaggagtggaattcttggatcgtggggtagccatatgttctaataaatattgccaaacaatttatcaatttgtaccccattaacaaatgtgtgagagttctgaatgttccacattccccaggtttggcattcacttccttttttctccacaccccaactcccatctttgttttagtcattctagtgggcacgaattggtatctcatgtagttttaatgtgaagttccctgatcaacaattcagttgcatgccttttgacatgtttattgttgactgagatatcctcatttaagaagtgcagtatagacccttttaatggcccttgtttgctattgacttgtcaaccctgtactgaaggccatgctgtcgtggtaaggctccaggtaattccaaggtaagccttatgcttgggctaggggagaacaatctctccaaaacaccttcgtgctgtctgcaggggccttaccctggatggcaccaatggggcagcaggggatgatctttattactccaaagccgaaaacctagagagtcttttccaggaggtggagagaacgaccgcggggcttttcatccaaaaagagctcctgagtctgaaataactgttttgtttgtttgtttgtttgtttgtttgtttgtttgttttttgagacggaatcttgagctgttacccaggctggagtgcaatggcggagttcagctcactgtaacctccgcctcctgggttcaagcgattctcctgtctcagcctcccaagcagttgggactataggagcgcaccgccaagccccctaattttgttatttttagtaaagactgggtttcgccatgttggccaggctggtctcgaacccctgacctcaagttatccgctctcctcggcctccaaaagtgctaggattacaggtgtgagccaccgtgcgcggcccgaaataactctttacaggatctcgccctgggccttcccagcccagccggcccgcccgcggggatagcccgggcactatctccctgctgcaggcggtgaggggctcgggtatctttgaaaatagatacgttcacaccctcctaacggcggcgccaagggtggtgggtcccaaaactgtttccccgtaaagagttcccccgcccggtcgcaggaagacgcctgagggggcgctcggagggatccccagcagccgccggggctggaccgtgcggtgcgcaggtgagaagccgggaggggccggacaaccccgaccgcgagccggacccctgctctgaccgcaggtgggtgcttgtcttgcttacggagggctcccgatgaaccgagtcacgttttgtaaccacattaacggaccattcaaagtcgaatcctaggcttttcgaggcagttagtgggtcccaacggctgcaggcggggccggcgggggcgcagcggcccgggaggtgcgtggttgagcgaagccgcggggcccaaccgcagtcgcggggtctgggaggtgggtgcgccgcgccgtccctgcggccggggggtgcgggaatgaggacctgagctggggtagaggtggccgagctagagtagaggtgggcggctactcggaggtgg

SEQ ID NO: 8922 - DNA, 2300 bp, Homo sapien
atttttagtagagatggggttttgccatgttgggcaggctggccttgaactcctagcctcaggtaatctgcctgccttggtctcccaaagaaattatatatatatatataaatatataaaaatacatatataaatatataaatataaatatattttaatatatttatatattatatataattaaatatatatatttaattttaaatataatatttaaatatatttaactatttaaatataatatttaaatatttaaatttaaatagaatattaaatataatatttaatatataatttatatataaatatatatttatatatgtatttatatataatttttatatatgtatttatatataatttatatataaatatatttatatataatttatatataaatatatttatatataaattatatataaatatatatttatatatgtatttatatataatttttatataaatatatatttatatatgtatttatatataatttatatataaatacgtatttatatataatttatatataaatacgtatttatatattatttatatatttatatatttatatatgtttatatagttatataaatatttatatatatttttatatattttttatatatttatatacatatttatatatatttatatatatatttatatatttttttgagatggaatcttgctctctggcccaggctggagtgcagtggcgtgatctcggctcactgcaacctccacctcccgggttcaagcaattttcctgcctcagtctccggagtagctgggattacaggcgcatgccaccacgcccggctagtttttgtcttttcagtagagacggggtttcaccatgttggccaggctggtcttgaactcttgatctcatgatccacctgcctcggcctcccaaagtgctgggattacaggcatgagccactgcatcctgcctaaatatacttttaaaatactgattgcaaaggccaggctgagatgaacattttagtacctactttttggtgaatatatgtatacatttctgttgagtgtatacctaggagtggaattcttggatcgtggggtagccatatgttctaataaatattgccaaacaatttatcaatttgtaccccattaacaaatgtgtgagagttctgaatgttccacattccccaggtttggcattcacttccttttttctccacaccccaactcccatctttgttttagtcattctagtgggcacgaattggtatctcatgtagttttaatgtgaagttccctgatcaacaattcagttgcatgccttttgacatgtttattgttgactgagatatcctcatttaagaagtgcagtatagacccttttaatggcccttgtttgctattgacttgtcaaccctgtactgaaggccatgctgtcgtggtaaggctccaggtaattccaaggtaagccttatgcttgggctaggggagaacaatctctccaaaacaccttcgtgctgtctgcaggggccttaccctggatggcaccaatggggcagcaggggatgatctttattactccaaagccgaaaacctagagagtcttttccaggaggtggagagaacgaccgcggggcttttcatccaaaaagagctcctgagtctgaaataactgttttgtttgtttgtttgtttgtttgtttgtttgtttgttttttgagacggaatcttgagctgttacccaggctggagtgcaatggcggagttcagctcactgtaacctccgcctcctgggttcaagcgattctcctgtctcagcctcccaagcagttgggactataggagcgcaccgccaagccccctaattttgttatttttagtaaagactgggtttcgccatgttggccaggctggtctcgaacccctgacctcaagttatccgctctcctcggcctccaaaagtgctaggattacaggtgtgagccaccgtgcgcggcccgaaataactctttacaggatctcgccctgggccttcccagcccagccggcccgcccgcggggatagcccgggcactatctccctgctgcaggcggtgaggggctcgggtatctttgaaaatagatacgttcacaccctcctaacggcggcgccaagggtggtgggtcccaaaactgtttccccgtaaagagttcccccgcccggtcgcaggaagacgcctgagggggcgctcggagggatccccagcagccgccggggctggaccgtgcggtgcgcaggtgagaagccgggaggggccggacaaccc

SEQ ID NO: 8923 - DNA, 2300 bp, Homo sapien
ctagcacatagatgagttgttgctgaccttcctgtcagcttccacgggttcagatatctggaagctccccataccctgccttttgggccttttatgcagacttaattggttctccatgattgaagcatggacaactgttctgacctgtgattggacaaaaagggaatgatctgaacccagctgggcctgtctgcttagatgatttgttggcctctctgtagcgtttcttcctctagggtgtggggcaggaccctctctgaaatgagggttttatgacccacagtcagattagcgtcctgccaagtgggagggcaggagaaagtcagagaagaattctgttatctgaggcctgctcctgaggcctgaagcatcccaacattatgacaaaagactctaccaagggctatggggattttgagccaggacctgtgaatggcacacaatatgtatgtatataaaatcataaatcacaggaggggtatccataacaagtgtcctgctgttggtaaggcagatttcaagtagctcagatgctgttttcatggaaaggaaaactgaagtttcatgtcatattcttcttccagctatttctggtggaaagggcaggaagaaggactctgcatatgataggccttggagggatggctttttgttccacgctcatgactgtttctttgttattaaaggtaggtgctctttgggtgaaaaaaaagggagggggaaagaagagaggttacagttgacttctgtgacacaaggggtgggttgttaaggttgcagtttgtcaataaagtcagaggagagaagcaggatgcccagagtttaagaaacatgggtcgtcagagaactggaggtaaactgttagaatccttacatttatagaacattattatagcttataaaataaattatctaatttaattcttagaataatatcaaggtaatcacacttaatagatgatgacatggtctcagtacaaagtgacatatatgagatcatatagatgggattgaaaaattcaatcctcagctgggcgcggtggctcacgcctgtaatcccagcacactgggagggtgaggcaggcggatcacctgatgtcgagagttcaagaccagcctgaccaacatggagaaaccccgtctctattaaaaatagaaaattagccaggagtggtggtgcatgcctctaatgtcagctacttgggaggctgaggcaggagaattgcttgaacccaggaggcagaggttgtggtaagttgagatggtgccattgcactccagcctgagcgacaagagcgaaactctctctcaaaaaaaaaaaaaaaaatccaatcctggctgggcgcagtggttcatgcctgtcatcacaacactttggaaggccaaggttagaggattgcttgagcccagaagttcaagaccagcctacgcaacatggcaagaaactttctctacaaaaaaacaaaaaaaaattttttttttgagacagggtttcactctgtcaccaggctggagagcagtggcaggatctcagctcactgcaacctctgcctcctgggcttaagtgtttctgctgcctcagcctcccaggtagctgggattataggcacgtgccaccacgctcagctaatttttgtacttcttagtagagactgtgtttcaccatgttagccaggctggtctccaactcttgacctcagataatccacctgccttggcgtgagccacagctcctggccaaaaaaaaaatttttttttaattaggcaggtgtggtggcacatgcttcaagtccaagcgatttgagaggctgaggtgggaggattgcttatgcccaggagatcgatgatgcagtgagctattgtagtgccactgccctccagcatgggcaacagagtaagaccctgtctcaaaaaataaaaataaaaataaatccaagccttttgactccacagccactctttgtattgtacgtcagggacaggaggagcttgccgttaattgcttctgggaacctagatactaggttacactgtctttaaatttaattttctctgttccttgctcttacaggataactataatgggatgagctttgtctgtattggggctatcttggtctttgtagccttctttgaaattggaccaggccccattccctggtttattgtggccgaactcttcagccagggcccccgcccagctgcgatggcagtggccggctgctccaactggacctccaacttcctagtcggattgctcttcccctccgctgctgtaagtaaactcaccttatcttaaa

SEQ ID NO: 8924 - DNA, 2300 bp, Homo sapien
ggggagttgtcatcaaatcagattttaacaatatcctcgttaaagcaaaggaagcaacagtaatctagttttctcgggtccagcagtatcaatttgaattctaggccctcaaccaaaaccctaaaggaagatacactttctccaattcaccactgggaaaaagtttatctctttaccaagcgtccttcacccaccctgccacctccagtactgaaagggttgcaagctacaaatgaatgggcattaggaatttgatagttgatattcctcctccaaaaaagcctagatactatctctcacttacccagctgtttaaacacaaaccaagttgttttgctttgtttactctcaacctggaaccactcttctctctccccgattatccctccctcagttctcattcctattttcttctcctgcttagcttgttcagttttcttgtatagcttagtaatcagatacttatgtaacacttttctttcaagaaactcacagtccataactaataggatattaataatcttttccagttatgtgagaattacttgccctagtccctttttatactttataaaaagggaagaagggaaacactataaatgacttgtgggtcagaactcttttgtcctattattcttttttttttttttttttgagacggattcttgctctgtcgcccaggctggagtgcagtggcgctgtcttggctcactgcaagctccgcctgccgcgttcacgccattctcctgtctcagcctcccgagtagctgggactgcaggcgcccgccaccatgcccggctaattttttttttttttttttttttttttgtatttttagtagagaatggtttcaccgtgttagccaggatggtcttgatctcctgacctcgtgatccgcccacctcggcctcccaaagtgctgggattacaggcgtgagccaccgcgcccggcctttttttctattattcactgaagaatcaccagcttcttggagagtacctgatacatagcgtgtattcggcaaatacctgcttaattgaattcggtatttattgcatttctagatgctataagcttgagactagcagaaagtgatgcagaattcagaatgggtgatatggcaaatgccttattaaatatagggctcggcgcggtggctcacacttgtaatcccagcactttgggaggccaaggcgggcagatcacaaggtcaggagtttgagaccagcctggccaatatggtgaaaccccgtctttactaaaaatacaaaaattagcggggcgtggtggcgggcgcctatagtcccagctactcgggaggctgaggcaggagaattgcttgaacccgggaggcggaggttgcagtgagccgagatcgcaccactgcactccagcctgggcgacagagagagactccatatcaaaaaaaaaaaaaaaaaaaaaaaaaggatatggattgtattccataaacagttgaacctcttattcctactgccctgatagttggtctggctcctagaaattcagattttcttccctccaggtgagattatgcgaagaaaggaacactggcaaaattatttccctgattttcttctctcaggctgtctttccctcccctttaagattgtgtactccgtctcaaaaaaaaaagaaaaaaaaaagattgtagacccagcctataaattcataggatcaagaattcttactaacactctttctaacaaccttaaatctctgatagtagcacccacttgacttcgttttgtatggatagatttattctaatctctctgtagattgttttaatcccaagcagatgcgagagcataaaatagtgtatttgccctccctccaggcttttctggtagtattttgtctgtgaaactaagaggctctagctgctattagaagagggaaggagtaaggatgagcttttgaaaaaaaaaaaaaaaaaaaaacccagggtggagagagtggaaggatgtggttttaagagaggggggagggagggcgttattgtctgtggggcgggggcgggggtagttctgataacacagaattccgagagatcacaagattgcttcaggggggtggggtggggtggggtggggctgggggcttgtcgccctttcaggctccaccctttgcggagattataaatagtcatgatcccagcgagacccagagatgctgtaatggtaagactttggatccttcctgaggacgtggagaaaacttgctgctgagaaggacattttgaaggttttgttggctgaaaaagctgtttctggaatc

SEQ ID NO: 8925 - DNA, 2300 bp, Homo sapien
agtcatttggatttaagtcctgactctgctacttactaattaagcgaactcacacatagtatctgtaagtcacaattttctcatctgtaaaagaagtataataatagtgtcttagggaatcgctagaatcatcaatgtgacaacacatgcagaatgctcagtgcaatgcctggcatattgtaaatataattattcatataatatatacatacaacttaagtatgcagtcttttgggggcaattcaaatattttgcaagcaatatttttgtattcgtattatctttttttttttttttttttgagacggtgtctcactgtctcccaggctggagtgcagcggcacgatctgggcttactgcaacctccgtctcccagtttcaagtgattctcctgcctcagcctcccaggtagctgggattacaggcacgcactaccacgcctggctaattctttttttttttttttttttttagacggaacctggctctgtcgcccaggctggagtggagtggcgcggtctcggctcactgcaaccaccgctttccgggttcaagcgattctcctgccttagccggcactacaggcgtccgccaccgcgccgggctaatttttgtatttttagtagagacaggggtttcaccacgttggccaggctggtctccaattcctgacttcaagtgatccccccgcctcggcctcccaaagctttgggattacgggcgtgagccactgcgcctggcctcctattatcttatgtgctataaagtagagagtaggccgggccgtgtttcctgcctgtaatcccagcactttggaggcataaaaagggagaatagtttaaacccaggaattaaagaccagcctcggcagcatactgagaccctgcctctatttaaaaagaagaaaaagataaagaaagaaaggaaagaaagtagggtagtttgataaaagtttaaaaagcctgagtatgggccgggcgcggtggctcacacctgtaatcccagcactttgggaggccgaggaaggtggatcacgaggtcaggagttcgagaccagcctggccaacttggtgaaaccccatctctactaaaaatacaaaaattagccgggcgtggtggcgcgcgcctgtaatcccagctgctccggaggctgaggcatcccagctgctggggaggctgagacagaagaatcgcttgaacccgggaggcgtaggttgcagtgggcccagatcgtgccattgcactccagcctgggcaataagtgaaacaacacctcaaaaaaaaaaaaaaaaaaaaaaaaaaagccagagtatgaaatatatgagaatttgcagcagaataatatgacttcaggatgtgacagctgtaaagggtaagcaggccaagtatcaaggtcccttcttcgctgagcaagattgcggagaacaagggccatgcacaagtttaggaagctgaaacaaggaacaggacccagatcttctgatgtttatttcaccgttacacgctcatttatcatgtatccactcattcaaggagcatttactgaattccaggatgatataagggtaacatataaacttcaccccaatcttcacctcaatgctcatgatcctttataaattatctcgagggaaagagaagcccatcaaagacagtcctgagaaagctggggctgttcatctgtatacggagtttaacagaatgaaacgccggagttggggtgtcagctggaattgacggtatacggtgcgcactagggactctcccgacggggagcagtgagttgtcatcccgggtagacggcgaactcccggagccacgcggccgcaggtgggcgagggcggcgagatccctcgccggcgtgagagcggccgtggctctccaggcggagcgcacaccgggtagcgaggctcgcggctcggcgctgcccgcggctcggcgtctcccggctcctccttaacccgcgccgggaggcggtggcggcagcggccggcgggcgggggagggggaggggcgcggagcgcggcgcggaggccggggaggagccggggcctgcagcggagccgagccgagcccgagcccgcgccgagccctgacactgtctgcccgccttctggctccccgggagcccagactggtcggagcccgagcggtggcagcgcggggagccccacgcgccgaagggagcggacccgacaggacggccctagaggaggtgctgccgccacagtagcagggaccggagtctcgagccgcggcctcccggaccgtgctgcccaggccagctcagggacagccgg

SEQ ID NO: 8926 - DNA, 2300 bp, Homo sapien
gccaggaggcagaagttgcagtgagccgagatcgcaccattgcactccaacctgggtgacaagagcaaaactctgtctcaggaaaaaaaaaaaaaaaagtgtaatttgggccaagatgtcctgatataaaaagataagtggaaaaaatagaacaaaacaatatgcgtagtagaatatgcgtatttaagagagagactacatctggaaagtggaaagaggatagctaggtgtttaggaaattttggtttttactttaatcttctcatatttaatttttaccatggggaattaattgtttttataaaatatattttaattagatatatatgtacatatatgataatcctacattttatatgctttctggatacctatattattcaatatttccaaatattggaggaaagaaaacccaaaataatcaataggattatatgtactaacatggaagtatgttttgatatattgttaagtaaaaaagcaagacataaaatcacacataaattaccatcccatttatgttcaaaactaccttttagaaaaatgtgtgttaggccgggtggggtggctcacaccggtaatcacagcactttgggaggctgaggcaggtggatcacctgagctcaggagttcaagaccagcctgcccaacatggcaaaaccccatctctaccgaaaaaatataaaaattagccggttgtggtggcacatgcctgtagtcccagctactaaggaggatgaggtgggagaattgcttgaacctaggaggcagaggttgcagtgagccaagatggtggcactgcactccagcctgggcgacagactgaggccctgtctccaacaaacaaaatgtgtgctatattcagaaaaaaaaaaatcaggaagaatgaacactaacctattaaaaatagttacttcgagcagtggaattgaaaagaaaatctttcattttttttacccattataattctgtattatttcaatttatctcttctagaacaaagtatgttctatttttgtaattagatgatgacaatggaaataaactaataaatactactcaactcttggcatttttcttttgatctttctgcctcaaaaatattccgtggtgacttgactgcaaacaagcagaggagcagatattatggtttggacaagttgattaatatagactgaagcctatatcacagacaacagtgttcaaatacatttgacccaaataaactttattttatatgcatatatctaaaagagtatatgcatatatctaaaagaataatataagaattatttacagcatagtattcattaagcaggaattaccttcagtcttctgtactccttcctgatgaaacagcacctagactccagcctgttctccagtgaccactaagctctcccacctacctccccacctacctgccctctaccacctacctgcctttgactaggctccacttatagcctaagcagcttttcacctttttctgtctctagaattcctacaggtacttaattaagtacttgcccacatcttatttctatcttaagactctcctagattgccctgggttatatatacccctggctagagtgttctattattttacttctattgttacttctattattatagcctagtttgtattacagctttgtgtgtatatgtatgggtacatattcccactcgattgtgaatctctggagattagaatatagcttaattcatcctgattttgacatggcaccgtttttcacatatatcaagcatttcagatatgttatttgagattaattaaatgagtttattcaggtcattcctccccaaccactccccactccaaccctcacatctcatagagtcttttttttttcatttctaaacaaaacctataaagttgaaccctatgtacagaggtaccctctctctaaccattctctgtgtgctgcagaaaatgtctcaggattataaactcctacttctgttttcctgctttgcctttctaagccatttagaaatgactcactttgaaactcttcctgtgaggtcagatagtggtctagagcataagacttaacttattgccggaaacagagagagaacagaagaagagaaagctcagcaaattttcttgccatacttcatgacttcactgtggctaagtgtggggaccagacaggactcgtggagacatccaggtgctgaagccttcagctactgtctcagttttttggtaagaaaacctagacctacctgatgacttgtgcttagcctgttttgctcattataggtaatga

SEQ ID NO: 8927 - DNA, 2300 bp, Homo sapien
ttatgtcaagagattgtatggctaggaagagttaactatatgggctttgaaatctctaaaagatttgggagaagaggaagagtataaactagtaagaaggtgaaccagaagccagaatcctccaaaaatgattgccagtgataacacagaacagagaaaaaaaaagaggtacaatgtggtgtagtcatatgacctaggcttcagatgagatcatagggtcagaaataaggaacaacaagtaataaaccacttttctgtctttatttttcttttaacatgtattcagtgacaataatagctatataaatcttaaacaacagagaaatatatggaggagaaaataagtttctttcccccacttagccttatatcctttgaaagccttctcaatgcatttacatgcatgcatatataattttggggtgtttcgacaaaagttgataatgctgtatgttttttgcagttggctttaaaaaatcttggatctctttcaatggctaaccctttagttcaaaacatctcatagtaatagatataccattaaccatttcccattgatagatggtcattttgtttccatttttttcactattacaaacaatgctgtagtattattgtacatacttttttgtgcatataaggatttctctacaatatttattagtgaaactgctaaattgaagattacgtccaattaatattttgataaattctgttaatttcccttttaaaaatgccgtgccaatttacattcctgccaacagtgtatgagattagactgttcctcacgtcctcgccagggataaatgtggtaattctttttgaaatttaagatatcactttccaaggtggagcagacaaattagaggcaggtttgctttttttttttttctcattaaacttttttaatgggtctcaaaattctgtgacaaatttttggatgtttccattaaaaagtactgatttaaaaaactaataacttaaaactgccacacgcaaaaaagaaaaccagtggtccacaaaacattctcctttccttctgaagaagaaaaccagtggtccacaaaacattctcctttccttctgaaggttttacgatgcattgttttcattaaccagtcttttactactgaacttaaatggccagttgaaacaaacagttctgagaccgttcttccaccactgattaagagtggggtggcaggtattagggatgatattcatctagccttctgagctttctgggcagacttggtgaccttgccagctccagcagcggtgaagactgctgctgttgtaatgaggcaggcttgagtttctgtctcagttttgccacttgctatctgtactgtcagggtgttgtggttaagtttacctttggggcgcagaaaaagcatatttatggtgagagttcggtagcatttatcattataatagaactgggagctaatataggccattagatagttcattatgcttccgattttatcaggaattgggttgatcccacgtatagtctatttaacaggatcaaattttccaaaaagataatcggaatacacgccgaaagtgtggcaaaacattttaacaggtgtcgtcctgaaaaatcggagataaagagtgtaaggcactaaatcaagttgggtgttttcagcgtttagactctggagagttgaaatccacggtgtctatgaccagatcatacatcattctctgcaggtacctcgtctgggactaccggctggaggttgcctcttttctgccaggagactacagttaggaagtgactcctgtaagaaaatccgtcacgattcaatatggtcctcgtcctcgtaggacactccaggcacctgcctagagtaagatggcgcttttcgtaagcacctctccaggacagagatttccataacgagagtcacgcacttgcaggccatctttgccattatccaagacggtgagccgtgcagcctcatcgtttccaggtttcaatatggctccccgcgtcaccgaaaaggttaatctcagaaactaacttgaactcgcgcggaagtgacgcaacagaagttgtcgcgctttgcatctccgcctcccgtgctccgcctccggtcttacgtttcgcccccggcagcgccgacagcggacccaagatggcgaccgagttggagtacgagtctgtgctgtgtgtgaagccagacgtcagcgtctaccggattccgccccgggcctccaaccgcggttacaggtactaaccccgaggcgctgccgcacacgcgtactctgtcgcagatgacagcttcctt

SEQ ID NO: 8928 - DNA, 2300 bp, Homo sapien
aaaaacagaactgctacctctttgccaaaggtgcaacccacagggcccagcgcacaggtcagcaagcataaaaatattgattcatgatgaataaaacgccagtaaggggcaaaataacagacataaggagagggtaacttttcagccaaggtaatgataaatgccaggaggaaaaatcacaatgatgatgtgggtcagagagaagaataagaacagtatcttggccaggtgcagtggcccacacctgtaatttcaacactttgggaggctgtggcaggagaatcacttaaggccaggagttcgagaccagcctgggaaatatatcaagatcctgtctacacaaaaaaatttaaaaattagccaggcattgtgaggcaatgcctgtagccctagcaacttgggaggctgaggtaggaggatcccttgtgcccaggagtacacagctgccgtgagctgtgattgcaccacttgcactccagcctggatgatagaacgagaccctgcctctctaacaaaaaaaaaaaaaaaaaaaaacgacggctgggcgtggtgtcacgcctgtaatcccagtactatgggaggccaaggtgggcagatcacaaggtcaggagttcaagaccagcctggccaacttggtgaaaccccatctctactcaaaatacaaaaattagccaggtgtggtggtgcatgcgtgtaatcccaactattcaggaagctgaagcaggagaatcgcttgaacccaggaggcggaggttgcagtgagctgagattgagccattgcgctccggcctgggcaacaaagtgagactacatctcaaaaaaaaaaaaaaaaaaaaaaaaaagaacaaacaaatagtatttgtaactgctttattgcatttcctacattctttcacatccattatatgatttaattttactctcccaaaaacccttgttaagcacattataagagcgcaggtatcatcactaacaggtttttttttctattttacagatgagaaaattgaggcttggaaagggctcacactcatatggtttaacatgaagcccagtgaactgtctttcaactacataatgtcctatagcatcctcagaacctcacagtcattggattacaaggtaggtagttaggcccaacagagaaaaatgctgcctcaactttggagggaaaaggtgtaggagaggttaagaagggaggtagggaaggaagacagaaaatactatataatcatcaagaaaatacaatgagaagaaacagaatgaacaaccgttgtaaagcttatgatcataacctttgctcactggtaaaactgctgaaggaaaaaccgaatggtggatgatgacagttggtgacgaaattgacaacagtacaaaaaataaatcagataatccagagtggcaagcaacacgattacccataaatgtgcatggggaactggaaaggtgtgtgtgtgtgtgtgtgtgtgtgtgtgtgtgtgtgtgtgtgagagagagagagagagaaaggatgaggatgataagctgaaggacgcagggaagagcgaatgaaaggggactggcaatggagcaagcacgactgaaagtgcatgatggggagcagatgggtgccccaggggattacgggagaggcagagtggaataacgcagagtggtaatttaataaaaaacaaaacaaaaaaaaaaacggcagaaatatggtgatgacagtccagagtggagatggagcaggtggtcagggagatgacaacccaggtagggaggctagcaaggtgacaatacagaggtagtagtggcagggacggacagcgtgctagctgagaaggaagctgtcatctgcgacagagtacgcgtgtgcggcagcgcctcggggttagtacctgtaaccgcggttggaggcccggggcggaatccggtagacgctgacgtctggcttcacacacagcacagactcgtactccaactcggtcgccatcttgggtccgctgtcggcgctgccgggggcgaaacgtaagaccggaggcggagcacgggaggcggagatgcaaagcgcgacaacttctgttgcgtcacttccgcgcgagttcaagttagtttctgagattaaccttttcggtgacgcggggagccatattgaaacctggaaacgatgaggctgcacggctcaccgtcttggataatggcaaagatggcctgcaagtgcgtgactctcgttatggaaatctctgtcctggagaggtgcttacgaaaagcgccatcttactctaggcaggtgcctggagtgtcctacgaggacgagg

SEQ ID NO: 8929 - DNA, 2300 bp, Homo sapien
tttataaatttctgatgttttcatggccgtttgtatctccagcccagatgtctttcttgaactcgtctcatatattttactgcctactctacatctcttgaaaatctactagacatctcaaactcagcatatttaaaactgaatccctgatccttcttcctagatgtgttccttctcatctcaataattggcaactctttgctcaggctaaacaccttggagttgtccttggcttctatcccctatctaatccattagaaaatcctgctgcttttaccctaaatatatccttctcttctatcccatatctaatccattagaaaatcctgctacttttaccctaaatatatccagaatatagccacttctgctaccattgtgacttttctagattactgcagtagtctcttagctaatccccctgcttcagtcctcttatcccaacagcttttctccagacagcagatgtagtaatctttttagaatataagggagatcatgtcacacctctgcttaaaatttgtaatagctcttttttcactcagagtgaaagctgaagttgttactatgacccacaaggccctgcgtgatctggccgtctgttacctctcccaccttgtctcttcctctgttctaaccacagtgcttccttgttgtctctcaaacatgccaggcatgcccccaccgtagcacctttgggctagctgttccttatgtctagaatgcttttcccccagacatctgtatggataactctcttgcttcacattctagctcacatttcaccttaatgagacctaccccaaccaccctcttgaatgctacaacttgttcattctcccactgtcttcttaatcttcctaatttgcctctacattttctttttaccttagaactcaccactttctaagatactaattatgctgtttattatgtttcttttttattttctatcttctgttaggatgtaagcctcatgagggttggaatctttgttttggttgctgttgtatcctaagcatctggaacagtgatgcatctgtcctaataagtactgtataaatattgattgaattcagtgaaagatagtatatttactgatttgggagggctcccattacctaggatatttaatgtagtagactttgttgttatctgattagtaaagcatggttatctagtataccatctatagtttgaaaatagcatcgttatgagaaattttatttatttctttatttgagaccaagtctcgttctgtcgcccaggctggagagcggtggcgcagtctcggctcactgcagcctccacctcccaggttcagttgattctgcctcagcctcccaagggatttcaggcgcacgccaccataaccagctaatttttgtatttttagaagacggggtttcaccgtgttggccagactggtctcaaactcctgacctcaagtgatccacccaccttggcctcccaaagtgctgggattacaggcttgagccaccatgctcggccagaattttattttttattgcttttattcgtgcttttccatctttttaatgatgcttattggactccaaagtcctcaagtagtagcattgtcttttacttgctttggactgtatgtaacatgaggcatctaaatagatcatgaattattcttgttgattaataggtagaaagaataggcaatccaggatagggaaatagaaatacagtcaaagattgtgggtgggcgttagtaaattaaggacatgtgcctgaggcttcctcttttcctgtcctagggcctctgactggaaattagaccagcctgattggactggtcgcctccgaatcacttcaaaagggaagactgcctatatcaaactcgaggataaagtttcaggtaatctttgcgggtgaccctctaacattaagaatattaatttggtgtgcttttataagtaccttcaatttggggactggaatggaaatactacttgttaattggggttctggattttggcttgctttactcaaaaaagtctttctcttatctgtcaggggagctctttgctcaggcaccagtagaacaatatcctggtattgctgtggagacggtgacagattctagccgctactttgtaatccggatccaggatggtactggtaagagaactgggattttgagtggaacgaagttaggaaaacaggtgaatgcacagccatgaaaagtgtttccgattgcatttatctttctttggtttacttcattttttcttccctttctctaaagttgctctagttgctaaaggaaa

SEQ ID NO: 8930 - DNA, 2300 bp, Homo sapien
cagaattttattttttattgcttttattcgtgcttttccatctttttaatgatgcttattggactccaaagtcctcaagtagtagcattgtcttttacttgctttggactgtatgtaacatgaggcatctaaatagatcatgaattattcttgttgattaataggtagaaagaataggcaatccaggatagggaaatagaaatacagtcaaagattgtgggtgggcgttagtaaattaaggacatgtgcctgaggcttcctcttttcctgtcctagggcctctgactggaaattagaccagcctgattggactggtcgcctccgaatcacttcaaaagggaagactgcctatatcaaactcgaggataaagtttcaggtaatctttgcgggtgaccctctaacattaagaatattaatttggtgtgcttttataagtaccttcaatttggggactggaatggaaatactacttgttaattggggttctggattttggcttgctttactcaaaaaagtctttctcttatctgtcaggggagctctttgctcaggcaccagtagaacaatatcctggtattgctgtggagacggtgacagattctagccgctactttgtaatccggatccaggatggtactggtaagagaactgggattttgagtggaacgaagttaggaaaacaggtgaatgcacagccatgaaaagtgtttccgattgcatttatctttctttggtttacttcattttttcttccctttctctaaagttgctctagttgctaaaggaaaagtattaacatgttatttgtaatagataagcacgagttcaagatgtggtaattcatatgtagacttaaataaatgaaaaacacatatctaacaaatgaattaacacatttggcactttaggaggccgaggtgggtggatcacctgaggtcaggagtttgaggccagcctgaccaatatgatgaaaccctgtcgctactgaaaataaaaaattagccaggcgtggtggcaggtgcctgtaatcccggctactcgggtggctgagacaggagaatcacttgaattggggaagtggaggttgccgagatcacgccattgcactccagcctgggcaacaagagcaaaactccatctcaaaaaaaaaaaaaagaatgaacactttttgcccgtttattgttcgtggtagtttttggtgggactatcttgaatcatcttacgtgtggggcagtcattcttactcttttctccatggtctataacagaggttggcaaacagacaaataataaatgttttaggttttgcaggtcaggtggcctctgttgcaactactcagttttgctgttgtagtgtgaaatcactgtagaaaatatgtaaacacattgataccactatgttccatgaaacttcttctacaaaaccaggctatggcaggataaagcccatgggctctatgtagtttatcgactcttggtctatgagaagatatttcacattcagactttgtctagttagggtgactgttatattttcattgggcaaaatttgccatagagcagcagtcctcaacctttttggcaccagggacccgttttgtggaagacagttttccacagaccggcattaggggatggtttcaggatgattcaagtgcatcacatttattgtacactttatttctattattattacattgtaatgtataatgaaataattatacaactcactataatgtagaatcagcgggagccttgggcttgttttcctgcaactagacgggggtgatgggagacagtgacagatcatcaggcatcagattctcatagggagctcataacctagatccctcacatgtgcagttcacagtagggttcacacccctctgagaatctaatgctgccactgatctgacaggaggcggagctcaggtggtcatgcaagtgacggggagcggctgtaaatacaatgaagctttgctctctcgtgtgcaactcacctcctgctgcatggcctggtttctaacaggccacagactggtgccgggggttgggggctcctgccatagaggatacttcctagtcgagtcttcctacgttttccacagggcgcagtgctttcattggcattggcttcacagatcggggagatgccttcgactttaatgtctccttgcaggatcacttcaagtgagtgaagcttgtccttagttacgaggctgaatgcttataggaatgctgcttctcacatgaatgggcagtatctcttttcctcctggtttctttgtttcttaaacta

SEQ ID NO: 8931 - DNA, 2300 bp, Homo sapien
tttgaggccagcctgaccaatatgatgaaaccctgtcgctactgaaaataaaaaattagccaggcgtggtggcaggtgcctgtaatcccggctactcgggtggctgagacaggagaatcacttgaattggggaagtggaggttgccgagatcacgccattgcactccagcctgggcaacaagagcaaaactccatctcaaaaaaaaaaaaaagaatgaacactttttgcccgtttattgttcgtggtagtttttggtgggactatcttgaatcatcttacgtgtggggcagtcattcttactcttttctccatggtctataacagaggttggcaaacagacaaataataaatgttttaggttttgcaggtcaggtggcctctgttgcaactactcagttttgctgttgtagtgtgaaatcactgtagaaaatatgtaaacacattgataccactatgttccatgaaacttcttctacaaaaccaggctatggcaggataaagcccatgggctctatgtagtttatcgactcttggtctatgagaagatatttcacattcagactttgtctagttagggtgactgttatattttcattgggcaaaatttgccatagagcagcagtcctcaacctttttggcaccagggacccgttttgtggaagacagttttccacagaccggcattaggggatggtttcaggatgattcaagtgcatcacatttattgtacactttatttctattattattacattgtaatgtataatgaaataattatacaactcactataatgtagaatcagcgggagccttgggcttgttttcctgcaactagacgggggtgatgggagacagtgacagatcatcaggcatcagattctcatagggagctcataacctagatccctcacatgtgcagttcacagtagggttcacacccctctgagaatctaatgctgccactgatctgacaggaggcggagctcaggtggtcatgcaagtgacggggagcggctgtaaatacaatgaagctttgctctctcgtgtgcaactcacctcctgctgcatggcctggtttctaacaggccacagactggtgccgggggttgggggctcctgccatagaggatacttcctagtcgagtcttcctacgttttccacagggcgcagtgctttcattggcattggcttcacagatcggggagatgccttcgactttaatgtctccttgcaggatcacttcaagtgagtgaagcttgtccttagttacgaggctgaatgcttataggaatgctgcttctcacatgaatgggcagtatctcttttcctcctggtttctttgtttcttaaactatttcattgtgaatataaatctccccattcacttttgtttccttaggtcatctttgtatctattctgtttcctttccttatagcctgcaatatatttcagatcccttgtgcagtagtttgaaatgatgctctgtcgaatttgccccgtcttttaggtggtagagggaggcctatggtaacagcagggctttatgtggggagtcgtgtgccactcttgttaccttatgtagctgacatgttttgtgacttttgcaacatttctttagcccacttgattttggtgcagctgtggttgacagcactgtgcacactgtcagcttcctacctcaagagcaagcatatctctccttttctgccttaggactctctgaagttatagaaagctaagagcaagctttaacttggaaagactaagaaactaacaccccctcaggagcagccctcaactgtggggaatgggaattggtggctaaataccatccttctggaaggggcaattctaatacgtattccgtgagatttctcagagagtccccagtggaattgaaccccagttgttttctttcttggcttttttcccttctgtttctcactcttttttatctctcactgtgttttctggaatctcatttcataaaagtaaatacacccaaatttgtatgtcagactctgctttcaggaaatctcaaactaagataacttgctgtgttcccaaaggtgggtaaagcaggaatctgagatttccaaggaatctcaagaaatggatgctcgtcctaagttggatctgggcttcaaggaaggacaaaccatcaagttgtgtatcggggtgagtatggtttttaaaaattttgttttcctgtgcttccataagcctatgacatctttctcttgctcttctttttttcttttgtagaacattacaaacaagaaaggaggtgcttctaa

SEQ ID NO: 8932 - DNA, 2300 bp, Homo sapien
gactatgcagggtattggcttgacagtggttctggagcccaagcagagtgagaagaacatcccttaggggtgggaaagtgtcctggcatggggaaccagagcgaggagatgtccactcctggcaatggcccagtgcagggtgtcagaggataagattgaggagggtgtccatagtaggggtagcctgatgtgagaggtcagagtctgagaggtaaagaaggcatctatgtggtgggatagtcaggtgcagtgagttggagtgcaagcagggtgaggagggcatccatgtatgaggttaccttctatagggagtcagagtcgcaaatggctgagcagagtactctagggccagcctggtatgtatgtcagcatgtgggagaggtgaggagggcacccatgcctagtgttggcccagttggggttgggactcagcacttaagcaggatgaggagagagagcatccttgcagagggtagacctggtgtggtttcagagaccaagcatgataaggagggtgtccatgtggtggggtagcccagtgagggaactcagatcctaagtagggtaagatggacattattgctgggggatggaggacctgcatggagtgtcagagcccaagcaggatgaagaaagcttctatgcagagggaggacttggtgtgggtttcagaaacttagcaggataaggaggtggtccatgtggtaggatagcccggtgaggaaatcagacccctccagggtgaggagggcttccacccatagggtgaccttgtgtggagcattagaacctaagggggtctaagtggtgactaggggaccagcatcaggaatcagagtgcaagcagagtgaggagggctttcctgcagaggaatggcctagcacagggagtcagagccttggcagggtgagggggatgtttgttgggggatgttcatgggggtggggagtgggctggccctttgccggcactctcagagtgaggagggagggcatccgcgcaggggatggtggcttggactggggagtcagagcccaactaggaagagagggacatcttagcaggtgggagattgacgacatccaggagattgatcaaataaggaataagtgaaagacaatgaaagcaggtttcttagtgtcacagaaaggagttaggaatgtgggaagggagaaaactagaatgaaacttgtggtgttagattggaattagaggaattagtgtgaactcatggtgttcaatatatttagatatagaaataatatagaaatatagacgtgtgtgtttgtgtgtgtgtgcatgcatgtatgcatgtgtgttatgcaggagaaggaatcagctgggggagattaaaaggaggatcatttgcggagagttgagggcagagaatccaggtgtgagctgggagcatgtctatggagagattccacatgaaggatttaatatttggagtgttttcttctaggcctttggaaaaagtcatatttagtactttgtttaagtttatccccttctatactgtgattctatataattctcctaactgttaaaaaatagtcatatatattggaggtgatgtggcgattaaaaggttagggaagcatggaataaaggctggccttccctctcctccaacatccagtaaagggagctgctttctggagattctagcaagatgaatgcagacttttgatagagttagttaccaacaaggaaacacagagagcatggaggaacagcttcagaagacatggggtttaaactttgccatccccaccatgctacaggaaactaattcgtgaaggtggggaggctgatatgtgagttttgtgtcaatgatactcttagaatgtggtactaacaagttgcctgatcagtcaaaattgatgagatgaatgcaacataagtctatgttcaggatgtttggtcaaaagtaattacatttgtgtgtggaagcacagaaattgtattttttactggtgaaaaacgcagttctccagaaagactctaagtgcttggttcttcttttatttttcttcctctttccgcaaccctttgagttcccacttttattgcatttgcttgcatttgtttcaaggctgtgattctcactatactggtcctgaggaaagggcttctgtgaactgcggtttttagtttttattgtggttcttagttctcatgagacccctcttgaggatatgtgcctatctggtgcctctgctctccactagttgagtgaaaggaaggaggtaatttaccaccatgtttggttcctgtttataagatgttttaagaa

SEQ ID NO: 8933 - DNA, 2300 bp, Homo sapien
tctgcatgatccaggacccaagattcttttatctcattctatactcacgtggaactttcattgtatggtgtctgatcaacccattgccaatgtcgctgaccttctggatctgagagccccacaaaataagcagattcttcttgcagattctggaagatgaaatcctgaggggggaaaagaaggagtcacagcctttacagtattcagcttaaactgaattcttaataccttagagaaacaagaagaaaaggagaggatccagcaacagctgcattagagctctacgtaggaatggggatctctggctgagcagggcagaatcaaagacatcgcttgtaagcatgatgttcagtacatacggaaggaatttttttttttttttttttttgagatggagtctcactttctgtcccaggctggagtgcagtggtgcaatcttggctcactgcacctctgcctcccaggcttaagcgattctcatgcctcagcctccccagtagctgggactacaggtgtgtgccaccatgcctggctaatttttgtatttttagtagaggctgggtttcaccattttggccaagctggtcttgaactcccggcctcaagtgatccgcccgccttggcctcccaaagtgctgggattacaggcatgagctagcatgcccagccagtatggaagcaatttctatgatcagaatgaattctcatctcaggtttacttcccctcttttcttcactaagggattacattcttcaaagttgtacatgagaaaattttggcagattcagtcattttcctttcataacttcagggattctttattttcattcctgagtgttgattgtgattcatcatgagttaactttatttcttttctctattcaacttaatacctcttctttgttaagtagttaatcatgtataaaacatttacatattgaaataacaaattgatatttcagactgaaacattttcatccttccattcaaccctcatatatttttaatgtcacaatttcttccggggaggttagttttactgaagcaggaaggaggtatggaatataaaggcttaggagccctttctacctattttattgaaagccttctgccacagcgcaaatatcccaaagtaacaaaaacctccttcttagccaagagagatatacaaagatcaggcagggctcacagccccattatctattagaaagtacctgctcttcttgagtgtttatcaccagcaggtgagcctccattctagcacagtccttctcactgtcttgccaagatgctgattcagtagaaataaagtagcagttggaactaaatgacttccaattctttgggcaacagctccaggctgtctctgtattgggaagaggggcacatacgtgcaatataaataatcactcttaaaagtgtgtgtattattaaaattaagagccaagagagagcacatggaagctggaactcccctccacactcagatgcaaccaggagcccctgcccctcaggtgtcaaggaagccaagtctacctcaatcaggcagtaatgaggcagggccccttttctcctgctgaagtgccatctgaaaagcccagctattacgaaaacatgtttaaataagatccagactctgagaatataatgcaaaaatatccagagttcaatagaaaataagtcattatgctaagaaccagtaagttttcaaatttaataaaatataataatcaatagatgcctacaatcaagacaacaaaaatggggccgggcacggtggctcacatctgtaatcccagcactttgggaggctgaggcagaagaatcgcttgatcccagaagttcaagaccagcctgggcaacacagcgagaacctgtctcaaaaaaaaaaaaaaaaaaaaaagataataaaattgttagaattatctgacaaagatttaaaagcagccatgattaaaaaaaaacaaaaaacaaaaacgcttcaacaagaagatacagacatgcttgaaacaaatgaaaaactagaaagtttcagcaaagaactagaagatataaagaaaaaccaagatttcaccatgcttggggcgccttccttccccatggcgggacacctggcttcggatttcgccttctcaccccctccaggcggtggaggtgatgggccaggggggccggagccgggctgggttgatcctcggacctggctaagcttccaaggccctcctggagggccaggaatcgggccggggtttgggccaggctctgaggagtgggggattcccccatgtcccccgccgta

SEQ ID NO: 8934 - DNA, 2300 bp, Homo sapien
aagagtcctttatgaaataagtatgctttaactttcttataatatttgtccctttttgtccctggcacagtctgtatatgaccaggtaatgacttttcattcatgtttgggttataattacacacaaatattctctaaagcccaaatcttattttgatattcgaggaagagcttacatggtaataatattaagggttacagctggtttcaccgaagctttgtaggccttctctaatatcttatttttttgaaggaatagctgttctgcttgaattatagactacataatacatgtactgtcaggtacattcatggaaggcagatggagtcatatgttactggagtcctgatgaacagatgtagaaaatagtccaaggaataagaaaaaagttgatattgaaaagtgcttgttgaagtctgtaaatgtgcattaaatgtggcagtaaaaatagacacaatgatgtttgggaattggggtctaaattctggagtccccagaatcatagagaaccttggttaggggagtaattttgtcaaaaagcaagaagaggcagtgacaggcagaatataattaaaagtattgctgggtcattttctaattttgtaattttgtcatatttttcaaactctgttgatcatttattaaattggtaaataaattataatcagcagggttattatgagggttaaataaggaaatatatgtacatctgtaagcacaatgtcacaattaatacaaagttaccctttttatttttcctggacttcatgtacaaatgggtcagtaaattttttgtttatgacacataattatcacttgtacataaaatgtatttaattatttttatatttttagcagggaaataatacatgcatgtttccccctgtctcaaacacatacattcatataaacatatgcacctatatacctacatatctatgtacgaatatatacatggacatcggtatttctcagcaaatatgtatcatgataatcagagatattgcaactaacaaagactaatataaaccacgattgcaagaattttagataccacgttagtaaaatatcagattgagctgctaaatttctcccacccctacgtcattttgtgttttctgagcatcctagaggattgtgactgtatgcacaggacagaaacaccatgactcagggtactcctgctaatttctgatgcaggagattttaagggctagattagcaggatgggagtgttgaccctctaagtgaaataaatccctggattgattacccccatcctaaaacagattttttttttgagacagagtctcgctctgtcaccctcgctggagtgcagtggtgggatctcggctcactgtaatctctgcctcccgggttcaagagattctcctgcttcagcctcctgagtagctgggattacaggcaagcaccaccatacccagttaatttttgtattttcagtaaagacggggtttcaccatgttggccaggctagtcttgaacccttgacctcaggtgatccacctgccttggcctcccagagtgctgggattacaggcatgagccgccacactcgaccctaaaacagattcttacttgattatttccaggttccaaggggaaatacaaaagtcagagttgagtgaaaataaaagtggagtaaagcttcagaaggctgtggtgggtgttggagaaacattgctagggcataaagctaggataataaaatctgagaaatcccagtgtttatctataggtggaaatcatattccacatgtggatggagtcagggatccctgtgttttaaaatcagtgagggaattgaatatctggacttgtgccaattaacatacaaaactccgtgcttttgatgttctcattcacaagatatctgtgttccttctttattagcaaccatagtcataggcttcctaattttgaccacgggaaaagaggagaggcctctgcgtgtttgtgtctgttggttaggctgtggtgcagctggtgtcacacttcagtgaaagtctggcttttcatcggttgatctgaaaattgtgcacaagactgctgtctcacatgttctttctccaacctcagcttttcttagtgcctaaagtgtctgcacatggaaatccagaggtagacagagagaaactgagttccggacaatgcattcactagtgagtaggggatgcttctttctactgaaattatacccatattgctggcaagtgggcatttttctccaatttgcatgggtgtttcatttttattcttttctgtttgtttgttttta

SEQ ID NO: 8935 - DNA, 2300 bp, Homo sapien
gaaaactttacttggatgaaccctttatttgtattttctgtgaataaacattcagccaagcaccaggcttgatgttcacaagaaaacagagtgataaaatgctgctaaaatggaaaataagagaggaaagccttcataagctaaataagaagggaaagtctttccaagggcaatgaattctcttggaataccaaatacttcttactggagaagttatgcaatgaaaaatcatgagaaatcctttcttcatagagcaacacttgtggcacatgtgagatttcacactggacaaaacatggttagcatcctgaaaggagaaaattctttagtggtaattcatttcttagttgacattaagtttctcacattgaggagctatcaaacttgaaaatcactgtggagaaacctgatagatttctcatcagaaaagtgagtcaagaaggtggacctctagaaaaaactcttaacacatactttagcaaaataattcagaaatttgagaaaatatctattcataaaaatgtggcatataaatgcataatagtaaagtgaccagggaataaattgaatgcagaattatataagaaatctcattaaacttttccaaaagatcaatacttacaaatattgaaagaatacaatctgttgttgaaaaaacttagtatgttggcgaagcccttgtttcatttatgcagccctaacaaatcgatttgcatctgcactccttgggtgagattcttggtcgagattctaccccaacttctgagtctccccagtctttaacagctctttcctcacagctcacctccctttacttcaacgtccactaaaaccacttgtttccatccaaccctcgagttgacacaccagggatcttcagccccacttgctagatttctcagtgtgtcattgcatagatttagcagggaaatggaggctgtatcaaagacccctagtatatgcatttgggtgtccgcagcccttgcctctgtctctgagcagttacctgggatcagagaataaggcagctcttctcttctatccctcagaaggctcttgaaattttgtccctggagcctctctaactggaagtagcagttcatctcatgacaccccacattttattcaggtgagtcctgagttattacacagagacagacacagctgtgctccttttactgcagtccagaagataaaacaccagcatgataaaacagccgaacctgtcagccaccttgcaagcctttcctatattcgattcaatgtacttttcccgaagcaaaatgaaagttctcacagaggggccctcctctgccttgtcctcagaattggaaaatgtattgtccgtgaaggagcctcagtactgaacctaaaactcaagagaaaatgtttcctgaatatcaagtgggatgacttgaaattttgccaaacaggcacaatcttaatacgatcggccttactaaggctaaatggccttatccgtggttgaagttgacaaatcaatatattaaaaaatctccacaagtgattgattttactctgcagccagggtttatgtcaagtgtgaggataatgagcaagaaattcaagcccttggcaaactggttggagaggcaaggactgtgtccaggcagagctcatatcattatttattgtttaatctatttaattaaatatgtaatttacccacaaactgtggctgacattatatgtactcctgagccacattgagatgtactatttgtgctatgaaattctatgggatttgacaaatgcatggtggcagatctccagccattattaaagcgtaacacagaatgcttctcttattcaagctcatcttccctccacatagagggaatcaatcgacttttgtatactgatttttgaatttgcttctttatttccatcttcttcaattaaagcacaagatatcgtactcaatttccatttgatcttccaaaagaaaagtactgaataatctacccctgaatttcagtgattcagactcaggtccaccgctaaggccaaacgtcctgtgctgccacctcatggcaggcagagggcaatgaaactcatctttccggccatgcagggcgcatgcgcggtctgcctcccgcggcgggccgggtctccagggaggacctgagtttttcttcacccatggtcagggaggcgccatcgccctggctttggggctggggcctccggggaggttccggtaggggcgttggagaggccgctctttttgcaaggcccgagatggcgggccctgcgcaggccgccctattccgcgccct

SEQ ID NO: 8936 - DNA, 2300 bp, Homo sapien
ctcctcctcgtggcctccagtgtgtgctggactgaccgaggggcagggcctcactgtgggcagctcactctgcactgcttccccctcagtggtggatctgtgaagctatccccagaaagattggggttctgctcctaccacttgaagttcacggcacacgcaggcaaacagcacctgaacatgtccaccaccttcatgggcaggtccaggccactggaggatgtgtccagagagacacccaggtccactaaccctgctaggcaagaggggtgggtcagagcgctggtctctgccctgggaacacaaatcctcccagcacagtgagacaacttcccccgaggggagtgaaaattggataaggtccccgacaaccccaagcacaagtggcttaaggtggccaagcagccacacggcctgggtgggacatctgaaaatgtaagttgacactttttctacatagccacaatttgttttttgttgttgttgttttgttttgttttgagacagagtgtcactctgtcacccaggctggagtgcagtggcacaatctcagctccctgcaaccttcacctcccaggttcacctcccgcctgtaatcccagcattttgggaggccaaggcgggtggatcacctgaggtcaggagttcaagaccagcccggccaacatggtgaaaccccatctctactaaaaaaaaatacaaaattagcgaagctaattcgtggcaggtgcctgtaatcccagctactcaggaggctgaggcaggagaatcgcttgaacccgggaaggcagaggttgcagtgagccaagatcgcgccattgcactccagcctgggctacaagagcgaaactccgtctcaaaataataataataataataataataataataataataataataacaagagcgaaactccgtctcaaaataataataataataataataataataataaaccacatcacacccaccacaaaccagctgtcagtgtgaaaataaagccaaatagcttaacatttctaaagactagctggggctaggcatgatgggtcaggcctggaatctcagcacttagggaggccaaggcgagaggatcacttgaggtcaggagttcaagaccagcctggccaacatggtgaaaccctgtctctgctaaaaatacaaaaataagccaggtgttgtggcgggctcctgtaatcctgtaatctacttgggaggctgaggtgggtgaatcgcttgaacccaggaggcggaggttgcatgaactgagatcgtgcactccagcctaggcaacggagcaagactgtctaaaacaaagactagctggagaatcctgccaggaaaaggccctcagactccaactgctctgctcactcgaagctggaagatgcggctctagagacgcatcaggaccaagccacgactccccacttggagaaatcaacgcggaaagagacggaggcaaaggagaaccatcgcactgggagaggcgacgctgtttgacacatcgtccctgtacctcccaaagccactgccctcccacacctgggcaacagtggccccaaccccaggcccagccctcctgcaggaaggaagaggactgaatggagggcgtggcagactgaaaggacgtggcctcctcaaaccccttggtaaagggcctctggggccacctggcagggaggggctggcacaccaggaagtagcctcctcccgggagttcagctagagcccaggtcctgtccccaagtggcctccagagccaccttttctgaaaaaagtacatcctgcccacccctgttccccctgcttaaggccccgcgtcctccctgagcctcctgctggcctctcacctagaagcgggggtagtcctcggccctccagccagggggtgcagacctggatgtgctggaaatgcttctggtggatgaggcggctgtaatactccctcagaggccctttgccttcacagagaaaagcagacactgccatggacccgtctctctccgtgccacgtggccccaggcccaagacactccccctaggagggatccttttcccagaagctccacccctcggcagctccagtcaggccccatccgggcccttccagaagcaacccaggagccccgagacctgcagggatgtgtgcaccctgacccctgacgcatagccctgcacctgcagccagctggcctcgggcttgaaaacatggcggggtaagcactggcctggcacccgaccgcccactgggtggacccagccttctgtctgtgttgtgcgcaggggacacgagg

SEQ ID NO: 8937 - DNA, 2300 bp, Homo sapien
gtggcccaggttggtcttgaacatctggggtcaagtagtcctcctgccttagcctcctaaagtgctgggatgacaggcctgagccccacgcccagccagcctcctgtgcgaggttgtgcgggactctgtcatggaacccagtatgccttcatgtgctggcttgtttgttgactctgtagttaacgggctgccccacgtgggcaggtactgggtcgtctgtgtctctgtgtgcaggcagaggctgctgcgagtgcatctgtgcagatggctgccaggaggggctgtgctcagggggagctggggcagaggctggtggcaatggggggcttgggtgtagtgtggaggcactagagccaggtggccgggctgcagtctgcgggagctcgggggtcgcttggcctctgtgtgtcccagtgtctttgtcggtgtgatgggacaatgacagcacaccctcacaggtgctgggggctgacaaatgtcaggtctgaggacagtggctggcccactacggggccagtttcccttctctatagtcaccctgctcgtcttccatcaactgggtgctcaggacagtggcgtggaggatccgcctgtacagcctgtgctccagcatcctgcaggccacagctgtgtccagccctgaccccgactgcccctcccaccacctccattttatagatgaggaaaccgaggcccaagggcttagggaaccgtgctctgaagcacatagtagggctgctgggctcagaccctccctccctgtgctgagctgccctcctcctgccgcaagaccccatgccccaagcccaccctgctcaccggcctgtgcccgagttccctgcatggtgtaggagtgtgggacatcctagcttttccccggtgcccagttctttcacttccactggagtcctgcagggacagctcagggaccatgcaggcccgggtgggtgtgtgggctcacctagctcggtggtgaacagctggcacgtctctgggttgcggacggtaaaggccacgtagacctcaggagcccgcttgtgctcctggcaggcagccagcctccgcaggaccccgaccagcgacacgatggcttctgggcaatacagcacgtctacggtgaaagcttcaggttactgaaagggacaagtggaaagttccagttcatgctgacctcagcagcagggcgaggccagagaggcagcggtcctatgagactattagatgccatttgaccatttgggccattagatggaaaggcaattacttgggtgaaaaaggagaacccttagtagagaaagctgcaaaagaccgaagcaaaagaaaaaaatctccagactcactggtgttccttaaaaaaccagctctggttcttggcctatctagagggctttgaatgacagaaagcctgaccctgccatgaaattcgtgtttcaggtgtctgccgattggtctgctggcttgcaggggtgggcctgtgtccctggccaccgctggacctgtgggtttcagggctgggacccaggaccacaggcagagctctgcttcaccagagaggggactgagtgtgcttgcaggggtgaggggttttcggtggcccagccaaataccaccttctctcatgggccttgtcctcgtcccagaagtggttgttttcctcctgtggtctctgaaggacacagggcatggctctgggacagagccatgtgccgacgactgtaacgggagtatgcctgtctccaccaagagggctgtggcttgaaggtcaccttaagaggcacccctgtcctttgatgtcaccctggaggcccagagtaactcttctggaagccccatcatgtccatgcctgacagcgtccattgttcccttttcccagagccaagagctgggtagagctgcaaggacaccgcctgcacagggtgcccggggctgggcattacctgctgcaatgacaacatctggctggaaggcagagagctgatggaccgtcgctacgtcccagtccagctgggccactgtcaccctggggctgtctaagttggcagtgatgtctgcctctaatgagaggccattgagaaagacattcccttggagctgctcgaggacccggctgtgagggtcgctgaagatgtatgcccgggggcggcacatcttgcagatggcaaggcctgtgaggccggcaccactgccaagttctaggacagtcctggcgggaggaaaggggaccgtgtcttcgactgcaccagggtaagcctgccttggtgccctgccctgtgccccgaggtcacctgttagtgaaggc

SEQ ID NO: 8938 - DNA, 2300 bp, Homo sapien
tgtacctgggacagtcttccctcacatgaggtttatagcatcatttatttcattatttatttattttttgagatggagtttcactctgtcgcccaggctggagtgcaatggtgcgatcttggctcactgcaacttccgccccctcggggttcaagcgattctcctgcctcagcctcccgagtagctgggattataggcacctgccaccacgcccggctaatttttgtatttttagtagagacgtggtttcaccatgttgaccgggctggtctcaaactcctgacttcaggtgatccacccgcctcagcctcccaaagtgttgggattactggcatgagccacagcacccggctatagcatcatttaaaatttgtgtctgccatgaattgttagttggtagttaacaaaaatagaccacctcatttatgtcttacagttagcattggtttttgtgttttctttatgcttttttttttaattgcttttaaaattgtgaaacagggtcttgttctgttgctgaggccagactgcagtgacacaatcttggctcactgcagcgtcaacctcctgggctcaagcaatcctcccactttagcctcctgagtagctgggactacaaacacgagccaccacagctggctaatttttaatttttaatttttttttttgaaatggagttttgctctgtcgcccagcaggttggagtgcagtggcgtaatcttggctcactgcaacctccacctctcgggttcaagccattcttctgcctcagcctcggcacccaccaccatgcctggctaatttttaaaaaatatttttagtagcgacagggtttcaccatgttggccagcctggtcttgaactcctgacctcaagtgatccacctacctcagcctcccaaagtgctggggttacaggcgtgagcaaccacgccaagcctaatttttaattttttttagataccaggttttgccatgttgtctaggctggtcttgaactcctgggctcaagtgatcctcctgccttggcctctcaaagttctgggattacaggcatggcccttatgtctggcccttaaagctgctttttaataacagctttattgaaagataattcacataccatacaatttgcccatttaaagtgtatcatttggccgggcatggtggctcacacttgtaatcccagcactttgggaggctgaggtgggaggatcgcttgaacccaagagtttgagatgagcccgagcaatatggcaaaaccctgtctcgaccaaaaatacaaaaaaattagctgggcatggtggtgtgtgtctgtagtcccagctactcaggaggctgaagtgggaggatggtttgagcccaggaggtggagggtgcagtgagttgagattgcaccactgcactccagcctggacaacagagccagaccctctctctaaatacataaataaagtgcataattcagtggtttttaatatattcacagagttgggcagccatcatcaccatcaattttagaaattttaattaccccagaagaaaccctgtatccattagcagttaccccttatttccccctgactgtccccacccctggctcctggcaaccattaatctactttctgtttctttggattttcatattctgggcatatatatatatatagaatcatctaatatttgtctggcttctctcacttagcctaacggtttcaaggtgtatccaggttgtagcatgaatcagcccttcattccatattgtggctgattaatgttccatcacacgggtggactgtacttgtttgcttattcatctgttgttgatagacatttgtgttgttgccaccttttgacaattatgaataattttgctacgagcatctgtgtgtgtctttgtatgaacaggcttgcatattttttgatatgggcaaaagagaaccagcggcagggggcctctgtggtgactttttcggtgatcttcgtgtactctgtataatgatcagccactcaggcttgggggcagcacttaaccttacatttctttctttttttaaagatagggtctctctctctgccacccaggccagagtgcagttgacgcagggcaggggagccccgaagtggagcatagcgtgtccggaactggtgggttcttggtctcactgacttcaagaatgaagccgcggaccctcgcggtgagtgtcacagttcttaaaggcggcgtgtctggagtttattccttctgatgctcggatatgttcagagtttcttccttctggtgggtttgtggtctcgctg

SEQ ID NO: 8939 - DNA, 2300 bp, Homo sapien
atttggggacccaatggatctaccatgacatgaacttgcaccaacattcacctgacctccaaaatgcctattctgactggtaggccctagtctcaccctagtgccagttcagagcctgtgtccagtgatcctgcacaagtctctagttccttttctcctgttcagtcatcctggtgaaaggctgggtattcctttgggggcaggctgggagaaagattgacagtataaatgtttggcagtggagcagagtcctttctagaggggacctggcttcccattcagacaagggactccgggtctgtgaactggcttatgtctggaaattgactggggactgtgactctgtttttaggattcagattagacttctgctcacctgacctagaacccttctgcaaacacagatccagtaaaaatgtggcaggcttcttatctatttcacttctaggaatgccacgatcagctggcaccataggtctctgcgagtcaggctattctggttgcagctttgactctgctgtcttttatggtaactgcatccaccttgcctttggggactgagtgctctgatcacttggtcccagcccctgtagtgtgcctatgtcagttatcctctttatatctcagtctcttcctctttaaaatgggcatcgtaatagcacccaccctcagggctgctgtggggtatagatggattagcatatggaaagtaatagaagagggtctcaaagtccatgtgtcgttatcagaattatttcatgatagggagagctggaggagggaggaaggtgctgagcagacccatgtgctctgccaccagtgtttcctgagcacctactctgtgctgcccactgtgagagctgttagggttgaaatagggagcacagcagggtaggggctgccatcaggagcttagtggggagaccattgtgcaacatggttccagcacttggggtggggaagctcagggagtacaggggcctaggatcctgggcagaatcatggaaaggacacagcctccccagcctctcctgcctcctctgcctccctggcctcctctgtttctgtggcctctcctgccttcctggcttccccttctaccccggcctccccagtctcccctgtctctcctgcttttgaggtgggccaggagctgctggtgctcacttagcctgtcctggactctgggtgtagcacctccatgtccagaaaatacccccgagttcagctcatcacacagccaaggaaggagctccacactgacactaagggtgcatcctgggctcattcatcagggcatgcctccaaaatatttctccacgtctcctccctttgcccacctgcattgtctctgtgcctcagccccggctgggggcctgcaaggattccctatctcctctgcccctgcacggctgggtccaaggccatctgtccacccaccacacctctctcaccttgcacaccacgctccagccccaccgtcctctttctgcttctttcccagcctctgggcttttgcacacgctgttccctctgcctgaacaccctccactgggctgagaacaacctctgagacttctctcagctgttgcttcctttggaacagccgctgctgctgtccctctcccagctccaagacctgctgagcctcctgtcttttttagttcccatgcacccagcacttctccttggcctcctttggcccaattgacaatgtccattctcaatgccttctcacccagcgctgagccccactgggtgaaggcaatgcctgtcatgttcaccacaatatcccctcccccatcaccacgcctggtccacagtgatgctcagaaaagatctgttggtaggcaatgggaaggtgcattcatgtcatcctgcaggcggaattctccacgagttttgagcagcctcggttttcctaccacctccaaatcatggaagacacagggtaagagcaaagacaaggtggctgtggccgatgtccaccctctcggggcgtcccttctcttctctcctccttgggcagggagtccatcggggtgcaacctggctggggtggggaggaggtgcagggcctggtcagagcgggcatggccacaggcaggagacagcgactgcttggtccggggcaggtgagcgcagcgcaggccagggccctacctgtccacggtgcgcgcgagcggccagcagagggcgccagaggaccacgagcggcccgcggaggagtccgcgccggccccgatgcccagctccgcgccgcgcggacccaccgagcccgcgctcagacgccccagctc

SEQ ID NO: 8940 - DNA, 2300 bp, Homo sapien
cctagtgccagttcagagcctgtgtccagtgatcctgcactggtctcattagttccttttctcctattcagtcatcctggtaaaaggctgtgtattcccttgggggcaggctgggagaaagattgacagtattaatttgtggcagtggagcagagtcctttctggaggggacctggcttcccattcagacaagggactctgggtctgtgaactggcttatatctgggaattgactggggactgtgactctgtttttaggattcagattagacttctgctcacctgacctagaactcttctgcaaacacagatccagtaaaaatgtggcaggcttcttatctatttcacttctaggaatgccacgatcagctggcaccataggtctctgcgagtcaggctattctggttgcagctttgactctgctgtcttttaatgataactgcatccaccttgcctttggggactgagtgctctgatcacttggtcccagcctctgtagtgtgcctatgtcacttaccctctttatacctcagtttcctcctctataaaatgggcatcctaatagcacccaccctcagggctgctgtggggtatagatggattagcatatggaaagtaatagaagagcatctcaaagtccatgtgtcgttatcagaattatttcatgatagggagagctggaggagggaggaaggtgctgagcagacccatgtgctctgccaccagtgtttcctgagcacctactgtgtgctgcccactgtgagagctgttagggttgaaatagagagcacagcagggtaggggctgccatcaggagcttagttggggagaccattgtgcaacatggttccagctcttggggtggagaagctcaggggcctaggatcctgggcagaatctggggaaggacacagcctccccagcctctcctgcctcctctgcctccctggcctcctctgcttctgtggcctctcctgccttcctggcttccccttccaccccggcctccccagtctcccctgtctctcctgcttttgaggtgggccaggagctgctggtgctcacttagcctgtcctggactctgggtgtagcacctccatgtccagaaaatacccccgagttcagctcatcacacagccaaggaaggagctccacactgacactaagggtgcatcctgggctccttcatcagggcatgcctccaaaatatttctccacgtctcctccctttgcccacctgcattgtctctgtgcctcagccccggctgggggcctgcaaggatcccctatctcctctgcccctgcacggctgggtccaaggccatctgtccacccaccacacctctctcaccttgcccaccacgctccagccccaccgtcctctttctgcttctttcccagcctctgggcttttgcacacgctgttccctctgcctgaacaccctccactgggctgagaacaactctctgagacctctctcagctgttgcttcctttggaacagccgctgctgctgtccctctcccagctccaagacctgctgagcctcctgtcttttttagttcccatgcacccagcacttctccttggcctcctttggcccaattgacaatgtccattctcaatgccttctcacccagtgctgagccccactgggtgaaggcaatgcctgtcatgttcaccacaatatcccctcccccatcaccacgcctggtccacagtgatgctcagaaaagatctgttggtaggcaatgcgaaggtgcattcatgtcatcctgcaggcggaattctccacgagttttgagcagcctcggttttcccaccacctccaaatcatggaagacacagggtaagagcaaagacaaggtggctgtggccaatgtccaccctctcggggcgtcccttctcttcctcctccttgagcagggagaccatcggggtgcaacctggctggggtggcgaggaggtgcagggcctggccagagcgggcctggccacgggcaagggacagcgacctcctgggccaggacgggtgagagcggcgcaggcccgggcccggcgtggtggcggtgcgcgtgagcggccagcagagggcgccagaggaccacgagcggcccgcggaggagcccgcgccgccccgatgcccagctccgcgccgcgcggacccaccgagcccgcgctcagacgccccagctccgccgagaggccgcttgcgcaggctccttcttcttccgcaagtgtaggcagagcccccggagccatggccagcccttcccgcagctccgaagccactggcaa

SEQ ID NO: 8941 - DNA, 2300 bp, Homo sapien
tattcccaataacatcactgctgggaaggtcttcatgaaaacatttaatgctgcttttaaaacaacaacaacaacaaaaaggctttagctaccgcacagaccctggagcaatttttcggcaagagtctatcaaacacgaatctgatctgactcaaggaggtgtcatatcaagtgtaaaaatccaattccaatgtccataacagcctttcttccaggtacaagaccctaatccagttgaagtgattttctattgattaataggctgggaatacacaggttgttggtttttgagatttccctccctgtgccttcatgctagctgtgaaagagtcaaaaggctcctaactgtcaaaataaaattgacacttggtcacagaggaaacagattataggtcaatcacattgatgactttttaactatgagaagccattaatgttactgaataagcaaatctgtttgcataaccagatttttataggctactgggaataaaggttttcctaagtaggtgatttgtacaacgatagcctttgggtctctgatggaacagctctgatgaggaaatgttcctttaattatgtggaaggccaattaccacgttatagccacattgttttgcagattacatataatttcaccatttccatagcttcagcactataattctggagaaaattcaggcaccaaggggacattgaggcacactatgctggagacaaagatgttttagcgaattcaatttaagcttcaacattaaagttattttgttgaataaaacaatgcaataatgagcttgtgtctgtcaactctatagtgcaggtaataacagctagagagagcatgtcgcgtctcctctttttaatgctcattcaagtaatacataatgctatagagagaaactttctctaatatgtgcttcatctcaggctaagcctgttttgggcaactgtccttcatgagaaaaaaaaaaagtaaaggatctaatttgggagccattcacaaaagtgctaccacttgatgtttttttatactctgagatttcttattcccagtgccaaccaggaatggactttctggagaagctcagattaatcactccttattagaggtgacagcatgctggcagccctcacagccctcgctcgctctcagcacctcctctgcctgggctcccactttggcggcacttgaggagcccttcagcccggggttgcatggtgggagcccctttctgggctggccaaggtcggagctggctccctcagcttgcagggaggtgtggagagagagacgtgagccggaaccggggctacgcacactgcttgcctgccggctggagttccgggtgggcgtgagtttggcagccccgcactaggagctgccggccagccttgccggcccgggcaatgaggggcctcgcacctgggccagcagctgctgtgctcgacttctcgccgggccttagctgcctccccgcggggcacggctcgggacctgcagcccgccattccttagcctctccactccgtgggctcctgtgcggcccgagcctccccgacgagcaccgccccctgctccacggcactcagtcccatcgaccacccaagggatgaagagtgtgggcgcacggagagggactggcaggcagctccacctgcggctcctgtgcgggatccactgggtgaagccagctgggctcctgagtctgatggggacttggagaacctttatgtctagctaagggattgtaaatacaccaatcggcactctgtatctagctcaaggtttgtaaacacaccaatcagcaccctgtgtctagctcagggtttgtgaatgccacaatcgacactctgtacctagccattatggtggggacttggagaacctttgtgtggacactctgtatctagctaatctagtggggacgaggggagcctttgtgtctagctcagggattgtaaatgcaccaatcagcgccctgtcaaaacagaccactcaggctctctgtaaaatggaccaatcagcaggatgtgcgtggggccaggtaagagaataaaagcaggctgcctgagccagcagtggcaacccgctggagtccccttccacactgtggaagctttgttcttttgctctttgcaataaatcttgttgctgctcactctttgggtccacactgcctttatgagcggtaacaccgagaaggtctgcagcttcactcctgaagccagtgagaccatgaacccaccgggagaaatgaacaactccagacgtgcagccttaagagctgtaacactctcca

SEQ ID NO: 8942 - DNA, 2300 bp, Homo sapien
tgttaatagaatgatctacattttagagactgcatgtgaatgattaagtatttcaaagcccttaggtaatgattggaggaaaccaaaataaccttctctaagataactgcaaattgttgagctgaaaaaggtggcaatgtaggagaacattcttcccctccttcttcttgcctgttggcagaacaacaatttacaaagacaaaggtcttcctgtcttcctttctacttttcccagctaaggattagctcctttacgatacttgtaaaaggatttagaagcagattttactcttcctgttaaaataccttcctgtatttcatttccttttggaatcgtgaagatactctcttctttgtcttttcactatcatcctaaaggaagtagctgaagccacattaatatagagagtttatttgggcaaaggatgaggacagctacccaggaaaacacttgtaggttgccttgggaagtggtctagagagcaaaggaaagactgaagattttaaagaaaaaagaatgaatctgaaaaatcatggaaccatcccaaatgctcatcaatcaatgagtggataaagaaactgtggtatagatatacaatggaccactactcagtcataagaagcaatgtattaatagcacttgcactgacctggatgagattggagactattatcctaagtgaagtaactcaggaatggaaaaccaaacatcatatgttctcaatgatatggggagctaagctacgatgacacaaaatgtataagaatggtacaatggactttggggacttggggggaagagtgggagggggatgagggataaaatattacaaatatggtgcagggtatgctgcttgggtgatgggtgcacaaaaatctcacaaatcaccactaaaaaccttactcatgtaaccaaataccacctgtacctcaataacttatggaaaaataaaaattaaaaaaagaatgaatcaggagagggagtgaattaaaaagttactcatcagtaaattatcattggtttacagaaaccacattgattagtaattagctgtatactgttaaattttagggttcagttagtctagaacctacatagcaaatggcttcaagaggtaaatttcgtgcaaggtggcagtgaggcatgactcctgtcatatctctctcatgagtccactctggacttgatagtttcaaggcactcacattcctcaaataacagttttttttttttttcgttctcagcactccatagatttatggctgtttgttaacatactatttaagcaaggcctgtaagccactgccatgaaagagataaatacatttgaactgagttctctcctgagtgatgggtataacacacattgataaactgctgctttttctcttgtttctctgccttttgttttcaggacagtgtctctactaagaatctatgaggacaagaaaacatcatatattttctgtgctacaatataaaattcatgaagcctgtttctgattttatatcacttcaggctcccttttgcctaatcagggagattacaaaatatcactgacatctgcccaatattagtctggatgcagtaagaatgtttcatcacctttgcagactgatttcagaatgtttcattttgcagtcacattccttaacaatgttcatgggttttgttatttactatgttacccttcatatctaaaccatatccatccaatcaaacttttgcttactacctaggacactgttcaacacatggattaaggcttgcataaaataagcagccaatgtaaaggttagttagggagcacttaatttaaccaagttctctaaatagatgtcttttaggagataaaaaattttctattttgcatgccagaatgaataggaatcagacagagaaattttatgttagaaactgaagaaatgatctaagtattcttgtcaaagttctcatgaatggttttcaatgtttctcaattcctcttttgttttttttaaccccacgtatcgaaatcactggaaactttagttgtaattgtgacttcttcttttgaggtacacttaatgttggaagtctcttagtcctataagagtgtgtagcagtttgtccctgagctctagcttctttaaatgaagctgagtctctgggcaacatctttagggagagaggtacaaaaggttcctggaccttctcaacacagggagcctgcataatgatgcaagagcagcaacctcaaagtacaggtgagtatttcctcagtttcagaggaaagtggaagtgtatggtgaaatgaga

SEQ ID NO: 8943 - DNA, 2300 bp, Homo sapien
gtggaaatttaagtaaatgagaatttgtagtaaattttttatcctaaaacaaataactcactttggccgaaaaatgggatgttacccaaggtcccctactgggccggcggagaaaaggacctgcctcctacaggggcacaaacaaggcagactaggacccagcagtcggccaaggcccaagggtctccagtaaggaaaatgtaaaatgtgagtgtgtgagactggcctaagatataggaagagcagtaaagagaagaaaactgacgagcagagggggaaaagaattattaaacatggtcaaggagcaaggagcacgacaaagcctcaggatttcttcaagggatactgctgtgccaggtctcaagggcagaaggatacaagcacaagacaccagggccaccaagctgatggggttactgagcctctggacagcaccttctgataggaagcaaggaagcacactacaaaggctgcaatcctggaggctgagacagtcaagagggagtggaagggcctctgctgctctgggaaggtatcttatagggcaaataagctcttactgtgtgcctaagagaaaggaagagggaagcgaggcaggtgtcatggccttaagaactttctagaggtttctatttattgacatttgacctagacctcttcatgagcaaggcgcagccttgggctacaggtaggaaagtcagcatcctactctctcctcaattccatctgttaatccaccaacccaaatccctcccacccccacctgaagtccaaataaggtaaaatgataaaatgatgtgctgttctctcaacagttggctgagtctgaattggagggtaggaagcatttgaagctctgcccatttagttccagaacaaaaaataagcagaggcaggaggtggagagcaaagacgctggcagccctgcgtctggtctttatagctgtgtctttggatttgtaggccactcctcaacttttcagctcccgcacgattccttagggcaagcgaccagtggttgacaccgcatatacacctggcttaaagttattgactcgctgccagttggagacccagctgtcctctggactcatcatcgcaatgattccatcaaaggaggagctggtgcagccatatagcatctctcagttacccttcatctgtagatatgcatctcaatagtcacaaccatcatattcaaactggtctatagtaccttgaccagtgaacacagcaaacaggcccacagatgccacaggtccttcagcaccgtctccagggccatcttctccaatgagaagagcaacagcaaggaagatggccacagcctgagcacccgcaggaagtaaacagctcgttagccgggtctcttcttataattccatcatgaggaccccattctcatgacctcatattaaacctaattacctcccaaacttttgacctccaaatgccattacgttggagggtagtgcttccaccaatgaattttgaggagatacagacattcactccctaacagtgctataaatgaagtcagggaccctgatggtgtctttatcacagaatcttacattttctttgtctttgccttaacacaactctttttgctcacctagaaagttcttgggatttaattaactgctctatcatctcttcctcaactcgaaaacaaaggttgctgtgtcttcacatgccatgtacacacaaggtatactttaaaagtttttgttcattgttcacattgtcttttgctctcttagactcaactttttattcagtccagagaactttttagtatagaactcaccccaagaatataactgcctttgaaaatataatattcacaaaaagaatttaaaaagaggggacatttactaaatttttattgggcataacaattatttcttttagggcgttgctaaattttttgtctaaatgaaaaaaaaaacaaattgagaaattccacatttcacactgatctagtgatctcaacatacttgtgggtttctactaactgttgtttggtattgctttctcaatttcctttttttttttttttcgcctcatctcccggaatgtatcaaaggaaacccctgtctttgaaaaagacttcttttgagctaactttcttatactggtacctttctaatctcactacaatatgtaacattggtgttcgatctcaagtatttctgaatatattcccctatccacagaaatatactctgggggaaaaaaaatagaacaaattcttgccgtcctgaccattgaacaagagactaattagacaatggggc

SEQ ID NO: 8944 - DNA, 2300 bp, Homo sapien
aattaatccccccccccaaaaaagaaatcattaagcatggtcaactttagaagaatgcactaaggatagttaagaaggcttttacttgtcacatgcttttcatagtattaatcataaaacatattactcgtataatttggggaaaatcaatgaaacaaaagatataaaaacattttggctggaaaaaatattaatttattgatttctgtttaattgtatattgataaaaattaacatacaattgtttagtaatattgatggttgctggttgattgtaattaataaaagatggactgtggtaattatgttcatcattttataattcatatagctcatccactagatagtttctctttttttactgatcaaaagctatttgctgagaatacacatattaaatatgggtatattctataatatacacatatataatttaaagatatttttaaaattgtattactataaaacagagaatgcagagaaaattgaccagtaccttgaaataataaaaagtccctttgagaacaagaatattttctcacacatggaaaattcgtgagtcactggatgtggggatttaccaagtcatgtacatcatacttatgcctcctgactcgtgaacttaaataaactgagaccagtgtgatcttattcttaagtatctttaagtaaggagaaggcacatatctaactattcttccagagaagcattaattcttttttttttttttttttgagacagagtctcactctatcgcccaggctggagtgcagtggtgcaattttggctcactgcaacctctgcctcccaggatcaagctattctcctgtctcagcctctcaagtatctggaattacagatgcgtgccaccacacttggctaatttttgtatttttagtagaggtggggtttcaccatgttggccaggctggtctcaaactcctgacctcaaatgatccacccaccttggcctcccaaagtgttggaattacaggcatgagccactgctcccggcccagagaaccattaaattctaatatctaattgaaattgctttttctgaccttcaaatacatttctcctactgtaggctgtaacatagaactaaaatccccaaataattgagaacaggagaattaaactgcctgctgggtctctgagacttcagaagctgcgttatgttgtgaaaaactaagctgagtttcaaagtggtctaatcacatgaggctgtcctgctgagggggactctagtagtcagcctagtagtagcagcctagtagtcagcataagataagagggacataaatccacaacattagaatattcaagagctgcaaatgaagaagaaagaaaaaccataaaagatgaaaaagaggacgggcgcggtggctcacgcctgtaatctcaggactttgggaggctgaggcgggcggatcacgaggtcaggaaattgaaaccatcctgacgaccacagtgaaaccccgtctctgctaaaaatacaaaaaattagccaggcgtggtggcgagcgcctgtagtcccagctactcgggaggctgaggcaggagaatggcttgaacccgggaggcggagcttgcagtgagcggagatcatgccactgcactccagcctggacgacagagcgagactctgtctcaaaaaaaaaaaaaaaaaaaaagatgaaaaaattcaggttgccatgtcctaaatacatacactatatgcccagctttgtgctatgttgtctaagtcttcttttcagttaccaaatgtgtggatggtacagatccaaagtgaaattcagagtgcagaggtgagctccatattgtcaaggaaaaactgggggatgagttatgccttgaagaaactagagacatttggtccaacgaaacgaaacaacatttaaaaaaaaaactctcctgtttccccatggctagcctatttgtgttgatgcttaccatttcataatttcctcattttgttgttacatggagtgaagagaactgacatgctgtccaataaacttccttgtcctccttatgcaagaaaggaaatcctgacttaatgcgtagccacagaacaagttaatattctacatctatcggagctgaacttcctaaaagacaaagtgtttatctttcaagattcattctccctgaatcttaccaacaaaacactcctgaggagaaagaaagagagggagggagagaaaaagagagagagagaaacaaaaaaccaaagagagagaaaaaatgaattcatctaaatcatctgaaacacaatgcacaggtaaaatctgca

SEQ ID NO: 8945 - DNA, 2300 bp, Homo sapien
tcagaatggtgagattttgttgacattttagatatggtgactaggacaaatctcaaataccggacagtatttgaataaggacataaaatatatgatggtgtaagccacaaccatacacaaaaaataacatttcagcagagggacctcaagggcagaggaaggagtgtgcgctctttgcgtgagcaagggagagagtggaaggagatgcagccagaggggtgaagcagagcagacggtagaggggcttgtgggccatctcaggctgctggcctatactgagagaatgggaagccatggagggttatgacaggggagtgacatgaccttaaatattccagaaggaatactctagttgccatgtggagaacagactgtaatcgaagaagggggaggcaggaaggccagttgggaagcaaaatgcaataatccaggttgcttggacctggaggtagtgagaagtggtcagtttgtggctatattctggaagcagagataacaggatttgctaatggagtgtgcatggaatttaaaagaaagagaggagctgagagacactctgcccaggttttgccaagcaattggaagaatactgctgtttattgagatgggaaagacggcaagaagagtaggtaaggcagagaacaggggttctgttttagacaggctggaggtgctcagacatccaaatggagattctgagagggaagctggatacacttgtcttgagtttcaagaagtggtctgatagatttgcctgtgtccccacccaaatctcatcttgaattgtagttcccacaattcccacatgtcatgggagggacccagtgggaggtagttgaacaatgggggtgggtctttcccatgctgttctcatgatagtgaataagtctcacaagatctgatggttttataaagggatttccccctgcgtgagctctctcttgcctaccaccatgtaagatgtcccttgctcttctgccatgattgtgaggcctccccagccatgtggaactgtgagtcaactaaacctctttcctttataaattacccagtctcaggcatgtctttattagcagtgtgagaacagacgaatacatggtccaagctagggctattgatttgaaaatcatcaaggtatagatggtatcaaaggcttgaggcaggaagagagcagagaccctagctgcattgcttagcattgcatccctagcacctggcatagtttccattaacagtaggcatgaagtatctactcagtgaataaatagaatgcatatgggctacagtaggagagagaaataaaatctttaatagaccaagttctatgagagcacaaaattaaagtcttttatttgaagatcttagcctgttttccaaattcagtgcagccagttagacactgaatctgtctggtgaaacaagcatttttgtattttgggggactgctgctgcttctgactccaaattaaggattttttttttttctaaaaaagatggctcatgcaaaaatcactctttggtgtaaatatctagtcttcaagcaattcttgtaatgcaatcagaaagaaaaaaatccatggtttgggaggcaaaatttttgtgttctaaattctatataactgagttcatttgcttaactgcaaagcaggagctgctagtgcctgtctgtactgaggttcagagagactgtgggaatatgggggaattagaggctatctgaggctcttcaacacaataacccaagaagctatttaaatgctctttaaggtatttacataaatattactattctcattgtgcttttattttgtgttatcatgattataattgaagtgtctactgttactgcctcctgatctttgctagctatggagcatggactgggcttttagagcagcagccccaaaggaacctaaacattaaagcagagctgccctcaatggtttaacctgtgtgactctgcctatgacagccccacccacccatcttcactggatccaaatcaggagcaaggccgttggggtacctggtgggggtgatgctgtcaggggaggagcccaaaagggcaagctcaaatttgaatgtgaagggccaatgcactgtcagactaagacagagaaccatcattaattgaagtgagatttttctggcctgagacttgcagggaggcaagaagacactctggacaccactatggacaggtaaagaggcagtcttctcgtgggtgattgcactggccttcctctcagagcaaatctgagtaatgagactggtagctatccctttctctcatgtaactg

SEQ ID NO: 8946 - DNA, 2300 bp, Homo sapien
aaactgcattctcaaaagtctttaaaacccaacaatatatggttgtcctgctcttctgccagttcctgtctcactacctctcctttccttctaggatgctactccctgcctgttctcttcttcagccctgctctgaacattctgttcctattttcactgccccaactccagactacctcctacaaccccaggagaacgccccctcccactgcctggggaggctctcctaaactatagcctctagccaggccagcacattgaggtcattgctctccctgccaaatgactggcctgagttcagtgtctccatctgtctgagcttcatggaaaacttgattgttgctctaggctctctattctatgtcctgccttagctatgtcctgctttgcatctgcttttttgtttcttctcccaacacccttttcttcccctgactctcctcagactagaatcacatctgttttctagtctcagccccttcactggggagcagatggaagaagagcaagttctggggcaggaagatcaggaagagctgggcgtagcactcagcttgttctgcggactgaccagattccatgtatcttagagatgtagcacttacagctccctcggaggtcccagaggtgcttacaaagtgcgatttgcttatttctgtgtccactgctcttttttcctctcaactagactccttccttccttctttccttctttccttccttccatcatacccccttttattttcttctagtatgtaatttattaatactatctgctctctgtctacctgtactcttctctaatttatttcatcagggagatatataatgtagactaaaggggagccaacaggaaacctgaaacttacatatttctatggcatacaaggtccaccattcctcagacttgagtttctgtaattcaagtttgctcttgaatccaaagcgggaatgttttagtggttgaaccactagagtctctgtgaataagaagaaatacaaagcctttaaaattcctgaatcaaggctgagcaacatagcaaaatcctgtctctacaaaaaaatacatctaaattcgcctggcatagtggcatgcacctgtagtcccagcgacttaggaggctgaggcaggaggatcacttgagcccaggtcaagcctgcagtgaactgtgatcatgccactgtactccagcctgggtgacagagcaagaccctatcttaaaaaaaagaaaaaatcctggatcagagaaagtgttatctacacattatatgatctaaggaaaaatattggtagaaaatgaggcaagcataataaccttgcctttcaattttctttgggcatctgattgcattttatccttaagagcccagaaacccagattcttagttaagctcaaacaaagccaaaagacaaagtaaggctggcacccctttcacagagcttctctacatttgaaaatgatttggagagttctgaaaagttcctcaactttttataaccctaaggtagccagccttcctcttggacaaaactcataaggtatctgtgttcgcttggttgtgagaatacataggatattccaaggggaaaaaaaacaagaagagtctaaatgtgtaggtcaagaaagaggcagagatgaaaaagaaatacaggaataaaaagaaatttgttagtgctgaagagacgaatattgaaaaagaaagtgagaaagaaggatgaaggaatgattcaaatatggaatataaggaggctgaggcaggataattgcttgaactcaggaggcggaggttgcagtgagccaagatcacatcattgcactccagcctgggtgacaggagcaaaactctgtcttaaaaaaaaaaaacaaaaaacaaagaagaagaagatagccagagagagagaaacagcatctataatgtgcattaaaacacaccaaggaggagacggaacttttcggtaagaaagaacccaaggaacaaaggggagctgggaccagatcgtgagaggagggaaaataggctaatggaagaaaggcaatacatgagctggggccaacacttccagggagcagcaagagctctcaccagtgtagtcataacatttggaatgagggtgtgagcaactgcaaattcccatctcccttctcattccagcctcattgtaacacacattctacgcctagcctggctttcttgctctccctcatctcattgtttcagcggaggccaaatctgaagtcctttccagggagtggctctgttcatcttattcgccagccaaagtaggaacagcgtaagag

SEQ ID NO: 8947 - DNA, 2300 bp, Homo sapien
ccaggagttggaaaagttaaagccttccttttgcttcagaagtttccaagtacccaggaactgagtaatgattccatctgagaactcaagcagctttttggacaagaggtagcacagcaaatccttgccttcttcacacagtccaagtgatgcacggcctcttatctactatgtattctcttttagaccacgaacaataaggtcttgtattcatatttaaaaaccaagaaaaagatttcttctcacagcaactagtgaaagatgaggtgaggcctgagcgaagcctgcgagtcatcctgctgtcagaggcatgtgaaccagagcaactccatcttgaataggagctgggtaaatgaggttgaaacctacgggtctacattcccagatggttaaggcattgtaagtcacaggatgagacaggaggtcagtacaaaatacaggtcataaagaccttgctgataaaacaggttgcagtaaagaagccagccaaaacctaccaaaaccaaaatggacatgagagtgacctctggtactcctcactgctacactcccaccaacaccatgacagtttacaaacgccataacaacatcaggaagttaccctatatgtcaaaaaaagggaaggcataaataagccacgccttatttttttttttgagacagtctcactctgatgcccacgctggagcgcagtggcgcgatctcggctcactgcaagttccgcctcccaggctcacgccgttctcctgcctcagcctcccgagtagctggggactacaggcgcccgccaccacgcccggctaatctttttttgtatttttagtagagacggggtttcaccatgttagccaggatggtctccatctcctgacctcgtgatccgcctgcctcagcctcccaaagtgctgggattacaggcgtgagccaccgcgcccagccagccaccccttatttagcatagcatcaagaaataaccataaaattgggcaaccagtcaccctcggggctgctctgtctttggagtagccattcttttattcctttactttcttgataaacttgcttttgctttgcactgtggactcgccctgaattctttcttgcgcgagatccaaaaaccctctccgggggtttggatggggacccctttcctgtaacaccgctatactgtctgggttcaggcattgaagttattggactgcagagggcactgcctcattcagttaagatgaaaagcgtcgctagagatcttcctgagacagccagggactctcattcccagcaaaatgccaattacggcagattttaatgtgtgaccttgaccttcatctattacggaaaggtcttctaaaaagttttgtgtgctacatctaaaagatccatctaaaggaaacaaacttacaatgaagcattgtgtattacaagccccttgttcctggggtcagagctgctgttcttcaggtctggtcttttttttttttttgagacagggtctcactttgtcacccaggcagaagtgcagtggcacaatcttgggctcaaatgatcctcccacctcagcctcccaagtagctgggactataggtccataccaccacgcccagctaatttttgtagagatggggtttcaccatagcatagggacaccattcttaggctggtctcaaattcctgagctcaagcgatccaccctcctccgcctcccaaagtactaggattacagacatgagccactgtgtctggcggttctggtcttcatataccagtgctttgagggctgctgccaatgtaaacaaacaattgtacaaaaaaaaaatatgttgaataagtgtggtataataagaaatacatttggtctttgggcctggttcctgtcacagagatcttaaaatccttggaatttcctgagtgataagagtgtcttttgttattcacaacaagcccctgatgttgcgtaaccatcagtcacacctgaacttgtgctacgttaatgcatgacgtaaggtgtggctcctattccggatgaaactgctcacgtaaagaccaagggataagaggactggaactatcagccccacccactgaccttcgggaagcaggctggagagggggctggaaataaagctctataaaaactcatgaacagtgggtcttgatgagcttccgggtttatggattcgtgggctgcttccacctgctaggagggtggtgtactctaactcagggacagaagcccctgtctgtgctcaggactcttgcagacctctttacctggctgttcatcttccataatcaactgg

SEQ ID NO: 8948 - DNA, 2300 bp, Homo sapien
cctgcctcagcctcccaaagtgctgggattacaggcgtgagccaccgcgccctgccctgaataacaacttttaagggcaagtggcaagtgagttaatagtcatacttcctatcctcagtttcaccagtacaacccactttttctggggatgcagttaccacgaattggattccttaagagtgggactgaaggaataggttaattaaatattattattgatcctctgtacatttttttccctgtgtcaatttcactgtgtttattttgtcagattttcagtgttagtatctctgtgctcaagcttcccttgatcacaaaatgcttctcttggtcttggagttgaatatactttatgtcccagggggctgaatatcagagtggaagtaaatagcaacaatttagttctgtagaccttatcccctttgttctcaagatagtgtatctatcttatagggcgtttgttcctctaaattttgtaaaccaactagacgcctatcctaggttactctcactgacctaacattataatagcactaaacactttgaacagcacttgatctgtgtcagctgttaaatattatatacttattaactcatttactccttatgacaactccatgaagtaggtgactatttttatcctcacttttacagctcagcagataaagatacagagaggttaagttactgcagaggttcacatagggagtggaaccataaatccaatccgggcagtctggatccagaagttaccaccctgggttatgctacatcttttaaaggactctcgagacgctgaaggaaattagtcaaaaaattttttaaaagcagaaaatgaaattatattgtcaattgactgggagaggagcagtgaaaagttgttggctgaggtcactgagacagggctgagaccagcaagaaggcaaactggtgagcacattaccgtacctcacacctggtgtctctggtgactgaagttatttggaagtgaatcttccatgtaaacctgggaggtcgtctgtagccctttttttttctccttaagaaaatgtaatagcgtagttgaacattcatattcttagcctcctttgggctatacttttattttttatacatagttttagaatttacaaaatgctcttaaaatatctcatttcattctcacaacgactccggactgtactcttttatcttttcacaacaaaggctcagaggaagcgtagcaactaacttgtccaaggtttacgccggtttctagggggcagagctggcgctatccaccccgcctgtatctccaaacccgcttcagccaggaaatttatcatgtggttttaaatttgcctctcaatatacagaggtactgtctttactccagtcccggataaagaccttctaggtatgaatgatctttgtctccatatctttgcctaccggagggaggaaccaccgtaagcggagactccgggcggcggccggcggaagggctgggcgggaggcgtcgggatgccggcaggaccctgcgcccgagggggtagggggctcgtgtcggggttccaggcgcagattgatggggcctaagcagggaatgtgagggcggggagggcgtacaacggaagggactaatctcgcggtttcgagttgggagcaaacctcgccccccaccccccccatccgtttccctttctcagtgaagacggtttgggggcgggtggggaggcgcgtcctcggagcgccctcgcgctcccttttcgctccccgcgcgcgatccatcgcctctcttcccccgaggccagcgatggctcgggtgcgggcgaggagctgggagggcggctctcgacgcaggtgtcagatccgctcggcagtgctcggcgcgctggcccggcccccagctcctccggccgccgccccccgcccgccgcgccgcggcgccaggagggcggggccggggcgcgcgccgctcctcagcaagcgggcgggcggcgttcggtctgagggagcggggcggtctccgccggcgtcgcgcgcgctgtgtgtgagcggggtcgcgcgcgcgcgcggcaggcgagtgagggaacgaggagcggccgggtgtgagtgtgtgggagtgagagtgtgtgggagtggggtgagggagaagctgacgggacgcgaggctgtgagaaactgggcgagtgtgcgaggacgcccggccagcctgcgggagccgcagtcggcggaggagaaaggaggcggctcccggtatcccgaccccctccccctcctctccttcccccacttccagccgcccggcggcccgcgct

SEQ ID NO: 8949 - DNA, 2300 bp, Homo sapien
aagtggtggtagtcagagtaccaaccccttgggtgcaaagtgatagtgacatcactgttttgcgccatctagagaagatgggatgtcggttaatgaaccgacctcaagccatcctgaactgcgttaataagttctggacatttcaagagttggctggccatggtgttcctctgccggatactttctcttatggtgagcctactaaagagcatacatagcctgaatattaaccactgatagttttaataggataaatttacagacatgaaagaacaccttatagaagtgtctttcagttttaacacactggacaggataattataaattatatcttaagatttgtttcatattatgggggaaaatagggttagaaaactttttctgtaaagggcaagattgtaagtattttaggttttataagccattaagttctctggtaaccctccgtaatgctgttgtagcatgaaagctgttatagacaatgcttaaacaaatgagtagctttgttccgatgaaactttattattataaaaacagctgataggtcaaatttgacccacaggccttagtttgccaacctctgtggtaaaagataattctaattttatgacattagtttttcattttcttcattaccattttgataactcaaatattttaatgtttttaaagaaagtaacactttagtaggtgtagcaatgctttcgaacttctggtaaaagggtttttttttttaaaagatcaatctgtggtagattaatactcatgtaaaatataataaaatgatcacagcagtgccagattgctataaaagcttctgctgcctaccctttttgtatttatctgaccacataacagtagtgaacaagtcctatccaggcataggttacaggaccacattctgagtagcactgctttaaacaatattttgctaatgtatttcctgcctttaattttcttgtttggaaaagatcaaacttaaatcagagttttccataaaggtatttctccaaataaatatccagtagagtgcttggagatttcatgaggctttacaaaggaacccttgtcctctccttattgttaatattttaaaaaaaaggaactcttccccctcaacccccaccaagcctgtatggcatgtgtggacgcagtttctgtttttagcaattgcataagaagagacagaattaatataagttgagaattctgtgtttttagtgctttggggatattaatagtttataacatgattgtacaattttgattttatgagaatggaaagaaggaaaaaaaggttaaccaaattaacaagtattacctttgttctattgatgaaggattaaaatttggtgaccaagtcataattttgcaacgctacacatttctcgtatttcacttgtttaatggactttttcctgtctcagcttttctctctaatcatgctgatttttgtagctacagtctatttttgctctaaccttgttattgtatcatttgtttttgggcaataaaaagaataagaaaggagacttaacccaggatgcttagttaccctagtgtagaaagaactctgattagtaatggagataagaaaaattggtgtgtgtgtgtttgttgataataaaaagagaatgtgtcagtgtgtgcagcatctcttcaaccttggatagatcttaaccaactcattcttcagttccttaatccaagcagggaattgaatatattaaagtaaatcttggggcttctgttatttgtgtgggagaataataaggataaaaacatgagaaatggcatagaattaggaaactctttagctgaaagatacttaagttagatatcagaatatgtatagattaagggagctattatttgttttaaactgatattctgttatattttcaacttacacatactttctccaagaaaaaaagttagccatcaggctcttaccttcaacttccttgtgctgttggttgtctttagcgttgataaaattgatcacaaaatacttctgctgctgtttgtcttaaatttttgtattgctcaaaccaggtggccacgaaaattttgctaaaatgattgatgaggctgaagttctggagttcccaatggtagtaaagaatacgcggggtcacagaggtatgtatgagttgttggtaaggtatatagttttgaaactattcttgcttattaatatggagtgactttgaagaatagttagagggaaattgttagatgcatgatacctcagacttacagaaggctactatgagttgttcagtttggctaaaagcta

SEQ ID NO: 8950 - DNA, 2300 bp, Homo sapien
ttctaaactccccttcccccaataatgcagctgtataatgaatggtaaatgcaccggtttggattcaggcacagccccagtctgcctacaggtaatttaactctttctcctttctttccatcactaggctaactttctttttttaaaacttcctttctttacgtactttaaaaagtaaccatgggtttgtcataattctcacttaaaaataatgcataaatgtatctagcaaataatatgattaaagaagagcttttgggggtaaagtttgacttggttatgatatactcaagacttgggaattttgtttagccatttagatgactccatttcttgcatatatgtctataattaagtatttcagagtgtgaattttttggctttgtttttgttttgggtttgtttgtttcttccattgtgctactctggcttaagctttttcaggggttggtgttccgaatacacagtgagctcacagtataaagacatcaattaggagttgacaggtatggaaaactagagttttgaaaggtaaaattaggctctaggttatatatatggtaaaaactcaacatagcattcattttaccttagtgcttctctctgtgactttataaaagtgaaagggaatagtaagacgaagataatacaaaaaaatttagttcttttaggagcaatgtgatttcagaactaatcgttttagcatttctaagatactagttctaacaaggagatgtgagcagtttgagattatcagaaaatcatggtttaaaccttcaaaaattacaggtttgaacagataggaggacatttctgaagcacaagatggctaagcacattaaccaaggacataaaatgtcagggataggactacaactcgtccattttaatagcctttctgttaggtaataaactaaactatcctctcctccgtctttaccccagtctacctacccattcttcctttctcctatacttcctaaagttttagttctgagcttttattattttgggatattgtcatctttctaataggtagaattttagtgaaagtaatcaggaccttttcaagatagacttctgcataatttcatcctgtggctttggacgtactatccaaagaggctgtacatccagcaagtcactagttagtgaataggaattcttggcgtgtaatgccatttcttgtagctgaaggaagacatgtgataagtgattaacctgttctgtgcttcagttgactcttataaggacagtcattccctttaagcatcttaagacaaaaatatttatctgttgaattggaatttactaacagagggaatttgaattggaatttacttccagctgcactcatgcaagaatttgtgatgtatactaaaaaataaaaaaaggctcattcaggagagccttgtactcagcaagagtggctaacattagagcatacagactatgtgattgtataaggcatggagagttaaacaacctccagtcagctgcctgtttgaataccactgacttgttaagaatgatcttgcttttagattttaccatattcaaacttattaggtgagccttatatagcatatatacctggctgctattgtggggtttgggaacatgaggggtggggtgaactgttgttgttttaggtttcagtcagacagacatccctgtgcctcagttcccagaagcacagcaggcctctaggagcatccgtgggaacggcgcagtcctgacatcaccaactctcctgctcaggctcatcccatatacagaggtcaaagggtggggtttgagatcgggggaaggaatgagaaagtagaagcaatgtcacttcagtgccactgttgactagtctttggtgcttatgtcagtatttgttttatttcctgatttttttaaagttggcaaaactacatatttttatcttgatgaaggcagtgggagggtggaacaaaaacaagccattactgctatttctagttcatttactggagactgtcccttaatagctaatgtagaataaatttgaaacatagacctagatgacaaaaagaatgggaatagaaatgaatctcaggatttgaacaaacagaagacgtttatgctgtgttgatgcccagttctacaactgctattacatttgtcattctgtctccccttttcccctaattcttttatgtatgtatgtatacagtttgaggaaatgtgcatctatggtcagtcctttttaaaagacttaatgaatttattactcttttgcaaaaaatatacccactgcttatatgggcatacaa

SEQ ID NO: 8951 - DNA, 2300 bp, Homo sapien
tccagcattcattcaaaagttccaagtttcaaatccaaattcttatgtggaaatgagttccttctacctatgagcctgtaaaatcaaaacaagttatttactttgaagatacaatgggggtttgggtattggctaaacatttttgttccaagtgggacaaataggccaaaagaagggttacagagcccatccaagttcaaaacctagcagggcagtcattaaatcttagactccatattccatatccagggcacactgctggcagggatggactcccaaggccttgggcagttctgcccctgtgtctttgcagggttcacccctctcaggtgctctcacaggttgttgagtgcctgtggccttttcaggctcagggtgcaagctgcaggtgcatctaccattcttgggtctggaggatggtggccctcttctcacagctccacaaggcaatgccccagaagggactccatgtggggcctccaatcccacatttcccctccgcactaccctagtagaggttctttatgtgggctccactgctgcagcaggtttctgcctgaacacccaggcttttccatacatcctctgaaatctaggcagaggctgccaagaacccaccactcttgcactctttgtacttgcaggcttaacaccatgtggaagccatttacaacttgtattatccaaagtggtagcttaagctgtacttcggcccctttgaaccctggctggagctggagcttccgagaggtagggagcagtgtcccaaggctgtgcagggcagtggagctctgggcctggcccatgaaatcattctcccctcctaggtctcagggcctgcaatagaaggggctgctgcataggtctctgaaatgtattcaaggccttttttcattgtcttgactgttagtgagaggtgacagcatgttggtggtcctcacagccctcgctccctcttggcgcctcctctgcctgggctcccaatttggtggcacttgaggagcccttcaacccaccgctgcactgtgggagcccctttctgggccggccaaggccagagccggctccctcagcttgcagggaggtgtggagggagaggcgcgagcgggaaccggggctacgcgcggcgcttgtgggccagctggagttccgggcgggcgtgggcttggcgggccctgcactcggagcagccggccggccctgcgggccctgggcaatgaggggcttagcacctgggccagcagctgcggagggtgtactaggtcccccagcagtgccagccctctggcactgtgctcgatttctcgctgggccttagctgccttcccgtggggcagggctccggacctgcagcccgccacgcctgagcctcccaccccctccatgggctcctgtgcagcccgagtctcctcgacgagggccaccccctgctccacggcacccagtcccatcgaccacccaagggctgaggagtgcgggcgcacgcaggggactggcaggcagctccacctgcagccccggtgcgggattcaccgggtgaagccagctgggctcctgaatctggtggggctttggagaacctttacaatccctgagctagacataaatacaccaatcggcactctgtatctagctcaaggtttgtaaacacaccagtcagcaccctgtgtctagctcagggtttgtgagtgcaccaattgacactctgtatctagctgctctggtggggccgtgaagaacctttatgtctagctcagggattgtaaatacaccaatcggcactctgtatctagctcaaggtttgtaaacacaccaatcagcaccctgtgtctagctcagggtttgtgagtgcaccaatggacactctgtatctatctgctctggtggggccttggagaacctttgtgtggatactctgtatctaatctgatggggacgtggagaacctttgtatccagctcagggattgtaaacgcaccaatcagcgccctgtcaaaacagaccactgggctctaccaatcagcaggacgtgggtggggccagataagagaatgaaaccaggctgccccagccagcagtggcaacccgcttgggtccccttccacactgtggaagctttgttcttttgctctttgcaataaatcttgctactgctcactctttgggtccatgctgcttttatgagctgtaacactcaccacgaaggcctgcagcttcactcctgaagccagcgagaccacgagcccgccgggaggaacgaacaactccagatgtgccgccttaagagctgtaacactcac

SEQ ID NO: 8952 - DNA, 2300 bp, Homo sapien
aaggcgggcggatcacgaggtcaggagatcgagaccatcctggctgacacggtgaaaccccgtctctactaaaaatacaaaaaattagccgggcgtggtggcgggcgcctgtagtcccagctactcgggaggctgaggcaggagaatggcgtgaacccgggaggcggagcttgcagtgagccgagatcgcgccattgcacttcagcctgggcggtagagccagactctgtctcaaaaaaaaaaaaaaagaaattacagtttagaggtcatgcagcctctggctccaagagtctgaacctccccaaattgctcctggggataacatcactgctgtaaaacctaagatcagtaattgagttattttgcaggccctgcactccatgggatcagctgacaccacacagaccagtcatctggcccaaccagttctgccatctcacccaggaacagaagacattaagaaaatctaacttcgaccctctatgattccatctccaacctgagcaatcagcactccccacttcccaagcccctacctgccaaattatctttaaaaactctgatccacgaaggctcaaggatttaagtaataataaaactccagtctcccacacagccggctctgcgtgaattactcttttgccattgcagttcccctgtcttgataaatcggctctgtctaggcagcaagcaaggtgaatccattgggtggttacaaaacggggtctcactatgttgcccaggctggtctcaaactcttgggctcaagcaatcctccagcttctgactcccaaaagctgggattataggcatgagccactgcacttagactaatttatattttaggtgacttctaagtattaccatcataaagaacactgtgggctgggcacggtggctcatacctgtaatcccagcactttgggaggctgaggtggtccctggagctcaggagttcgagactagcctgggcaacatggtgaaaccctgtctctattaaaaatacaaaacaattagccaggagtgttggtgcctacctgtggtcccagctactcaggaggtggaggtgggaggatcgcttgagcccaggaggtcaaagctgcagtgggctgagattgtgccactgcactccagcctgggtgataaagtgagactctacttcaaaaaaataaaaaataaagaaaagaaaaaaaagaaagaacagtgtgaaaaaactcagtgttacacttgtgcatacatgcatgctgtcctttttttcctcattaagaaacatttccagagtaggagttgctgagtgaaagaatatgcaaatctcaaaggctttggtgtgtattacaaaattgccatgagaaagttatccacattctattttctctaggactgtgtgtgtccctatttccatacagtcacaacaatactgagtagtattaattttttttttttttgagacagagtctcgttgtgtcacccacgctggagtaaagtggcatgatctcggctcactgcaacctccacctcccgggttcaagcgattctcctgcctcagcctcccaagtagctgggactataggcacccaccactatgcccagctgatttttttttctttgtatttttagtagagacagggtttcactatgttggccaggctggtcttgaactcctgacctggtgatctgcccacctcaaccccccaaagtgctgggattacaggcgtgagccactgtgaccggccaagtttactgcttttctattgaaactgttctcatacccgtgttcccaactacaccttaattgaataataaaagaaaataaggacattaaatgagaacaggaattggaatgagaccagaaaaaaagggaggagttcaaaatatgttctgagagctttaccattatgaatactcagctctggttttcccccaaaactggctgaaccagtatggatgttccaggcagaaacaactttaaagaagtgaatagtggccctaccctggtccaccacctaacctggtggttacagaaggaggaacacagtcctcctgtgttccaggtgccaggaggtgactgactatagcatcagtcatcactgcacaccctacctggaattagtatataaagctacgcggagcgatctctgcccctgaccctggaaaaatctgtctcacccacaaagatgtgggctcagctccttctaggaatgttggccctatcaccagccattgcagaagaacttccgtgagtgcttggtgtcagaattggtttattagggcagcggcttcttcgcctaactttctcaaac

SEQ ID NO: 8953 - DNA, 2300 bp, Homo sapien
ttcattggtgtctgggcattgaagagttaggtatttattgtagtcttggcattctggacttgtttgtacctgtcctccttgggcagactttccaggtatttgaagggacttgggtgtcgtaatctaagtgtttggactctgcagttcatctgcattagggaggaccccatgctcagtatctctgtggctcttgaaggctcatagaggtacctccttgatggtcttggataagatctggaagaattccagattaccaggaggagactcctgttctcttcccttactttctccaaaacaaacagagtttctctctttgtgctgagctgcctggagagaggggtgacacaagcacccctgtggccaccagcattgggactgcactgggtcagatctgaagccagcaccgtactgtgtctcacccaaggcctgtggtaaccagtacctggctactgcccatgtttgctcaaggccctagggctctacagtcagcaggtgacaaagccagccaggcttgtgtcctccccttcagggtggtgagttccccatgaccctggaaggtccagagatgtaatctgcgagccagggcctggagtcagaaaccttaggaatctacctggtgttctgttctactgcagctgagttggcacccaagccataagacaaagtccttcccactcttccttccccttttcacagaggagtctctctctgtggccaccactactccaggcccacaggagtactgcctggatacttccagtattctctcgaggcccaaagtctcctttcaccagcttgtggtgaatggtgcctggcctgggactctcttttcagggcagtgagctctcctctgacaaacagcaggtccagaaatggcatccaagagccacagcccataactggcgaccccaagggcctgcttggtgctgtaccccactgtggctgagctggtacctaagctgcaagacaaagtccccttgactcttccctctccttttctcaagtagaaggagtctctccccatagtcaccacagctgggaatgtgctgaatcactggaagccagcatgtctctgagtctcacccaaggcccacgacaagtactgcccagctatcactgctgagtatttagagccccaggggctaatcggaactcagcttccaaccgctgggatgggcagttcacccctggctaacgctggtctaaatgctccctccatgggcactggctgagttctgccctgtgtgctttcccctgtgattgggcagcattgcattctaaagccaagtcccacagtcactgtgctctcccgccctcaagctcatcgattctgtctctgtaccacagtcactgctgggggatggcggggagggggtgaatcagcaattcaagtgtgtcttttctaccctcttcagtgcctctttcagtgatataaagttaaaaccaggcactgtgatcactcttctgatttttggttcttatgacagtgctgttttgcgtgggcagttgttcagtttggtgttactgtgggggatgaggagggtggtcaatggaggcttctattctgcctcttgctctgcctcctgagctccaggcctgtgtttggactttaccttactctcagagcaggttttgtaaaaaagtaaaacctgttggggttttgctgactcagagcatgtgtgaggaaggaggagggatagaggaaagattctgagcaggaggcggagcgcggtggctcacgcctataatcccagcactttgggaggccaaggcaggtggatcacctgaggtcaggagttcatagaccagcctggccaacatggtgaaaccctgtctctacaaaaattagccaagtgtggtggcacctgcctgtggtcccagctactccggaggctggggtgggagaatcacttgagcccaggagtttgaggctgaagtgagccacggttgtgccactgcactccaacctgggtgacagagtgagaccctgtatcaaaaaaaaaaaaaaaaaaaaaattctgagccaggaaacatcccctttgctaatgatgcctgttcctttccagtgtatttccgcattgtcaccatggatagcaacttcgttccagtgaatgacaaggtgagttgggaggaggagaaggagtggcgcagggagaacagggaaaaggatgagagattctctagggtggaagtcctctcagcctgggcgtggcaaggcgaggccctctgggttggagactgctgtgtgcgtgggactggaagtgctgggcgagcttcagggagctagcctaaatcagcct

SEQ ID NO: 8954 - DNA, 2300 bp, Homo sapien
ctctgggctgttacttctgtttgtttttcggttcctcacagatcctagttcaaaagcttgaatcacatttatctttttcaggactctttcctgaaatgtattcttagaaattctgttattacttttagtgccaaaaaccacaattagtttgcaccaacctaatatttcactttacctcatactcaagcttactccaaacctaattctaatccgtaatgatctttgtccttcagataagagttaggggccatgatgactccttcctcaagaaccatctagtgtttctggtgatttatggcacaaatggaaccttcaaccagaccctggttactgataacaatggcctagctccctttaccttggagacatccggttggaatgggacagacgtttctctggaggtaagcatggacggaggaccagcttcctagaaaggaaggcttccctgaaggaaaacttcagaattttcctgtttcctattctcccctctgcttggaattacatctttctcactcacaagtcctgctctcccgttgacaaaaagttttccttagatgctttctgtttttaatatcaatcaaataaatagtccttacttggatgaaaactactatttctactaatacatcttttaacttacccccatctctatctgatcctatctatatatgaagttagagcagggaggaataggtgactcagagtctttttctttctctttccccttcccatcccctcattacttaataaaaacagcaaacaagagaactctagattctagataacttataagtatcaattatcaactgccacaacaatgcttcttatcaaacagctacaaacttcagtatcgtgcagcagaaagcattcactgcttgtgcatctggggcattcagtcaggcagctctgctgatttcgatttccagaactgtctgcagatcggctggccataagctgctgctccgcatgcctctcatgcaggagccagctagcccaggtatattcttatggcagtgatgaggtgcaagtgcaaaagctgatgttcagggcttttccaaacctctgtatattgcatatgtttttttcttttttttttttttgagacagagtctcactctgtcacccaggctggagtgcagtggcgtgatctcggctcactgcaagctccgcctccccggttcacgccattctcctgcctcagcctccccgagtagctgggactacaggcgcctgccaccacgcccggctaattttttgtattttttagtagagatggggtttcactgtgttagccaggatggtctcgatctcctgacctcgtgatccgcccgccttggcctcccaaagtgctgggattacaggcgtgagccaccgcgcccggcccctgttgcatatgttaacacccctttcccaacaaatcgaacagtgggcacagactaggagggtactggaagaccacatgctcaaggatgctgatctcggagggggcggggtgcgtgtgaggaattggagccattaatgagatcgttcaacctcaggacttaagcaaacacatactacttgccttgtggctaatttgactatttctttactctaggcatgactcagttactcagaaataattatttttcaatcttagtgtcttctgtgcctagttttcttatccctgaaatataatctttgatttctatataatctaagtcacgttcatctatcccaggaatatctgtgaagatacatcacccacaatttcctctcatttagtaactataattcagcccttctgtcgctctcctacataccaaaatattgctgtacacagctacgtttatggattctttatccatccttggctggaccgctaatgaaatacccacatgccattctcaggcagtgaagatttgagagaaagagctctatttgaaaaccgtaacaagtccgtggggtttccatggttggagcacatgctaaaattctctctctctcttttattctcagggaaagtttcaaatggaagacttagtatataatccggaacaagtgccacgttactaccaaaatgcctacctgcacctgcgacccttctacagcacaacccgcagcttccttggcatccaccggctaaacggccccttgaaatgtggccagccccaggaagtgctggtggattattacatcgacccggccgatgcaagccctgaccaagagatcagcttctcctactatgtgagaccgggaaacggggacgggtgagagtatgctgggaaggaaagagaatgagaagagtcagccagagggtg

SEQ ID NO: 8955 - DNA, 2300 bp, Homo sapien
acaagagcaaaactctgtctcaaaaacaaaaaaaaaaaaacaaaaacaaaaaaagaaaggataagagaaaggcatggttagtatgaatgcagagacaagaaaagagaatgagcctgtaatcccagaactttaggagaccaaggcaggcagatcacctgaggtctggggttcaagaccagcctgaccaacatggtgaaaccctgtctctactaaaaatacaaaaattagccaggcatggtggcgcatgcctgtaatcccaactactcaggaggctgaggcaggagaattgcgtgaacccgggaggcagaggttgcagtgagccgagatcgtcccactgcacttcaatctgggcgacagagcaagactccgtctcaaaaaaaaaacaagaaagagaacgaaataggggataggattatgaaaaaataggtgagatagaggttaaagttttagacagtgagaaaggtaattatgacagaatgaatataaaaataattctgaagtaataaagagaaatgatacaggagtagtgaactgagcaccagaatctgagagaagtttctcaactgatatcactatatcaatgctttatttcctctccccctcttgtcccaggtctatgggatgtttccattctggtatggtcactacccctatcaagtggctgagtatgatcagtgtccagtgtctggcccatgggactttcctcagcccctcattgacccaatgccccaagggcattcgagccagcgttccattatctggaggccctcgttctctgaaggcacggaccttttcagctttttccgggtaggtcttcttacccattttgttcttatgggaaagatggtggtgggaatgggcaaaggaaagttcatatctaagaaagcagagagactcatatgggcactgatgggaacaaaatcttgaaagaagcttctgacgtgtaaggtcgcctctgttggcccttatgcttgaagaagatgtccaacctagtcttcctctttttgttgtcctcaaacactgatttccatgagatcaatcaggagggaaaattagagaaggtagaccagaggtctcttatcattattataaaaaataatttgcacctattctatgagcaggatttgggatgctgtgtgacccaagtctgaccaggaggtccctgaggtcaggaactaggtcttgttcatctttgtattctctctaatgcctgacccttcataaggctcattgtatttttgttgaattgagtacgctgatatggtccctaccctcagcatgtttacagcgtaagtcaaatagtaaggacatagcgaataatatttggcagaaccattacatgtatgtaatgatgaaataagtttaactgaaagcctttcatgctagctggaacagaagccaaccagcctcagtggctgagtttcaggtaagaacacccaggttcaccattaattcaaaaagaatgttttgtttcaactctttgatggtggaattcctgggcagtagcccttgtagttggggaagggaccaccttaatacttatttctctgatgcctatcaggacgtgggcctgaaaatactgtccaatgccaaaatcaagaagccagtagattgcagtcacagatctccagaatacagcactgctatgggtggtaagccacctctgtggtctgtggattctctgagatgttaacagtcctggaactctgcagatttcctcttgcctcctgttcttgcactgagcctctagcccgagaatgctaatgggttgtgggtcacagatgcaggacagtttcccaagtgttctctctctggggagagcttttgaagcctgaagcttatgtatccattccccggccaaacctccttggctatcacttccctcgatggcctttgtgactagttagttcctctttggtccttcctccttgcctctgactggatgttctctgcttccctctaaatttctttctagtaatccctccatcccaatttatgtcacaacaagaagtctcctgtttcctaaagttttcgtattctcaatttcatcagcaggcggtggtcatccagaggcttttgagtcatcaactcctttacatcaagcagaggattctcaggtccgccagtacttcccagagacctggctctgggatctgtttcctattgggtaagtgatgactcaaaagtacagtaaagggccaggtgcatggctcacgcctgtaatcccaacactttgggaggcttaggagggaggatcacttgagaccaggagttcaagaccagcctgggcaacataatga

SEQ ID NO: 8956 - DNA, 2300 bp, Homo sapien
gcagcttagctgggtacctctggctcaaggtatctcatgaggttgcaatcaagctgtcagtcaggactctggtttcatctgaagactcgactaggagaggattgatttttcaagctcatcccaaagtctctgatccttacaggctgctagactgaaggacacagttcttgacctcagcttttggctaggggcctcactcagtatctcatcacatgaatctctctgctgggctgcctcatcacacaacagctgtcttccccagagcaagcagtttgagaaaaggggtgcacccaagatggaagctgcagtcttttttgtaacctaatcccagaagagtcattactttcaccctgttctctttaacagaagcgagtcactcaatccagctcacactcaatggatgtaaatatcaggatgcagggatctctgagggcccttagaggttacctaccacactggactagcctctctggcatcacctgggagcttgttagaaatgcagaatatgggccccaccccaggtctatggcagcagagtttgcactgttgcaagatccccattaaagtttcagaaatgctgatccaaatgggaatggacctcactggtacctctggcaatagggctaatggcttcccttcttctttctctcaggtcacattaactttactattagtacaaagattctggacagcaatgaaccatgtgggggccagaaggggtttgttccccaaaagggccgaagtgacacgctcatcaagccagttctcgtcaaagtgagttttcttcagaggtagagacagcaaccaaccgagggatgctcagcatctcgtcttgctgtgagttagtctctcacagcaaccatactccagtccaaccaggcagcttcaactttctccttccctggccccttgaacatttgcctaatccacacccacggcctatgaaagcacctaaaacccggcacctcataggcactcaacaaatgttagtttacctaattaaaatgtctgtcttcatcaatagctgcctttttcgtcccatcatgaagcccattgtcaatcttgcctcttagaagttgcctaaatgtgtctttggctctagcacttgcccagaaagaactttacagaaagggcccatccttgggttgacgcagagttcttctgagcttcagtgagaagctcttgtctgcagttctgagggaagccctgggggcacagcgaggggcctcccttccctttcctttagtgccatccctcctgatgttcatctttgttgtttttatctgtgtctctcttcatcgcagcctgagggagtcctggtggagaagacacacagctcattgctgtgcccaaaaggtgggtggactcagagcaggattggtggtgagaattcccttagagggcaggagattttcttttcattttttttttttttttgagacggagtctcgctccgtcgtccaggctggattgcagtggcacgatttcagctcattgcaacctctgcctcccgggttcaagtgattctactgccttagtctcctgagtagctgggactacaggtacatgccaccatgcctggctaatttttgtatttttagtagagatggggtttcaccatattggccaggctggtctcgaactcctgaccttgtgatcctcctgccttggcctcccaaagtgctgggattacaggcgtgagccactgcacccggcagcaggagattttcataggcaaaaggaggaatgcatagtaccagaaggaataggagagtctgaagtgccattcctcatggggctgattaactgggaggcaggaggaagaagagaaagtgtgcagcacgatgatgactctctgtggaatttattttcagcaagatcactatgaatagtacccagtgctttctgcatcccagagaaagcaccgagtacagaaatccctggattatagaaagttcttctaaaattttgtcttgagaacccctgccattccccatcttctattgtgtcacctttttttctgcatctcacaggaaaggtggcatctgaatctgtctccctggagctcccagtggacattgttcctgactcgaccaaggcttatgttacggttctgggtaagcagttagagattcttgactcagaaaggaaaaggcgaatggaggctgcaaaggtgtggagtggggcgggacatacggacctatccggagagtgtaactaataacaagtgatgaaggaaaaagagcgtattttatataggagggaaatacagtgtaggcaacagtacagatgggattaga

SEQ ID NO: 8957 - DNA, 2300 bp, Homo sapien
catgtccaaatcactttgatgaggctacagaaataactaagaaaatatatttcttgttctcatgaagattatattctgatttgttgaaattagccaatttcactgaagatataacatgtaaatcagacctgaaagaatgaacatcttttaataggttgcatgtttggtaaaaatgttaaaagcaccaagtttaggccaggtgtggtggctcacgcctgtaatcccagcactttgggaggccgaggcaggtggatcacgaggtcaggagatcgagaccacggtgaaaccccatctctactaaaaatacaaaaaattagccgggcacagtggtgggcgcctgtagtcccagctactcgggaggctgaggcaggagaatggcgtgaacccaggaggcagagcttgcagtgagccaagatcgcgccactgcactccagcctgggagacagagcaagactccatctcaaaaaaaaaaaaaaaaaaaaaaaaaaagcaccaagtttaaatatggtaatgacttaattgaaacttaaaaaaattatatggtactatgcctccctgtttcagggaaattcttggccaaagatcacaaaatactccttcttgctcggtcctgaataattataatatataataatatttttggaaagcagtgggtgaaatgtttacaactctcagtgacaggtatatgtcagaatcctttttcaatgaaatccttggctatcacaagaagtcatatatcatatattacccacactggtttttcagctgacagtgaggtccctttctttgaattgtctccatatgttcaagcagtaaaaaacctccctggctccagtccacaaaaggtaaacaaaaattgtttgtagatggtgaagctgcacagatagaacttcttcacagcttcaccagggtgggtgacctgtcttcctgttttgtaggacagtgataatgtcgaaataagaatgtatttttcatttgtgagatgaagaaatcgggtttttttttgtaatagatattttttgtaatagatattttacacgagtgagatataacaattttgttgaacacttcattcatttttctttccccttgtaatttatatgaattatgttttcagaatgaaacagttcaaatatcactgtaccatgctcacttagtgacagtttatctgtcttattcccagagaaataaaagattgtcacatggtataatggctaagaagccagcctgcagggaaggactttcctagggtcccttatactccttccaactgtcatgtagaagatcattacacagttaaatgacttcatagactgcaatttctagggctatcaagttactactgtttctcccccaaataaggaagctgtaaaatatatactgaacaattatccacttgcttctagcaataactcattctgaaactgttggtttctgaacatgaattgattaggttaaccaagtaatctgtggatgttcagtagtaccttgttgatggtgattttctataaaagcatgctactggctgggtatggtggctcatgcctgtcatcccagcattttgggaggccaaggcagccggaccacctgaggttgggagttcaagactagcctgaccaacatggagaaaccccttctctactaaaaatacaaaattagccggatgtggtggcacacgcctgtaatcccagctacttgggaggcttagggaggagaatcacttgaacccaggaagcggaggttgcaatgagctgagatcgtgccattgcactccagcctgggcaacaaaagcaaaactccatctgaaaaaaaaaaaaagcaagctactgtgatttctaggccagcttctccagaggaggtgggtatagttctctaaatacttaaagaagtcatcatccaagccaactaacaacaaccagatgtgtgggttatagagttgttcaaggttaattccaatggctcacaaaatggtaagtatacgtttggttgtttccctcaggatactgtagttgctctccaagctcttgccaaatatgccactaccgcctacatgccatctgaggagatcaacctggttgtaaaatccactgagaatttccagcgcacattcaacatacagtcagttaacagattggtatttcagcaggataccctgcccaatgtccctggaatgtacacgttggaggcctcaggccagggctgtgtctatgtgcaggtaagtagagatccatgagaatgagcggacattgggaaggagagtcggagagcatcttccccttaggccttctctctctctttct

SEQ ID NO: 8958 - DNA, 2300 bp, Homo sapien
tatatggagcacacacctttacatataaaaattaaactactggcccataatcagtatagctcgcctcatgatagattattctcaggctaaatttataacaggcactcaacaaaagtattcatcgcttatcccctaacattatctagtagctataggagccggtgacctagtaaataaaaaaaaaaaatctttaggggtggaatgtaactatatgcagtagcggtaattctgctccatttgtaaggagggtgaaatgcgatatggtcatgtaccctcttggtacacaagttccataggctatagaaaaacaagtccataccctctgatatctgcattccttattcttgttatagcttacaaatcttctttagacacttaacagtgataattctcccagggaaactaaggaagcacatgagtcatgtttcttaactttaatgttgtataatctgaaaattatctatagatgctttttttttccattggtgctagaaaattccgcctaggctcaatcgatatccatttctaaacttctgcaagaaagctttaactgctttgacatgccaaaaatccaggtgtgaattaaacaacgaatgctttacctcgttttcaccactagttctaccagtcagaatcttttcaaatcatcctcagccagtgcctgtcatccacggcctggtaacacaccctttcacctcctcataccccgtgtcttcgcttttccagtcctttggctgccctccggtttcttccctcacatacctgtctgactagttcctagaagcctggcagaaattgttctccgattttaatctggctgccacaaatgaaagaccttggagtccaaatactcctctctcaaagcaaaatctaaatggatataatttataagcaaagataacacttctgtttttttctctataaacaaaccatgcatgggcttttaaaggagaaaaggaagagtggattgacagagaaaataactgtttaggatagaggttaggaaaagactgagagcaagagaaaaggcatcaatcccagttgttaatccacgaggcatcccccagacccttctgtaaaggttaatgaaggcagtaaggcagttatctttgtttcgtgcactgatgcaatccaagcttccacggtttagcacatagtagacgctctataaatatttattgaatgttgaacgatgagagagtaattaaaaaccggtaagttgatatcataaatacaacgacaacggctcccctatcaaatgtttagtgttcccagagacagccccattgttctacatctcgttatactctggccttttcccgtttttgtcattcgaactcatatacatattgaaatcgaagcacacacaaatccctgaaatgacaaacttaaatgctatccaaaggaagttacattaggttgctgctttgaaaatgaagtcaactcctaatgggttagctgtttctgcagcattctttcccgccttcttggagttgaggtgagggattaaacaatcaaccttctctctcctttctctcattctcaaagtttttctcgccttttccttcctttcctttgcttcatttcttttcccagtctatcgtttctctaggggtcgttgctttgctctttctccctctctgtctgttggtccctttgatcctttctttctaccccttattcccagcagctccagaaaataccttctttctccccgtctcacgtcacttccctcccttctcccatctccctctcctctccgagaggtgcgttccccactagaggccagcactttcttagtttcgtccttccaaccggcgagcagaactcggagagaaagaagggggtaaaaaagaggagaaagagagcaagagaggaaaaaacccctgggcctggagcgcagaggcccgggagctgcgtcgccatggcaacgggcgccggcaggaaacgagggacgcgcgggagggagggggcggagggcgccgaggggaggcggagggacggcggggggggggtccggctgccccggaagcacctccccgcagccccctcctccagcccggcccgcagcccctggcctgcggcccccaccttctcggccgggcaggaagtgacaggcccggagcgagccccggaggcctggctgagccgcggccgggcccgcacccggagcggcgggaggggcggggagccgcggtcgcgccgggcgcctcccaccccgccctcggcgcccccgcccctccaggaaggggaggaggcgaggggagcccgccgcggaggccgagcgagcccccagccca

SEQ ID NO: 8959 - DNA, 2300 bp, Homo sapien
atgtgggcatgaacctgacacggacagccacacctgcgcccagccagacacttattagctcaggtaaattgtcattcctcatgtcattattctctcagaattcatgtgaaattttcctttttttctttttttgcctttttttctttgcctttttgttttttccccgcttctgttggtccttgaatagtggaaggaatgggaataatatcagccttgaacatattagttcagggtcaggaggacaagtgacagatacagattttatctgtttctaccaggcagtagtcagcttacaagttcccctgtccgctttcttaggctgtgagttcttcagttttatcactctgtctattcattcatcacatcttactgaattgcttactgttttctaggaattactggggatacatttttgaaaagtagattccctgtcttcatgtaacttagcatttactataagggatgaattctcacctcactgtttaatgtggttacttgatccagtgtatagcagatacagtacaatgccttagagcacttaagactaatggagaggcggggtgcggtggctcagtcctgtaatcccagcactttggaaggccaaggcaggtggatcacttgaggtcagagtttgagactagcctggccatcatggtgaaaccccgtctctactaaaaatacaaaaattagccgggcgtagtggtttacacctgtagtcccagctgctcgggaggctgaagcaggagagtagcttgaacccggttggcagaggttgcagtgagctgggatcacaccactgcactccagcctgggtgacagggcaagactctgatagtttatacttgctttcagactgcgggtaagatgtagttagatgtgtgtatcttatttggtcatgttgatttttgcctttttttgtttctagtaccttagttgttgatgtatttagataatttactcacaaaaaaattaagagttagttattactatacttggtatttatatactctagcagttctatttctaaattgctttatcatcacatgctttgatctctggacaatctggtacaatatggagaagtagagtttgtcactcccagtttacagtggaggaaactgagttaggtcagagctgacaggtgctgactctcaagactcagatggtggtctaagctgatgatttgtaaaatccaagtcatttgtgggaagacgttgacatctttaactctgtgggtatctcttctttcagtgaatattaagtgcttctgcagtgtcaggccctgggctgtgttttagggatgtgaaaatgaataaaacatggattcagcctttgagaaactccaagtctaatggaggaggggctaaccattcttctttgctgagtacagagtaaaagaatacaatatttaagtatggcaaagataagagacacaagaaattactcaggatctgaaatgactgagcaagggagttctttctctgagatctttaagactagtagtagttggtaatgtctgattgagtgggaagagtatggacgaagtgatgtccaagtttcatactgactagatttcttttcaccgcataattccaaaactaggttataccttggaaaaatgaatttacttttaatttagaatgattattattctctgctcttttttctctctgttgtattctgggattgttcctatagccacctacacacagatccagccccattcactgattcagcaacagcaacagatccacctccagcagaaacaggtggtgatccagcagcagattgccatccaccaccagcagcagttccagcaccggcagtcccagctccttcacacagctacacacctccagttggcgcagcagcagcagcagcaacaacagcaacagcagcaacagcagcagccgcaagccaccaccctcactgcccctcagccaccacaggtcccacctactcagcaggtcccaccttcccagtcccagcagcaagcccaaaccctggtcgttcagcccatgcttcagtcttcacccttgtctcttccacctgatgcagcccctaagccaccaattcccatccaatccaaaccacctgtagcacctatcaagccgcctcagttaggggccgctaagatgtcagctgcccagcaaccaccaccccatatccctgtgcaagttgtaggcactcgacagccaggtacagcccaggcacaggctttggggttggcacagctggcagctgctgtacctacttcccgggggatgccaggtacagtgcagtctggtcaggcccatttg

SEQ ID NO: 8960 - DNA, 2300 bp, Homo sapien
ggccttggacctcttggttagctatgattattctatggaaactaccataatattacagtagagaattgatgtttggggtacaggaagtcaggtagacaatttcccgggattttttgctttagtggggtgtgggaagtggaaggtcagatgttaggttgtttaggggaatggggaaagtgcattcacggccaaggttggagcttccattttcccatcttcaaactcattagtacccatgaaaattctgcctgtttcaagttttatattttaaaaatgaggtggagtaagtggacccgcatgaaaaagaactagagaactttaaagaatattcaaaccaaagtccagacttgcagcgttttttgtaagtgagaaaagtttagaagagttaaatcaggaaattgtccgtgatactcttggaataaacaagtagcaatggcctgagggatcattaacagataccagagtaaagtgttttgcaagggtaagtcagtctgtcctgggtatgaagatggataagagaaaagaaaatgttaggttttggtggggtttttttgccaaaaccacaatgacctttgcaccagtctagtaagtttgggaaagagagctgtctgtgtgttttcattcctagagcagtacaagcagcaggtgcattgaatttactcaattgtaaagtggcttggtgatccccaatttgttgtcattgatttgtagtgtaaaagacaactgtacttatgggaagtctagaaacccttgagatttgtgacctgtagaggccaaagaggtttcagaagactacatcaagccatcaaacagtaaagaggcaaggatggctccacccaagctgtcatcattcttttttaagttctttcatttccctcttcccaactttgtagtttgttctgaaagactcacctatacattagactacaagttacatataaatgaattttctgctgcagatgctcttgttacagagatattaaaatgtactatgtgttgcatatgccagagaatcttgtactttctggataattaaaataccatcgatttattacacattcatacgctttatctctttcctctctctcctgatcctacctgccctccccaacacacactctctcccaaaggatgttccctttctacagctgctggaggactggactgctactactactcctggctgtggcagtgagagaatcctggcagacagaagaaaaaacttgcgacttggtaggagaaaagggtaaagagtcagagaaagagttggctctagtgaagaggctgaaaccactgtttaataaaaggtaaatgagaagaaccttaaagagcttgagaaaatatttatgttaaagtcttttcttcttactgattttatttcataatgtgctctcttttatgacatagagcaaattctcagcccagtttttagttgctgtgtgcagttttctcatctttcacagaagtgtagctatttccaagactggatccaagagaccagcttgtagaaatttaaggattatttgacacctacatataataggactttagaaatatcagataaacatatttaggccgacacatgtcattataagtgtcaggaaccttcagatatataaatctgaagttggtccctaagaaacgagactatccgatgaacatgggcccttattcattggaacatggttactaacaggcattctaaaaataactagaatattgagctatcaagatagctcaagtgtgttttaataattcatcatcagcaataaggatggtctgtcaaggttatgaatatcttaaaattaaacaaatattcactcagccatgacctcaaataaataaatcgagcatgttgtttgttttgttttaattaaggaaagggatgctgttattcctgaggctgatagctagtaactctcctcttctttcttcccacttctctttacagctttgagagcactgtgggccagggttcagacacatacatctacatcttcagggtgtgccgggaagctggcaaccacacttctggggcaggcctggtgcaaatcaacaaaagtaatgggaaggagacagtggtagggagactcaacgagactcacatcttcaacggaagtaagaaaactccccttcctaccatcgattgactaactgatcccaagtcaatccctctgacaatcctgtatgtcttggccgtttctagtgtcttcagcatatcatacgtgtggttcggcacacctgagactgtaatataccacaggatgcctaattccacagctcctctgtaagccacagct

SEQ ID NO: 8961 - DNA, 2300 bp, Homo sapien
ctcatttcaatttttgccccagcaagaaccttgagctcagttctcagaggtgagaattctaacacagaaagcacccagaaagggcactgaggtctgagaagcaaggaagtgacccaggttgtttgcctctggtcggaaagggaaactacccctgcttccactctgacagcagacaagttaatcaacctactcaattgcatttttggcccattccccatttccaacatgaacagttcctcccctccagcccaatgccactctaggcagtcaccaagaggtaagatttctgaaatcaaaacttgaattaaccaacaaaggaacatcaattctagaacggattgtaacagggatttttgtcttttttctctgctgtatccccaagatctatattatatattctgtggttttggcacatagtaattgctcagtaaagctgtgttgagttacttgataaaaaataagtcagtagaaataacttaaatgctcaacattaatgtcattggttaagtagcaatgcatagaactaaatattatgctattaaaaagtttatttgtaaagtcaaggatatggaaaaatatttgatacatacatatctttttgagataggttctcactctatcaccaaggctggagggtagtggcaagaccatagctcactgcagcctccaactcccaggctcaagcaatcttccagcctcaggctcccaagcagctgggactacaggtgtgcaccaccaagcccagctgatttttttttttgaaagaaggggtctcactatgttgcccaggctagtcttgaattcctgacctcaagtgatccttctgccccggaatcccaaagtgctgggattacgggcatgagccacagtgtgggactgatacatttttgaaaaaaggaaacaacatatattcatgaaggaaatacacaccctcctggtgagtttatgtatgatttttgttttgttgttttctgtgttatctgatcacaaattactttcattttcaggaagaaaaaaatttaatttttttttttattggggcaacatccaacccagatatgattactacctagcctgaactgaatgtattactaataaacaaagaaatgcagaatggcatacagtcggtaaagcgtagtgcttgagagcatggattatggagactatttaaatactggctccataacttaatagcttgggacccacggtgttacttagcttctatctgctttaatttactcatctgtaaacttgggataagatacttcctcataaggttggtgtgaagaccaagtgaattaactatcgtttaaagcacttacaaaagtgccgggcaccaccgagatatgcatccgttagcttttattattattagactcaaaacactgtagtagttctaatgagaggggtaagaatcaaaaatccaggcacctgcatagagccagagaggcacacatagaagcaacgtaagagtggaagcggaatgaaaacatgctaaagccaggtacaagccacaagcgagggtccacaggaagaaattgttaattctgaagagagtgaatgcacgaagttacaggaaaaataacatctgaacagagtttaagaatgagcaggacttcaacaagtggctagtaagacataaggaacctacaaaagatcttagcaaaggcgcaaagattaccatcgtattgctcgtttcttcctactttgcagaagtaacctctggcgaacagaggtggttgcagagcatgcttatcaagcaaaataccacgaagcagtaaggaacgacagagataacagtaacaataataattcaccccaaggtactcaactggaaaaaggaaatacagaggagaggtgtcgttaagaaagccaggacgcacatcacggccccgtcgctgcactactctcgtctaggggtcaacagtggagtcgagactcgaagcttccacgcggcggaacagcgtccctctcaggcggcgaacgggctagggaagcgcccggaggagacctagcgtgagaactacaactcccgcggagcccgagggcgagctgcctgcgtaacttccgcttccgccacctgcccctctcaccctcttcactcgaaccctacccgggagcggtcaggcgcgtgaccccgcgtgaccggggtgcgcgagccgagaggccctggaagcgggactctgggaccccattgaaagaaaggcaaccagaaaaggcgaaacgacaacctcgatagtgattggagctgatggaacgagggcggagctaaagtcccagaatactggccaatcagagtt

SEQ ID NO: 8962 - DNA, 2300 bp, Homo sapien
aagtcacctagtctatggtattttgttgtgatagtccaagcaagtgaatacaagaatattcacattgttgtgtaccgtatctccagaacttaatcacactgcaaaactgaaaccctgtacccattaagcaacttccttttctttttccctccaaacttctttcagtaaccattcttctttctttgtctatgggtttgactactttagattcctcatataagtggaatcacacagtatttgtcattttgtgatcagttcatttcacttagtataatgttttcaaggttcatcagtgttataaagtatgacaggatttcctttctaagactaatattccattgtatgtgtagaccacattttgtttgttttgccttcatattaagggcgtgaaaatttgttctcagaggcagctaaactattgatgactctttttggcaatgttaagttttgctctgtttttggttggtgctactaagcaatgcatcacctctgtcctttctgttcagctcttggccctgcaggaactatctcagcttggacttgcagagttttgtcctatgtctgcgcagcctagaacttggccacagacatacagtgaattcctacagtcttaagggtgcctctctcttgtgaattatcctgccctgcaaattccagccatttaagcagctcaaaactccaatatctgcctcctcattttagtaagactgctgttctgtttaggattcatttttgtgctctgtactagaaagtggtcctagatagaaagctagggtgatcattgcactcacctttgtattctctcaaggatcacaatgctgcctgtgtgttcctgaaaatagctgccttgtgtgtcttgccatgtgttgtattttgattggagagtaagtctaatgccattctgtcatggctggaagcagaaatatatttgtttttattaatataaaacaaattaatataaagcactccctgtttctcttcttttatccttatgcagtctatcttgatgatcttatccactcttaagagtttcaatactctttctgtttccttactttaacttttgttttttttagacggagtttcactcttgttgcccaggctagatagagtacaatggtgcagtctcggctcgctgcaacctccgcctcccggtttcaagccattctcctgcctcagcctcctgagcagctgagattacagcccccaccaccacacccagctaatttttttgtatttttagtagagacggggtttcaccatgttggccaggctggtcttgaattcctgacctcaggtgatccaccctccttggcctcccaaagtgctgggattacaggcgtgagccaccacacctggcctactctaactttttattaacttttcacctactaaaaacaaattactaagatgttagaatgtatttgtttactttgctcttctttttagttatctttgcatgaagtataataataaaaaaaataagacaacaaagagaaaaaatataatggaatttctgatactgtgaagggtaaagaccatcacacaatttggacaaggttttggggaagatgtggtcatgtcatattcacaaaatatatctgggtaatagtctatttctcccgtgattccaggcatatgcacccaacagtccatttcgttattgcttatcactgcccaaaagttccaagaaatgatgaagtcagtctcatttggcatacatctactttttcagaaggaaacaaagcagagaaaaaattccgagagaaattcatagctagtaaccactctcacttttattttagtttccataactgaaattgctggacttgagagcaatttttccttgctcaacagaattaggtgagatggggaatcaatttaatatatatttagtgagcatctacagtgtcatggggcaaaaaaatagcaacttacaatattaatttctataggcagcccccaaatttgaatcatttcctgaaaaattacttctgcttttgtgaagtttcctgctagcagtttagagattgggctgtttcctcactgatacatatcccttcacacttctataatttaactctctcaactgcatgtgaaagatcttagctgaagatgactgacagtgttatttattccatgttagagttgcctacggcaacccaagcccagaatgactatggaccacagcaaaaatgtgagttaaccaaggtagcatggaagacgatgcatagcaacagtaggctatggatgaatggggagtagaataagtttaaagcagagggtgcagaagaattgag

SEQ ID NO: 8963 - DNA, 2300 bp, Homo sapien
ccaggctggtctcaaactcttggcctcaaatgatcctcctgccttggcctcctaaagcattgggattataggcatgaaccactgctcctggccagaattcttgattaaacaatagggtctaaataaatttaaaccccttttattctttttattcttacagggtagactcaaatattctatttctttccaactttatattcttgtcataacaacccagtattctctgaggcaaatggatgcttatgaccaactggcctgaaatgggggaatatagggttagtggtgagtcacatataagaaaatgcaagagaatagcagtgtatcatatttcaaaataaaatacaaactatacataaaactgaccccaacaagtatccatttcatttcctgtcgtgtatctatatgctttcctggaaagaataaacttcagttcacaaaatcagatgtagaagatacatcacttttaaaaattctacgtaattttaattccaagattcccatgccaccaggctggtgggaaatccagtttaagttgtaattaggccttttctccagtattacatatgaatttgagtgtaataccccaaaacttgagaaggccattgtatctccagtccactggggcaatgaatagcttgagcacctgatcattataatgacccagatgtgtatctttttcttttactctgcggtgagtttttctaagggaggaatcctattttgtttaattttgtattatagcatgggatattgtgcctggcagatagtaggcaatcagttagtatttcaggaataaacactcttggtcagtgatacagctaatgatttgcaacaagcatatccttaaagtaccttttcagtaacgatttccatatgaacaaagaaaaaaactagaaccaagaggtaaaattataatcctgttgtcttgttcccatagccatactctgatttcttttatgttctgtgccctggcttgatacttaatttgacagctaattataatgtttattaagctctgaaatatactttctcctggcctttttgtctgaagttgtttgaggtgtcaccatggttggaagttaagagcatggaagctagacttcttggtcttgaattctagctttgtcactaacttagtaactttgggcaaattacatgtctctgcttcaatttcatttgttaaggtagtacctatttcacaaggctgatggtggcagcagtggggcgtccagagctgccgctgccatcacgccagctgcagcagggaggggcgggcagcggcggcggagcagctgcgggagccgcagtggctgctgtgggacatctgtgcctcgcgtcccctgtgccttgagaccccaaagcagccgactgcgccgccaccatcctcgcgttgccgggtggggcgacgtgctccccggccaggagcctccaccgctccggaccctggccctatgtcgccgctctcgcccgccgccgccgcggagtgggagtggggaggaggggaacagtccttggagccggccccgggagtactcccggagcctgccgccctggaagccgccacgatggaccgggctgagtcgcccgccggaggggaagcagtgtagtcgggcacggaggggcaggcagagaggggccccaaggcggagctgggtccggggcggagcggtgttcgcacacaaagcgctggggctggacccagggttcggggccaaggcgagaagtgggagcggggcccgctttggggacccggacagcggtgtggccaccgcgcacacctccgacagcgccgcattcctgggccttgggaggaggctctgagtagggccgcctggggcgcgtcttcagggtcctcccggcactggggtgaccgccgagctagacgcgcctgagggctgagccccagggctcgtgatctgctcccggaggcgccccccaggcagggccgtgagccgggcgagggagagtcctgggctgcccctgagccccggggccacgggaagaacttgcagcgacgtcatccctgccccggacacagtcccgggcccagggaggacctggaacattcccttcctccccccccccccccccgcccccgcccatcagcccagcctgcaaggaggcgccaccggacctgcacactcaggagcaggtgagccagggacaagcaggagccccgccccttccgaactggtggagcaggagctcccagggtgcagctgcagccaccttgccgcggctgtggacattttctgtgctctcagaggcccagcaaagtcccctgcccactgcaggctcca

SEQ ID NO: 8964 - DNA, 2300 bp, Homo sapien
atgactcaaagtccaaataggagtattatattggatcatctttcttctggaactttgagccaggattaaaggatagctgtaaagtcaaggagatattctgatgcagaaatcagttctcacaacatctgattgatgtctgatgtctcacaacatctctttagtctatttttaaaatatataattttctttgcagtaagtattgcgacatatatttccattctatagaaggggaagcaaaacttcaggagtttttgaagtaggaaaggttaaagcaggaggattgagccaagagagtctgaggacaatcgtaggagtcctactcttcatttggcacaaaaatgacaatgcttagttaggcagaaggtgagtatggattgtataaactaagaactggaaaagactttgcagttcaaggaatccttagctctgtctccaggctagacaaaataagaaataaaagctatcacttctgtgtggtgcttatagaatagaattaacatatcagcattatgggatctttagggtgtcgctttcctggccagtctagtggcacctttgcctgagttttgctctgggcccactgggctgcttctgcccactcgcacttgctaccaacctggatcccggatccaagggagattgagacgggtggagcagaggggtgtgctaggggtgtgtgagcaagcgtggccactgtgcagtcacacacacaagctgctgcccaggttgggcagctccaggtgccagcacaggctctccatgaggtggctggaccaggcacacaacaaacagcttccccctggaccaggcgcatcacaagcagcttccaacagtggcactggcgaatgcagtgacgccaaccagggccccaaagagggagtcacagcccgggctcaaggagctcccaggtctgggcttctccgagggccagagctcttctctccctgtggggagcaaggggcatgttgcagccctgtttgtgttacagctcttttaaccttgctgtgcagctcctcagctcctgcatcaagcagacaagtggagaatgagacagatgaagaggagcattactgagcaatggaacagaaggataaggaagatgaagaggaaggagacctgcagttagtagctcatttccacagtaaggatgtcctttccacagcaagggtgtcccaacgagtgttcagcttctagcagaacggagaccctggagtggctggctcctctctgcaaacaggtcttcccattgagtgttcagctttcagcagagaggaggttctggaatgggtagtttctctccacaggtaggtcatccattgtcttcccatcctctcttccaatctagctgagtctgggggattttatgagcctcagagggaggaaatgcatgctgattggtccatgggcagccatgagtgggcccagggagcagcaccacaagttacctctctggtctgcaggcttcaagccctcaccagcttgagggtgggacttcactggggacccatccccttccacccaggaacctgtctgcctcctgctcccaggctgttcatgccaaggagcgcctgcaagtcagtgtccagctgtcttcagacccctctcagcctccctcccacgcttgttggtgcccaagttccaaagggggccgagacggcagggggctggcgtatcagcactgtcctgagcgtgtgcacgctcggccaggctgtgacagtacccaggctcggcccgaccttgctctgagttcagagtgggtgctaacagtggagagaagccaggcagccggagtaggcaccctggagcctgcagtgggcaggggactttgctgggcctctgagagcacagaaaatgtccacagccgcggcaaggtggctgcagctgcaccctgggagctcctgctccaccagttcggaaggggcggggctcctgcttgtccctggctcacctgctcctgagtgtgcaggtccggtggcgcctccttgcaggctgggctgatgggcgggggcggggggggggggggggaggaagggaatgttccaggtcctccctgggcccgggactgtgtccggggcagggatgacgtcgctgcaagttcttcccgtggccccggggctcaggggcagcccaggactctccctcgcccggctcacggccctgcctggggggcgcctccgggagcagatcacgagccctggggctcagccctcaggcgcgtctagctcggcggtcaccccagtgccgggaggaccctgaagacgcgccccaggcggccctactcagagcctcctcccaaggcc

SEQ ID NO: 8965 - DNA, 2300 bp, Homo sapien
catgactcacagggcatgatgttacaacccacttagatgctaacaccataatctgaaaaatattacctatattatgtctaatattggccacttgaagtatggctagcctaaattgatctatgttgtaagtataaaattcacaccagcttgtgaaaacaaattatgaaaaaaaagtctttaagatatcattaacaattttatattggctaaatgttgaaatgatcatattttggatatattggattaaataaaatacactattaaaattaatttaatgtttctctttatgtggttactagaaaatttaaaatttaaaattacacagggcgatcacattctatttctagtagaccacactgctgtaagctcaagattcaaatgtcaaactcctgtgaatattaatacgtgaatatcccacaagcacttactccatcttcccaaccctcagcccttctgtcctccttctgctcccaccaatctgtgtttcttctgtttcactcacccagctaaaggcaacacaattcactccgtgacgagccaggaaaatggaaagacacattttcctttattcctcacattgatatattcactgagcactataattacctcttaaatatgatataaatctgcaagctcttttcaataccaccacaaattccatagttcaaaatgccatcagctttcacctatattattacaccagctcccatctggtcttcctgcatcctggatcacctctttctagctgccctttcaaatttcaataagagcaagctttccaggaaacaaacctgaagtcaatccactgagtactcctctgaataccttaatattgttgacaaattcctttctgatttgaagtatcagaaaggaatatttcctccataccaaatagttttcatttcatgcatgtgccgtgattcttctccctcctttgcatctgtcattcgttatgcttagaaagctcttttcatctctttgttcttcgagacaaccactactcatacttcagagcttaatttacattttgctttccctcaaaatttttttaaaaggttccaggtctgggttatgtgctctcttatgtgctcccagagcatcctgaacttctgcaataatatgtttggctactgtattttatacagtagttttatattgtattttatactgtattttatacagtaggtgttatattgtattttatacagtagttgtttttctgtctgtttttgccccaacaagaatgtaaaatctttaagtgcctgttttcatacttatttgaccaccctatctctagaatcttgcatgatgtctagccctagtaggatcaaaaaatacttacaaagcaactgaatagctacatgaatagatggatgaataaatgcatgggtggatggatggattaatgaaatcatttatatgacttaaagtttgcagaggagtatcatatttggaaggcagtaaggaagtctgtgtagtcgatggtaaaggcaattgggaagtttgttaggcacaataggtcaaaatttgtttttgaagtcctgttacttcacgtttctttgtttcactttcttaaaacaggaaactcttttctatgatcattcttccagggcctggctcttcatctgcaacccagtaatatccctaatgtcaaaaagctactggtttaattcgtgccattttcaaagaggactactgaattctgatgtggcttcaaacatttaggttaggcatatctaatggagaacttgcagccacactgacttgtagtgaaatatctattttgagcctgcccagtgttgcttaaattgtagttttccttgccagctattcatacaagagatgtgagaagcaccataaaaggcgttgtgaggagttgtgggggagtgagggagagaagaggttgaaaagcttattagctgctgtacggtaaaagtgagctcttacgggaatgggaatgtagttttagccctccagggattctatttagcccgccaggaattaaccttgactataaataggccatcaatgacctttccagagaatgttcagagacctcaactttgtttagagatcttgtgtgggtggaacttcctgtttgcacacagagcagcataaagcccagttgctttgggaagtgtttgggaccagatggattgtagggagtagggtacaatacagtctgttctcctccagctccttctttctgcaacatggggaagaacaaactccttcatccaagtctggttcttctcctcttggtcctcctgcccacagacgcctcagtctctggaaaaccg

SEQ ID NO: 8966 - DNA, 2300 bp, Homo sapien
agatttagaagcacattttaaagcctttagtaaataaaattgcagcgtctagagtccaaggctcatgaaactggggcaaggagatgttcctgatagaccctttacatattgtgttgagatatcaaactgatggtagaattcaaatggtccataaacatatgaaaagatgtgtaaagtcattaataatgaaaattaaggcaagatactgcttcactcatcagattgataaaaagtaaaatgcctagcagagtaaaacgatggtaaatatataataaactgaaaatatccactgttgcagatgggtattcaaatccatgtaatactctgaagagcaatttaccaatctgatagatttcaagatgtacatacatatatagcctataacccaatctctgctatataccctagagaaagtcttgcaaatatgcttaagtagacataccgtatttgtagcagtattatttgtaatgttgaaaactatgaagaatccaaaattcagcactaggggaatagagtaacaggttcggccacattcatacaatagaatgtcgtatagatggtcattaaaattaataaattttatcctcattatcaatgctaataagtcttaaaaccataatagtgatgacatattttacaatatgtgcataccacttatacatataaaatacaaaacacaaaattatgctatatattatttacataaatatggattaaaaacataaacacatcttgaagaatacatatcaacttcctaatcccacaacattggaagggaaatgagattggagagaattacaaaggaaactccaaccatatttgtcttgatttatttctttttttgggttggtggatctggtaaaaactggaaaagcttctagacaaattttaaaagagcactaccattgccatctttcatttcttaagaagaaatgaccttaaacaaacttggcaagtgtttaattttattaaagttgggtgcatgtaaggtacgagtgtcttttatcttgctctctatatttgtgagtatatatatatataacatttcataatttaaaagaaattatttcattctatgataatgtgacaaaagaaacaaagatgtgaaataaaaactaataggaaggaatccactttcagcagtgtggccaggaatttgctctccaaagaagggatgattaggctgaaatatggagaaagagaaagaaagttgatttaaaaagtttcaagcaatacagtatgtaaacagacaccaatgtctgcagtctaaggatggcattaaatctgctggtggtttatatgtgatcatcattgtactacaagttctatgagagcatggatactgaatatcctgttcaatattgtattttcatcaccagaatagcacttagcacacagtatggctcaaaaaaaaaatctcagataaagtcaatgacatggtttaagggactcaaacgttagagtgctcagacagtaacaaggacagataggatcaactaagaatctgatcaggtcaatgctgtgaaatagacaagtgtgatctttgataactcctttctaaaatctctttgatcttttatctcttttatctttcattgatcctctactcttgaaatccttattttatatcactttcttccaggaccatgtactcaatcaactgctaaaaaagaaaacccaaaaaccctaaagtctatagttataactcactcagtcccagaaatgaatctgcaatgcatgagctactatcatggtaacatgtccctgacattctttgtcagcatcctttgtcacctgcttgtaaggattttgaaagagatggagaaaggtaggttgaaggttccttatcaggaggtttgctgtcaaagctcattctaaatggaatacaaattttatcttccagacatgcctcagtacctatcagaatttagccttgagaaaaatgaggcaaccactgagagtaatgacccttttagggaatctgtgctcaattctgaactctattcagaggccttggggtggggcttgtttgtacatagtggccacataaagcctggtaaactcagctggtctccagggcgaggctgagggcagagagttggacacaaccctgagatttatccctcacaatgcggaaagacagacttcttcatttatgtcttgtgctacttcttatcctgctttctgccagtgactcaaactctacagaaccgtaagtctcactcaagaccccttcctccagagtgcgtttcagtctctcccttgtgtcttcgctttgccttcctttgtaaatgccacct

SEQ ID NO: 8967 - DNA, 2300 bp, Homo sapien
gaagagatgatcaggagaccagttagaaagctattgagagcctgcaagagaaaggactagaatagtagagatggagagaagtgggtagattctggatgcaatttgaaggtggaatcgactagatttgtgcatggattgggtagggaagataggggaaagaatgtagtaaagaactccaaagtgtttctccctagcaaatagaagaatggatttttcatcatctgagatgaaggaaattgagggaggagcaggtttgtgaggacgagcagatactcagtcttaaacttgctgattttgatatgcctatgagacctacaagcctgtaagtggagagtgggcagttgaatacatgagtttgagttcaggaaaaaggtgtggatcaaagttgtacagttttggacacaagtacatagttgttattaaagccattgactagatgattttatcaagggatcctcgtatagagaagagagatctgcagactgagcattatcgtcaagatgattataggtggcacagagttgggtttttaatgataatttaaataaacttaaaaaagtgttagcttttccccttctctttcaatatagtggtaatttttgtattgctatattaatgatattggtaaaatactggttttctatacaagttagtaacctggagttcctcttaaaataacttgtttaagtaaaaacatgagtgcatttaaactgtcaattgaacagtaaatcatactagtgtcacacagatatttcaatattttgaacatggtttaggaagacatttgagaaacacagaggtatcagaaagaatcctgtcctgaggtcaacagccttagaccttattattaggcaagagcttttaagcttttaagcaagtcttttatttctctatgcccatttctttattcttaaaatacaataataataatttatcctaaaaagtactttctatttatttccctaagaggctcattccaagtgattttcatcagaacaatgtttttcttttttttttctttttttttttgctagaacaactcagcaaaataaaattcctgtttattgttggacaacattgtttcacacatacatcaaacaggccaaaaaataaaaataaacagcaacttcatagacaaaaaaggaaaaaaaagaaaccttttatctttggcctttttaaccatctcatacaaaccaactacttatagtacagctaagtacatacacaaaaaagttactggaatgctcggaataagatggtttttctgttgtcatttttgcattttttacaagttttttttttctcctttgagattataatgaacatggccacaccacaagtaaagtgagaagtaggacagagaacgctccgaaggctggtttggtcatccgagatcattaaaaatggccgaccctaacaatatgtacaaaaatataaaatgtaaataaaaaatacaagtttcctttttaaactacttttaagaaaaaaaaaaagcagggccttggaagttttggttctttttccctcccctgttgcaaattctcatggtttgggttgggtggtggagagcgcgtgtcatctgcgggtggcactgcccacggtgggcgggcgggcccctctactcgaaggtgaccacgtttagattctgagacgggaagtggagggtgaataggtcacggcggccttttttttttagtttaacttttccttttttgccgtctggtcatcctcgtcggtcttctgcttctgggtatcgacatcgttatcctcatcatcttcagctgcccgcttgcccgtagctgactcagctccctcatcttcatctccatcctcttcctcaccatcaccttcttcctccccaccttcttcctcttcttcatctacctcgttgtcagcctccggctccccattttcctcattagcattcccgtgagcaggggcgtctcttccattttccgcctcttccacaacttccttcttctcctttaagtcctcggtggtgatttcggagctggtgtctacggctgcgtctgacatggtggggcacgccggtgacgcgatgcaggggataaaaaagaaagcgacagttcagggactctggcgataaagctgccggagtccgcggcggcggaggcggctgcggcgagcaaggaggctgacgacgcacaatgcaaagacggcttttcagagcagccagtggggcaggacaatgtttttcatcaaatgtccttagatttggaggagggtaagagttgttttttttttctctctctctctcagagaaaagcatgcccccaaaa

SEQ ID NO: 8968 - DNA, 2300 bp, Homo sapien
ggagattacagactacgtttccatccttcaagtatttccctgcatggatactgagacgtagaacaaatgataaaaagaacatgatgaatgtgctttttgtcttattagaaagactcacacttaatatgacactatattaatattcagagatcaggccagtgggcttgtcaactgagctgtaattccaccagcctgctttagtcaatactgcaatggcgcttccttctatacatattattagaaactgccctagtggaaaataatcttctaccagcccagtcttgctttttatattagaattaaaatttttattcattaaaaacattattaggagagtgaaaggaaaagtcacagagaagaaaaagatattttctgtatatataattgacaagtgcttatacccagaatatattgaagacttccagaaataaattagaaaaagacctagcaccttacacaaaacatccaaatagctaataaatatatgaaaaggtacttggtctccagagaaatgcaaattaataccacaatgaaatctctacatatcctccaaaatggttaaagttaagattcataatgccaagttttagtgaggatgtggagcaaccgaatctctcatccaattgtgaaaatgaatcatcattatctactagaattcatcatccacagagcctctgtcccagcaatttttaccgctacataaatacccaggagagtgacagcaaatgtgcaaaaagtcacgtataagaacatttgcggttgcattatttgtaatagctctaaattgaaaacaactcaaatgtcccacaacaggatatgtaaattgtggcatattcatacaattaaaactttatagtgtttttcaatgaaatagaataatgttaactgcatcagtgtcaatgaatcccatgaatatagaactgagcaaaagattccacatacacacacacaaacacgtatacacaaacacattacaaatcatataattctatttacagaaacactggtgtgttcattctaagtcatccagactagtcttctttcttgctcttagtgaatcaccaatggaagttttgctcaggagaatgaaatgtcccatacttgtacatgcaaacactgggatccccagttaccacaaccccaacctgatgggtctcctaccttcacctcctcagccatactaaactccttgcttttctttggcagttgagaatctttctacttgacttgaagccttcacaccttttattatcttctgttgtattgttcttctgtatatgttctgatagctaacttccttactgccttaaacctttgctcatctatcagcttctcaatgaggtctaccctgatcacagcatttaaaactgcaaagtctaaccccaatcttatgatactcttgatctcccttgctgtgcctttttaaaaataacatttgtcattttatgacatgttataaaatgaacttacttatatttcttgtttattgcctgtctctcctctctggaatataaggcagagatgtcttgtttttcactgtttcttattattcagaagtatatccactaataacaagcattcaataattatttgttgaataaataaatgaaaagaattatgtgcccatgagaaacaacacttgctttttctttcttaaaagtatataaaaagatgaatggataaattgaattgtatgcatatatttaatatagaatgaagcaataatatttcaaggagaatgacttaagaataacttcagatgatgtgaagtcagtctttgtacaagcaatcacataacagagtcaattatatagttttatcagcagatcacagggccttctttctcttttgttagtgacatagatgaatacacacacacacacacacacacacacacacacatatattctgtataatcattaaaaatgtcacttaatgtaagaaagaatgcggttctcatttacattcttctagtttattattatttcttgagaaaatattgctgggttaattataaaatagattctggctgttgcgtgttagcgcgcgtcccggagtgcgcatgcgcagcggcgggggttgttccggcagcctttcactgaggccacccgccagtttcaaattcagtggcgtttgccctgattcccggggcctggctttcagcgtagcaattctgccggcgaagaaggtgagcgcagtgctgtgtggcagcagaggtccttaggacgaggaacagcgggacgaggaagggcagactggtgaaatcgcaaactgggcgtctgttccggcaccggacccct

SEQ ID NO: 8969 - DNA, 2300 bp, Homo sapien
gatactgctttaattttagtttagttttttttttttttttttcctgaaacacagcacattaggagttgagatgatggtattgactgtccttgtggtttgtgtgcaatttttaaccaggattcatggctggggaaacaaaagcacttctttgcttgcataacttttttcccttcctttattacttcaaagaggcaagatgtggtttgcattcatttcactgctaatattgctctcaaagatcgctaaagatctcttctccccttacacattccactcatttataacccagatcctcagtgtggctaatggagggtccctcagccctgtaacttctgtgcatgaagcagtaggtagtgggtccagttatgttaaacattaggtaatatcagtatcttttaaccttactatgagaatcttaaagatggaagcattagcctctgcttatgattgctgcaggcaagaatctgcaccaaccctcccaagagtataaagatcatcaccgtcaccgtcaccattgtaaggtcacagctcttcacagttcacttatctttttcctagttattctccctcctaatcattgccaaagtcttgggagataggtgtgaatccttctaggacgcagctgaaaaagttaaatgtcttgtcctagagcacacagctcagcagcaccaagaatgaaatgttaaatctggtgtttttccctctctgctgtagtgaagctctgctagagatttaccgaagtccttgatattttaacctagctatcaacttcagcccagagaaggtcttccaaaagtagattccaaaagtatattcatccatcaaccataaccttaaatctgaagccaggaactaaaaagaaattctcaaggtaacacaattgtcatgaagtctcactcccagggccaattataatctggatttttgtcttcatccttccaggtgtctctgatcccactgtaagcaaaccctgagtcctagggcctttcttccacttatttcactctttctgtacacattttccagtacctccaccactcaccaccctccaaaaagaactgatccctaagcttgtgcagtgattaacgattttcatgtcttttctatttgcctgcagttatgctacaagatctcttggcaaaggactagccaggcatgcctaatatatacattcgtgtgatttaacaaactggtttctaccactttcggcctgaagtgacagtgttttttaacgttggttgcaggcaggggactgttgccccctgccaagcacttcagcttccttgcccggcctctccttggcttctgtctgtccccaccagcagctcttcatgggacccatcctgaccctccaagaaagcagaaaaggaggttcctgatgcaaaacctaaagagctttcatctgaggaaggtgaatcctttttaaactatgaggcctggagagacgttaaaatgagagcaatcacaccctactccccgctttgagctatgtattcatctcttaaaactgcttgctattgccacaagtagctatgaattaattttaatttaggattattatagtgtctcaccagaagcataaaccacatcctataacttaacaataaccaattgctcatcaattttgtttctgtaatccaaagagagttcctgatcaacaactttgtaccagcccactctctcggtcccagtcttttgtttttaaaaacctgcttggaacaaaggctctaggaagctcacagccaagagtacttgggtctgagtcttccaggcagctgtcctcactttggctcaagtaaactctttaaattatgctttgcgtctcagcctctgccttttgggtcaacactgaggggagtaaatgaatggcacctgctccttctctgtctgaagcttggacttctcctgagaggacttcctgctccaagataggagggagtctcactcagaagaggaaggagctcctgtctgctgaggacacggttccatccaatgaggtcagcagggctatcagcagcttccgttaattccgttggggcaggcgtgtggcaagcagcagttatttgagctgaggatgctgggatggattttcacatgagcagttggcccttagatcatgagaccagcctaagtgcccaaggaaatggaacagcagggagggggagggacatcacacccactatcaaaacttcttgttagtctctggcttccacatccttccccaaaacttcagcccaattcacagccgcatttttccatctctttgccattcctccatgggagagctttctgttggtaca

SEQ ID NO: 8970 - DNA, 2300 bp, Homo sapien
gttccgatgagacacagtaggcagtacttgggagggtcttatagaccccaccctgtggaagtgggtctcaacattacacaaccccctctcgggcccgtggacagttgctgtcctctctgttttctctctttgtgcctgtgcccccctcagagaagaagaaaggagctgaggaggagaagccaaagaggaggaggcaggagaagcaggcagcctgccccttctacaaccacgagcagatgggccttctccgggatgaggccctggcagaggtgaaggacatggagcagctgctggcccttgggaaggaggcccgggcctgtccctattacgggagccgccttgccatccctgcagcccaggtgagggccctgcagggccagaaagccgctcttggctctcactgtggtctaggccatgaggggggtcctcatcacactgtagtttgggggatgccccccaccgtggtcaggttgatggcaccttaacccattctctcctgaggcgtgagttggaggaggcgcgtgggatcccttggggtctccaggcagcagggccagttggcattactggggatggtatttaggagccaggaaagccggtgcattcctagtgaaaccacagggagaggggggatgccaggagctgagaagagtgtgctgcatacatctatttacaaatggctttccaagtgatgctcccaacttccatgcctatgatgtgatggaggatgtcagtgatagaaccattcagttttccagtttttcctttttgtaatatcagtactcttaactggaaagctttccctaacttacacctacctgcagcacgtgagaatactgtcttctctgccacaacttctcttgatttttaaacagaaggaagaactgctaatgtagcagatgaaaagtagtatctcactgttacttggtgggtgcagtttcactatttccttgctacttctttaacttgagtgactttggaaacgggatatcactagtggaaaattctgtataatccagaaaaaaatgtaaggttttaaaagattcagggaactaagtaaccgtttgcacagcagctaaatgctcaccagcatacctgctgagctgtgtgggcgctggcagagaaactgaggaaagctgccaggccccatggtgtcccaggccttccctccggtctgtttgcctttagagcaagattagtgctataggcatttatacacaaataccataatatggcccaaaatctttacgatttttgaatttgtaaagtactttgaccatattttgcttttatgttaatagtattccagtgaaattccgtgcatggggacgctggagcccagaaaagttaagtgactcatattttctcaccaagcgtgggtgatggagccattcagttttccgatattttatttcttatatgagtattcctttaactggaaactttcctaacaacaaacacctaaagacctgcagagttgcttttatttttgttaccccagctccacgccttaaccctcactttgaaataggatgtgtcaaccctattttgcagatgaggaaagcaagggtcagagaggttagacaactcttccagagtcacacagctgggaagtagcagctccaggagcagaagctggggccgcttcctggtgcaccgatggtcttcaggtgttttgtggaaactcgggggcctccggggcgaccttgaggacatggacaaggctaagcaggggttcccttcacccagccctgcccttggtttactcaggagtcagaccagccctagtttcctgtgtttcatgtattggcttttcatgtgaaactcgaggagagcttgtccgttgctacaagctgttttttgaatgtctctacacagtccaggcaggaagtagaagcactcacatcaggagctcagtgtcaggcaggcaagcctcctgcaggggagccccgccctgctcaggtggcctcatctcccctcccagctggtggtgctgccctatcagatgctgctgcatgcggccactcggcaggctgcgggcatccggctgcaggaccaggtggtgatcatcgacgaggcgcacaacctgatcgacaccaccacgagcatgcacagcgtggaggtcagcggctcccaggtgcgtgggcctcccctccccgggccagggcctgccgtgaggtaaagggacttggatggttcctccagacacctgggccaagaattcctccggaggtggggcttgctacagggtgcacgagtcaaggtggtgacctcatcggaggctgaccatggctttccag

SEQ ID NO: 8971 - DNA, 2300 bp, Homo sapien
tctgagatcccctctgggttcagcaggctcagagagctgactgcctggagcagaaggcatggggtcctccagagactcccctgagctgagttcccctgtggacaccagggccgcctccttgtggcgctccctgaagggtcctctctggaagaactgtattggttccctggggctgctagaggaaagcttcacaaactggggcttaaacaacagaaactgacatcccacagcgctggaggctggagtccgagatcaaggtgtcagcatgcttggtcccttctgagggtcgcgagggaaagatctcttcaggcccctttccttggcttataggggcgtgttctccttgggtatcatgacatcgcctgccttctgtgcatgtctgcatccacgtgtcccctttccaataaggatattagccctttaggctgggtcccgtcctagtagtctcatcttaactaattacatttgtgacagtcctatttccagataaggccacattctgagatgctgggggttaggatttcaacacaggaatttggaggaatacaattcaatcaggcttatggacaattctggtcttaagtcaagagtagtcttctccagtctgtatgtggaggcgcacacctatggtcccagccacttgggaggctgaggccagagaattgtgtgagcccaggaggagttccataccagcctgggcaacatagcaagacctcctctcaaaaacagacaaaaaaagtggtgttccagagtgattagtttgctttaaaaaaaaaaaaacaaaaaaacaaaaaaaaaaaaacacaaaccgtaaacactggcactcgtgactgatcatcctgtatccacgcacgagctgcacgaaggccgcgcggtcactgtggctccccgttggcgagtacctgggatttcttgctcagcagtttggggccttaattcttttaggggactttttgtctaatgtctccccttcttctaattatgtgcgatatttacatagaatctgataaactgcttcaaatttgttttcagaacagtgagctggataattaaagaagctttttcctgcttcttgggcccagtttccatttcttccttttttctgtttttcctggctattctagtgctaatttccttcctttcctttcctaggctggccttagagcatcctctcctatgtacagccagaccttctttcaagcttttattaaaatggggaaaggtcatttgggaggctttgttgttttcctgtttctaaagatcatttttcttcctgcaggggaagtccttaagtcttatttgtggggccctctcctggctccgtgactttgaacagaagaagcgtgaagaagaggcacgactccttgaaactggaactggccccttacatgatgagaaagatgaatccctgtgtctgtcttcctcctgcgaaggggctgcaggcaccccgaggcctgctggagaaccggcctgggttactcagtttgtgcagaagaaagaagagagggacctggtgaaccgactgaaggtgagacctggggtatccggaagtgggagtgctggaggaaacagggcttcagcgattgttgtggggcgattccgagactcaggcagtgcatgctcccctgccgttgctgtgcctctcagctcttccctcagctccttgggtcgatggtgctgccgctgtgctgtctcttttgagctggaggtcagcagggccttctccacacaaggaactgttggtgcccatttattactcacctgggaaaggacctgatcgttgccattggcagcatggttcagtggctgcaaatggatctgatggagagcgtgtggctttgggaggagtgtgccgccttccacagtgagcagcgaggctgggacctgcagggatgaggtcccgggaggggatgcggcagcccttgagtgctggttggagaaggagagctgcccccagtgaggaggcgccgagctgagtggcccagactccttaggagaggcctggttttgggcttcctggtgattttccttcatgtctgcctcctgtaggcggagcaggccaggaggaagcagcgagaagaacgcctgcagcagctgcagcacagggtgcagctcaagtatgcagccaagcgcctggtgagcctcatttcttggggggcaggattatgtccaggcagggtcgccctgcttggaggctcatgggtgcgtggccagggtcttggtctcccctccatgaccctcactggctatgtgctcccgtacagaagctgggctgtgagtggttgaggcgtggatcctag

SEQ ID NO: 8972 - DNA, 2300 bp, Homo sapien
ggggacctggagaacctttatgtctagctaagggattgtaaatacaccaatcggcactctgtatctagttcaaggtttgcaaacacaccaatcagcaccctgtgtctagctcagggtttgtgaatgaaccaattggcactcagtatctagttaatctggtggggacttggagaacctttgtctagctaagggattgtgaatgcaccaatcggcactctgtatctagctcaaagtttgtaaatgcaccaatcagcactctgtgtctagctcacggtttgtaaatacaccaatcgacactctgtatctagctaatctagcggtgacctggagaacttttgtgtctagctcagggattataaacgcaccaatcagcaccccgtcaaaacggatcaatcagcactctgtaaaacagaccaatcagctctctgtaaaatggaccaatcagctctctgtaaaatggaccaatcagcaggatgtgggttgggccagagaagagaataaacacaggctgccctaagccagcaacagtaactcactgggattgtcttaccagagtatagaagctttgttctttttgttttttaggtctgcactgcctttacgagctgtaacactcactgtaaatgtctgcagcttcactcctgaagctagtgagagcacgaacccaccggggtgaacgagcaactccagtacacgccgtcttaaaagctgtaacactcaggcgaaggtctgcagcttcactcctgagccagcaagaccacaaacccaccagaaggaaaaaactccgaacctattggaacatccgagggaacaaactccagacacaccgcctttataaaactaacaccgtgagggtctgtagcttctgtcttgcgttagtgagaccaagaactcatcaattctggacacactatcaactttctgtttctccaagggtgcttcttaaactggatgattcacaccctaggagtgtgtgtgtagaatggggtttgaagcagtagggtaaaaaacctagcgtaccttctattccagaggtgtcaatttaccagacaacagttattttaaaaattttttatgcaaaaacatgttatagggtggaatgcaacatttttatgagtttgtgggccatttgtatacatctttggagaaatggctatttaaatactctgcccattaattctaaacttaaaactacgactccaaagaccctctaaggattttgctgggccacatcccaagaccctgaagggtattactcgccctctccaaactgccgaagtcggaagcaggtgacaaaaaagctgaccctggaatcacctttcgcaaatttcccacctccaagcttttcgatagtttgtaacactggctcctctccccaaaagccttcccttcaagtcccagcgactctccctgaccctgctgggaaggcgcaccaattacctgtcattccaggaaagctcatagcataagatgatcccattggtcatctcccagaaccagactttctgaaaagtccttaaggaccagctagtccaatccctcactgaataaaggagaagcaaagtctagggaggtgaggtgattcgttgtcctcctaattagcaggtgagctcctggcagggctggggtttcatcttctgggctctctgcaaggtcgtgcccggcacgggccaggaacaatttcataaactcgtcatctagacggcctttgactgacaccatctctccgtgtggaggagccgctggggtgcgcggggcaggtgtcgtccgtttcagaagtaaaataacccagctgcagatctccagaggccgactagagccggggtcagaaaacaggttttccctctcggggacagtgcccaggggacgggcattagaacatcggctgatgtttcatctggtcagggaaccatccagggattagtacacctggcgctaatcggcggggattaatctcacaccccgcagctggcggaaagcagcgggaggaggcacctagccctggggttgagatccaagttcctgcgcgcgcaaaccacgcccctgtggattctggctgctgcgtgttcgcgcgcgtcccggagtgcgcatgcgcagcggcgggggttgttccggcagcctttcactgaggggacccgccagtttcaaattcagtggcgtttgccctgattcccggggcctggctttcagcgtagcaattctgccggcgaagaaggtgagcgcagtgctgtgtggcagcagaggtccttaggacgaggagcagcgggacgaggaagggcagactggtgaaatcgcaaact

SEQ ID NO: 8973 - DNA, 2300 bp, Homo sapien
acgtgattttctccctcacatttttaaaattcttattgtaaattctccattagaaattctaatctatagtaatctaatttctggttgttaatgctgtgtagatcaaaaccaccattcatttttacaagagcataatgtaattaaaatacaatataaatgctaactggcatgacctatcacggactatatgtttggcatatgccatatcccaaacgaaggccatgttatcattaatgccaccttaattatttgacttctcgctgggtccttcacctaccatcatgaacccaggccaccttcacgaaaattgctgctccatcacaatgaccaatgagggaattgtcaggtttgtaaatttactagatgtgccatggggataccaaaatcactaaatgattggattgagatcaaaaactgagaatattgtcttagtgcctatgctatctgcaagatggaaaaataaacttgtctcctattgaaatattgaaaatacatggaatggaaaaagtttaaaactctagtaaacaaggaatgctagatacaatgtgcgtgacacttttaatcactacttttaaaaaatggtcattcaaattttctttaatgtactatattcattgtattattttaacagcaaataatatatctatgagattattttagctcagttgtgatgctgttctcagactatttttctattagatttgaagtttctcaatatttctactgcacaagatcttcaaaatcctaccttggcaattgagacagaatattgtaccaacttgtatagttttatgacattaagtcgaagacacagttttaagagtgaaatagcaagcttcctgagacagagaaacaataaaacacaacaacaacaacaacaacaaaaagaacaatatattggttatgtatattggtatatagtcacgtaaataataataaccttaaagaatgattgttttcaatcctgtaatttttacaagcaaggaaactggagatcagttctaattacataatgtgaaatcaggaagtttaaaaacaatggattccttgctaggacattatttcaatccagtgcctatctactatatcatattttactatgcttgcttgattttgggaagttaggagccctagttcgctgacattattagcctatattgtcataagtaacctttataaacaatcaatatcaagaaattgactcagacaactttgtaaaatgttacttttcctaaaatttcttaagttttaattaagtaaatttatcatttaatgtaaggaatcatgaaaatcatggaacaggtgaaatggaagataccacattatacctaggaaggagaagaaataagttattttgttctaagcattaacttaatgatagaatttggttaatccaattcaagacatggttcacagactctagtcatttctcattacagaagggaccaatgatcaatttaatttatatttgggaatgtcttccaggtaaagtgaatatcactgtagttgctgagtccaaacaaagcagtgcttgcccaaatgaaggaatggagcagcaaaagctaaactggaaagacactgtggtccaaagcttcttagtagaggtatggatatgcaaacagtcaagcttttcctgaaaagaaacagacatctaagaggttttgtactaaaagatcttctcattgaagagacttaattagttgacaacatttacttttgacacaagacatgccattttaaatgaattaaaacagcataaagttcatcctttctttaattaatacctcacccaggatagtaaaacttaacatttgaaacagacttgacaattttttgtttgtttctgagtcaagatgtttcctgtacacctatttctcttccttctctttttccgattctcaaattcaagagacaaatctacttgtcctgcactcccgtgcagttcccgtcatcctcaacaagaatcagcgcttgtcagaggaacactcttgacttgcctcttggcacatccctgctccacaaagcaattttagttgtttactggagatgctatacaggatcagaggagctgagagtgtcccacagtgacatcaagataatgcctgtccaagctacagaacgcagaggctaaaatgggtgccagtgatgtcccgtgccttccagatatgaacaaaaggggaccatgagttggatcttctctcagggataaacttgcaccagccatgcttaagtgagctggtgcttaatcacttttccttcatggacagaggatctagactcattcttctgtgcttgtttgt

SEQ ID NO: 8974 - DNA, 2300 bp, Homo sapien
aaactatactccaaggcaacagcaaccaaaacaacatggtactggtaccaaaacagagatatagaccaatggaacagaacagagcccccggaaataataccacatatctacaaccatctgatctttgacaaatctgacaaaaacgagaaatggggaaaggattccctatttaataaatggtgctgggaaaactggctagccatatatagaaagctgaaactggatcccttccttacaccttataaaaaattaattcaagatggattaaaaacttaaatgttagatctaaaaccataaaaaccctagaagaaaacctaggcaataccattcaggcaacaggcatgggaaggacttcatgactaaaacaccaataacaatggcaacaaaagccaaaattgaccaatgggatctaactaaattaaagagcttctgcacagcaaaagaaactaccatcagagtgaacagacaacctacagaatgggagaaaatttttacaatctacccatctgacaaacggctaatatccagaatctacaaagaacttacataaatttacaagaaaaaatcaaccaaccccatcaaaaaatgggcaaaggatatgaacagacacttctcaaaagaaaacatttatgcaggcaacagacacatgaaaaaatgctcatcatcactggccatcagagaaatgcaaatctaaaccacaatgagataccatctcacaccagttagaatgacagtcattaaaaagtcaggaaaaaacaggtgctggagaggatgtggagaaataggaacacttttacactgttggtgggactctaaactagttcaaccattgtggaagacagtgtggcgattcctcgagggactagaactagaatttgacccagccatctcattactgggtatatacccaaaggattataaatcacgctgctataaagacacatgcacacatatgtttattgtggcactattcacaatagcaaagactcgtgaaccatcccaaatgtctatcaatgatagactggattaagaatatatggcacatatgcaccatggaatagtatgcagccataaaaaaggatgagttcatgtcctttgtagggacatggatgaagctggaaaccatcattctgagcaaactattgcaaggacagaaaaccaaacaccgcatgttctcactcataggttggaattgaacaatgagaatatttggacacagggaggggaacaccacacaccggggcctgtcgtggggtggggggaggggggagggatagcattaggagatatacctaatgtaaatgacaagttaacgggtgcagcacaccaacatggcacatgtatacatatgtaacaaacctgtacattgtgaacttaaagtataataataataaaaaaaggtaaaaaaaaaaaagtagacacatactataatcaccttgaaaaaaaaagaaagtctttcaaagagataaaaaattccatatactccacttcctacaattctggcagtttccaaatacttttacttatgtgaaaatgctatcatatccaagagtgcctttagagctaagctaacagtaggctactgatctttagcacattgctttttctgttgtgttattcagggggctttctcacatttatgtttccatttttcacatttcacaactttctttggagcacagatatttcaggaagattttagagcctttgaatagcattatggacttttttgcattaatttttacttttacaaaattgtgctaaatattatttctgttaattagtgagttttgttgggggccccttaaattggaaccccaggctatgcctcatttgcttcactctggtcctggccctgagagaggaacacaaaagggatggttagaaaaacaagaacaaatgagcctcccagaattttctcaaacaacaggccagttaattaaggaaagtagatattacatagctaggtataatgaacatgcagtcagtggattgtctcagtaatttatggagataaccaccaacaaaaagtgtatgtgggtggggacaaaagagagacaacaaagtactgcaggcagaaagcttccttttgctgattttgcctcacagaattgagagtttgttcttacacacaagtttaatgccaccttcctctgtctgccatggaccaacaagcaatatatgctgagttaaacttacccacagactcaggcccagaaagttcttcaccttcatctcttcctcggggtaagtggctttaattttcctttcggcatttgtatgtcttccagaattagatc

SEQ ID NO: 8975 - DNA, 2300 bp, Homo sapien
tttgctcgttagttgatgcagtttcttcctagcatcgatgttctttacaatttggcatgtttttgcagtggcttgtaccggttgtttctttccatggttagtgcttcttttaggagctcttcttgtaagacaggcctggtggtgacaaaatctttcagcatttgtttgtctgtaaaggattttatttctccttcacttatgaagcttagtttcgctggaattgaaattctgggttgatatgaaattcttttctttaagagcgttgaatattggcccccactgtcttctggcttgtagagtttctgctgagagatccgctgttagcctgatgggcttccctttgtgggtaacccgacctttctctctggctgcccttacattttttcctccatttcaactttggtgaatctgacaattatgtgtcttggagttgctcttctcgaggagcatcttagtggtattctctgtatttcctgaatttgaatgttggcctgccttgctatgttggggaagttctcctggataatatcctgaagagtgttttccaacttggttccattctcctcgtcactttcaggtataccaatcggacgtagatttggtcttttcacatagtcccatatttcttggaggctttgttcatttttttttactcttttttctctaaacttctctttttgtttcatttcattcatttgctcttcaatccctgacaccctttcttccacttgatcaaatcggctactgaagctggtgcatgcatcatgtagttctcgtggtatggttttcagctccattgggtcatttaaggtcttctttacactgtttattctagttagccattcatctaatcttttttcaaggtttttagcttctctgcaatgggttcgaacatcctcctttagcttagagaagtttgttattaccaatcgtctgaagccttcttctctcaacttgtcaaagtaattctccatccagctttgttctattgctggagaggagctgcatccctttggaggagaagaggcactctgatttttagaattttcggcttttctgctcttgtttctccccatctttgtgattttatctacctttggtctttgatgatggggacacacagatggggttttggtgtggatgtcctttctgtttgttagttttccttctaacagtcatgaccctcagctgcaggtctgttggagtttgctggaggtccactccagaccctgtttgcctgggtatcaccagcaggggctgctgaacagcaaatattgcagaacagcaaatgttgctgcctgatccttcctctggaagctgcgtctcagagggacacctggctgtatgaggtgtcagtcggcccctacttggaggtgtctcccagttaggctacttggggatcagagacccactagaggaggcagtctgtccattctcagatctcaaactctgtgctgggagaaccactactgtcttcaaatctgtcagacagctttgaagtctgcagaagtttctgctgccttttgttcagctatgccctgcccttagaggtggagtcgacagaggcaggcaggcctccttgagctgcggtgggctccacccagtgcaagcttcccggctgctttgtttatctactcaagcctcagcaattgcgtacgccccttccccagcctcactgccgccttgcagttcgatctcagactgctgtgctctcagcgagcgaggctccttgggcatgggaccctccgagccaggcgcgggatataatctcctggtgtgccatttgcttagaccattggaaaagtgcagtattaaggtgggagtgccccgattttccaggtaccatctgtcacggcttcccttggctaggaaagggaattccctgaccccttgcgcttcctgggtgaggtgatgccccgccctgctctgtgggctgtacccactgtccgacaagccccagtgagatgaacccattacctaagttggaaatgcagaaatcgcccatcttctgcattgctcacactggaagctgtggactggagctgttcttatttggccatcttagaacctcatgccaactgtcctccctaatcttttattatgcagatgggttctctacctggcctgtgccttgttgcctgttcctttactgtacatgtgatgacaagaaaagaagatggaccctccatgttgaacatgcctggccctcaggtagcccttttctattggcacagctgctggcattcatctgtgcaagcttccagcttgctcatgtatgtctgcagctcgatttctcaggc

SEQ ID NO: 8976 - DNA, 2300 bp, Homo sapien
cctttatttattgtcctttatatacaaaggacaataatgcatgaggcagaacatttcctttcttctgaggacaggagaattctgaatgcaattccagaaattaacagtcttgtgcttatgtattaactttttttcatatataatagacatgggcttacatttcatttactgtgatgacacatttaagaaacctagtcaaatttaaggccctgcaatcagatccttttatgcctgtcttttagagtttgaaaaaataaaggaagaaaaaaaaatttaaaccaccgtgatgcactgaaactcactcatttttcatagacacttttctttataagggttatattaggatagttatggctatatagttttattatttttattatccgtatgcatacatagcaaaatatttgttacacaagcaataaacttagatattaacatcatatctccttttccatacttcctcagagagagtcaaaaggtggaaggactattaaggcactacttctgaaatgtgatcgaggttgtttcattatcatgtaagaaaattataatcttactgtatcctgtggtgcaaagtatgtgtgtgtgtatacatatataatatatatatatacacatacatatatatgatatatatatatcaacaaattataagttaaattgaaggatgattatagctttctatgtcatagctaaaaacaatcataactgacaaaaagtcatctgctttttaaaaataattaatacatgttattttagaatagttttagggttgtggaaaaattgagtggcaagtgtagatttctgatttatcacttcttcctccctcacaatttcccttattattaacattgcccattagtgttgtacaatttgtcttgatgaacaaatattgatacattgtaagtaagtccatcgtttagggttccctctttctgttgtacattctgtgggtttgacaaacatgtgagatatatctgcagcagcctcgttgtctggggtaaataccaagattcttagtctcatggccaaggagatcgaggtctcggacacacacacagacagagtgagtttggagcaggagtttaataggcaaaaggaaagaacaggtctctgttagagagggatcctgagaagattgccaagttgtagttaagaatgtcagagtttttataaatgggctcttgaggagggggctcttgaggaggggcttgtgaggaggggatgtcttatctttctagggccccagggtttagttgggaccaggtgtgccatctgtacagagcagatttttttatcatctcttaacccactccgtgaccacacaggccaactcttagtctgtgtttctttgtcctgcttatctggtagggaaagtttctgtgtctgttcccatacatcttcttgaagctgcaggcatcttggtgcgcctaaagagaaaggaatgtgcttattaaggcccactgttttactggggcccatcgtgtaagtgtgaagcttggtgattacccgggagactctcggctgtccaccccagtccttctgtgtcccagctgtcttttctgtgttttactgtctgctctttcaggcctcttgttagaaaagtgatttctttgaactgcatgaggttagcaagggagctatttttgagctgctttttgttaaaagcaaagttttctaccggggactggctttaccctgtctacccaaataattcgtttctgcctcctataacatatccaccattacacatagaatagtttcactgcctaaaaagctcctgtggcccagggtgggaatcggccccgggtggaggcctccattgggttccccctaatcccggggacaagggcatcctctgggtccttatcacagggtaaggggtccaccagacccggacaagcgctcctagctggaggagggtcgcgttcctgccggatgtggaaaggaagtccaggaatccccttcctgtctttctggtttctctctgggcttcctgctcgggtcacaagcgccagaagcgccggcggctgcggggaaacggtaggcgggggatccagccccaagcaaatctcccgcgggcgcgtgggaggtggggccagtgctgggcgcagccgcgcctcgcgcctcccgccccccggggctgcggcggggacgcttctctggagggtgtggcggaaacttgaggcttggagtccgcgggaccggaaggggctccgtagctcggggcagggtgggcgcgagagagcctagaagcccatgtagccgcgaatcccgcagccccagtacacctccctccg

SEQ ID NO: 8977 - DNA, 2300 bp, Homo sapien
taatcattacattgcagcagataaaatgtaggaacccagtcatatccattaatcaaagctaagccctttcaggaatttactagttttttttttttttttagttttcacacatttacaaaacaatttgggaggaggctggaaatcatcttgactgaagaccaccaatggcagcagttcatttgggtacagcagcaagcatcagttaaatacctatcaacatagctgggcttggtatggatgaatgataagcttgtgattttcaagcaaggaccttgaggacataaaggacactaaatacagaaatggtttatattactatgaagcaatattaatgacagacttttgcttttctcttattcacattgaaatatggaggggttgcagaagatgatggggaggaacaaatgcaggtgtctaacttacaaatatttaatatttttgtgtttggatttaggcttgctatcagaggaagtggagaatgtgccttcctgaatgacaatggagtcaacagtggcagaatctacatgaacagaaaatggatttgtagcaagccaaacaattatgtctacagttgccagttatgtccccactgggatactacctagtagagctgtgagaagagggccaccatcctccagactccagaatggtggaatcagcagcagcttccaccatgcccctggaaaaactgcaagtaacagacctgcacatgtatcccctacatctaaaataaaagttggaaaaaatggaactttgatgttaagatgcactgatacaaaacttaaattttggtctcctacattaaaacaatatgagtctcttaaaatattgatttgttcttagtaagattacaagaggctttgatttttaattctgcaatgtttccttaacagccattctgaattacaaactaattcctatttctgccacattccttcctgagaactgtctagtcctggtttgggatttatcttaaaggtctagaaaggcaacattttacttcagcaaaacttgattctatattgttgttttttcttaatgtgtcaaaattgttttgttactaggatttcctatgttgttattaaatgtattcccctgatcaaggtcactggcctagaaaacaaagattctgtgttttaccaagataattcccagtgcttcatggtgtctttattaggctttgactgcttagggaaactgagccttaaaagggtaaaagtttttccatccatgtaactttctgaggtctttaggttgtcactctgattaaatgagtagtattcttagcagtgacttattatctgttgaaggaagtattttaagctttttgacatctttggcaggtttctctagaatccaaatcctaaattaagccttttggcctaaaaatgactgggatttttccaggtggaccccctagatatgctcctccaaaggcttgtctttcttgtagagttattaaatgattaggcttatttggcaaatactgctagaagcattgtcaaataagaaatggtgttttacctttctttaagctgtgtttgtgtaagttcatcatttatagaaatgtgaaattttatgagattcctaagatactgacatgctgagatacctgtaataattgcaatttttatgttggatgattgtatgccacagaagcacttaaatttcctggttaattggtaacgttaatcagatctttacctatggctgttctgggtttttgtcattcacagttattattttaatttcttctttggaagcgttcgcaatcagctatagtccaaaattgctaattaagatcaagcaaaacaaaattaattacgtaaaattaatttataaggatgtttttatgacgtaaatgttttattttccagagccaaggaaattttctgtcacaagctatctaccgtttgcaataatttgataaataatcctttgtgaacaaatatggaagcatttgctttttctctctacttgattccttcaaaattcagaaactatttgtggatatttttagttttatttatacaacttcagtaaaaatccactctctctttataagcaggatccagttggaaacattatttatattgctaaggtttggcttgaaatgtcatatttcagaatgtgcatagaggccaggggtggtggatcacacctgtaatcccagcatgttggcaggctgaggtgggtggatcacttgaggccaggagtttgagatcagcctggtcaaaatggtgaaacctcatctcttctaaaaacacaaaattagccaggcatcgtggcacacgcctgta

SEQ ID NO: 8978 - DNA, 2300 bp, Homo sapien
ctgaaagatgttaagtttgaaaatatttgttaaagggtaaatgattatgtacatctttaggacttcatgaacttactttcagtttagtttccacataaggagaaacttacagcaacgtagaaaccaagagattgatatgaataaatgatgtgactaactcacaaataccatgtcatttgatatttgacctttaaagtagttttcatatcagatctgtcagtcatgggttctatagcttactgtgaacttagacatattagttagtccctcacccaaaatcatctgaaaaataaaggtaatatcagcctcattagttagttatgccaattaaataagaacacatatttaaatctcatattaatgtgtatggagcatagtaagcagtaataacctggcatgttgtcatgccaggctagtaacagtaaaagtaatagtagtttcactggaaggtccaagattagtgtggaaattccaagatgattagtgtggaaattccaagataagtgtggaaatctcaatttatcagggtttaccttttgtcccctttaagctaacaatgaaattataaaaggatataaaagggataagcctgacagttcatatccacttctgtgtatgataatataactggagagacatcaaactcatgctgagaacaactagaagagttagaattgaagaaaaaggatttcattaagatattagagagtgttcaaggcaactggaggcagaacgaagattctggaaaggggccacagagaagtgagtcagcattccaggagccacccttctcttaggggcatcttggcagtgggtcagatgctgagattctggggagagggctgtggataccaggcatttttttgggggagagaaaaatctcttcctaaagcacttgaaggaccaaaacccccagagaggagagagggccaaagaaatgagaaaaatttttctctcaagcaattttcaaattattaaatttcacaggaaaggaggttaggaagaactatgtgaaaaacagacttgaacttttggcaatcacatgttgttcaggagacaaaaccaaattcaacttccaagaaagagaagcagctttgataaaaagcaggttctcagatggaattactagaaggctttatcataggtcctaggacaaactagaaatgatgaaatagtaaagaaaaagatatataaaatcttacagaaactggaactcagtcctaatgcaacttcatttctatttgataaaggcaatagctgtccaatctggaacttatttcttacaggtaaggggggctactgtatagaattcaaaagcagggaaaatatgttgtcagagttaagatagagattgtatttggggtaatgagcgttgcaggacatgagtagggcacatagcgtgttggtattgttttacgtggttttaagatatacttcatctaggcacttgttacatgttatatttttaatgaatgtgtttagttgtatgcttatgatttgtgcacattactataaattatattttagtaaaaggtgcccttactggcatttatatacaagaaatcaacacatctgacaagaagctcttgctgctaaagagcctctgtgctcctggatcatgccagagggagcacagaagctgcacaccgttcaagcccatttttgaaaagttgttgtagcagccatagcagcaaattcccaaaatatcttgaagaaattgaaaacaagatattttttgaatgagcgtaaactcttgggaatgaattttaatttgagattaaaattgctgttgtctttacttacctaacattcatttcctctgagagccaactccttcctttcaataaattcttattttctatcataatattgctttgtaccgcacaaaatacaattataatttttaatagtcaaagaaattttaagttatcaaacattagtttctttcgtaaccaaaatactgttagagaagtagcttcaactttttaaaattcttacaaacaccagtttattctgttgtgatgagctgatttttgaaacaatttatgcttcatttgttcctctagctatatttaacttaaaggcttgacattttgagttactggggcggttacacacttacacgttttagtcgttgggctttttttttgttttgttttgaatcattcttggggttgaaaacgtagagactgtggtttagatcactcatagaaactggaggcaaaatgcatgacagtaacaatgtggagaaagacattacaccatctgaattgcctgcaaacccaggtaagaagctgggc

SEQ ID NO: 8979 - DNA, 2300 bp, Homo sapien
cctaatctttctcttctcttaagttttgggacttcaattctaaatatgtcatatgtttcaatattattccacaagtccttgaggatctgaaaattatccaacatttttcttcatattggacaatttcaagttcgctaacttgttttcctgttaaatcttgcctttaagtatgtccagagatggtttttatataaaatgttttactatatttctcaattctaaatttcatttggcttttttcctactgtccttctttgctgaggtatcctattttttcatcgtttgaaagcatattttctattatgtcattaagcacagttacaacagctgctttaaaatatttgcctgatacttctaacttccacatcatccttatattgagctgcattgattgtccttttcctttagaattggtcatatttttctggtttttcatgtaaggcatttgagattatatactatacattgtgaaagttatatggagaagtctgtgttttctcacatattcctccaaaaaaagtgaaagtgtttattttcctttctttttttttctttttctttttctttttttttttttcatggagttgctttgtcaccctggctggagtgcagtgtgacatgatctgggctcattgcaacctttacctcccagactcaagcaagtctcttgcctcagcctcccgagtagctggggttacaggcacacaccaccatgactggctaatttttttttattttttgtagaaatgggattttgccgtgttggccagattggtctcaaactgacctcaagcaatctgcttgcctcagcctcccatagtgttgggatcacagacgtgagccattgcacctggccaattttccttccttagcaagcaattggtgtagttggacttaaatttaaatctctatctttggggcagcaggtcaagtctcagttcggttgtcttgttcttaccataacctggcttgtgcttgcatcagtcagagatttggggaaaaaaattgtacacacaagttagagcaccccctctatgtttttgattttatggaattgattcttcattttcagcatctgtggtttctcttaactctgttctctggttattcaggtgagaaaggctgcaggttttttaatgatgttttactcactctacatgggactacaattggcctaaggctaacaattgtaaaaatgataaacttttgccctgccataccttctttgaagtgtcatctcccctctagaatctgtctggctttgttcactcttcaatggcttcaggtcatgtgtgtgcgtgcgtgtgtgtgtgtgtgtgtctgtctgtctctgtgtgtaaagaatatttatttacaggaatactaaattattggtatatctagaataccctgtatcatcatctaaatttgctgggaaatattataaattagaactagctgttaagagcacatttttagatgtcaagatcgttttgtgtgataatagagatgaacctatttgattttgggggactgcctatagcacaaattttgcttgtgaataactatactagtgtgatataaactcccaacatttctgatgtgttagtagacaactaattaaaatttctaatttctattcttcctttaaagtttttagttccttgaagcttggatgttcattgttttatcctagtgtctggtgcatttcctggcttatagaaaacatgatatatttttaaaaggataaattaaatggaaaaaggatggatgagtgaatgaattaatgaatatacacatgacttcaattcttttaattttttttcaaatgtaccctggaacaaagcacatacttttttcaaagaaagcttagcacataatataaccaaatttgagacccttcaattagtatacattattaggatacagttttacattgattttaattgcttatcttcctttcttccagtttctttcaacttttctactgtccataaatcatgtcctgccaaagactggaaggtgcataagggaaaatgttactggattgctgaaactaagaaatcttggaacaaaagtcaaaatgactgtgccataaacaattcatatctcatggtgattcaagacattactgctatggtgagatttaacatttagaggtgacagcatcccccacactggcagtgaattttttgtgctacaaacttggcaaaagtctgtgaaaagaagtttcaacttcatgtgttattaactatacaaatattagttgaatgaattgttgaattacatgattacctttgaggttttttttttttccggct

SEQ ID NO: 8980 - DNA, 2300 bp, Homo sapien
tgaatcccagctgcctttttcatggcagaaattgacatacttaccctaattttttaacactcttttaatactctacatgctagtaatttttttacttttatatgactagatcatcagtcatatttttcttttttgagacggagtcttgcactgtctccagggctggagtgcaatggcgcgacctcagctcactgcaacctctgcctcctaagttcaacccattcttctgcctcagcctcccaggtagctgggattacaggcgtacgccaccacgcccgactaattttttatatttttagcagatatgggatttcactatgttggccaggctggtctcgagctcctgacttcatgatccgcccgtctcggcctcccaaagtgctgggattacaggcatgagccagggcacccggcccatcagtcatatttttcatatgaataaaagtctactttttagtgaaaaatgattattctcattctggaaaactgttatagcctaattataacattcagcatagcataactgatttggtaattcaacacataattactgagcggctgttatgtttcacacaaaactaagtgatgaaaataaaaataataaaatgtgagtcttaccctcaaaatctagacagcatagttgaattatggcatggacttagaactcagttatcactcttaaaatgtactggttatgcctttgggaggctgaggcgggcagatcacgaggtcaggagatcgagaccaccgtgaaactcgtctctactaaaaatacaaaatattagccgggcgtggtggcgggcgcctgtagtcccagctactcgggaggctgaggcaggagaatggcatgaacccgggaggcagagcttgcagtgagccgagatcgcgccactgcactccagcctgggtgacagagtgagactccgtctcaaaaaaaaaaaaattattggttatgcaaccacctgcagataataaaacctctaaaagtcagtttttcatgtatgtagtaggtattgtctagtcacatacaaacagttggaacagcccagaaaagggagagagtgtcatgcagtcttaagagacagaggtcggtgctcaagcctcatccagggtcagaagttggtctttataggagggatccctaaatgccacaaagccaggatctgttctctagttatttaattaacctaagttaaatttcttggatgaggggtagggatggggtgactgcagtttagattaattctgcagaatgcacttgagtgggtattgaaaaaaccagtttttccatatgcagatttccagttaatctactagtcataagctaatggatcctgccatttttcatatctgacatttctatgtcctatgacggtttcacaggtagctaggctctcctccattatttccctctgtatggtgttggctgcatttttctctgattttacttcttcatcaatgatcacatctccatctactctccattttccaggaattagttgaaatttttcatcaactaataggaccctgagcctttgtgttattgttttagactaacaaatttttattcacttaattcaattttagtggaattttagaagaaataggagataaaatctatgtttgctatgttgtattcgatagtaaatttctgaacacctcattttaaaattagatttttttcttttatgtcattaccttgaattattttaacagagttatttctgtttcttaaatatatattttttagttcagaagtcctctgcataattcatgttttacctcagtttaatgttaatattataaagcatacaggaaagcaaatagctttcagaatttttaaggtattatctagacaatacaatgcatttagagaggaggataaaagacatagggcccctttctgtaactttcgtaataaaatcccttctttttcttgttctgtttcccaaatagctatcctactttggagaagatgctggaaattcagagtttccgccagagaatatatgcctgaactaaaagaggaagtggtctataggagaaaatggtgagatatcttctgtggtattaataaaagttaaaagcatttcaagtttaggcagaaaactaactgaaaaacgagaacctactgtatggttagtaatttcttccatgtcatacaagtattcgagaaatctgctaccttgattagtaagactgaacacattggttttgtcatttattcatggaggaagtccaccacccacttggggagcagaaggaaatttgccatctcaatttacttatcagaagtttct

SEQ ID NO: 8981 - DNA, 2300 bp, Homo sapien
acttgtatggtcaatttcctgaagcactactggcttactgcacttaccttcattcttttccttaaagaagctaaacttctttttattttatagagtgtgttcttgttcttgttctttctgttctcaaattttcaatggttaactctttcctcccatttttatttaattccacatatgacctcctcaacaagaccatgcctgatgacctatataaatgacctcacatccattcctatgtattacctggttctttgcatgtagcagcctaaggtcatacacttctcaaccaaacaatcctacgaaccccaataaatagcactccatattttagaacttttagagttttatacatatttttcattcattcacgcattcagtaagggcatggaatacatactagattccagttactacggcaggtgttagaggcacagaggagacaagtcaaagcccttgccctcaagcagcttacagtctagtaagggaaacagataataaaccatgatataatatcagatattgacagcaatctgtacaggcacagagtgtgaggttctattttacatataatagcaactgacaatttctctgagcaggtggcagctgaagagtgagtcggttaaagggagagcgagacatgcagggagatggaaaaagaatcttttagagaaaaagtaaaagccctgtagtggtaggatgcttggcatttttaaggaggaggtttctgtcagagaggatactgaataataggaaaaatgataagagaggtaaccaggggccatattatgtataaagcattctcaactattaggtctttggattttacggtacatttgataggaagcctttcaaagtgcagtggggggaggagttaaacacttcaccaaaatcatatgaattaattataaaacaatggttctagctgctatgtggaaaagggactaagaaattgactgaaaaataggatggaagcaaagggagcttttagggccaacatgtacctctttgtgtcttaggtagacaaatgcatctaatggtccaactaacttctctagatgataacttccaacccacctatgcataaaatttaacgtctttattctaaataagtgatattaataataaaatttggggcaccaagattattaatcagagtggtattttgatttccctccttaaatcaccatacatagctttctgcattcatcttgcgttgactgtcattacttgtctgagtgagactgataccacagcgatgttttaaataataatcatacctcaaaagactgaagtctcagaggtatctgaagagaataacctagagcacagggggagaattgaaggagctgttactgaggtgacataaaagcagtctaaatgacagtaaaatgtgacaagaaaattagcaggaaacaaatgaaacagataatttaagataaacaattttagagcatagcaaggaagttccagaccacaagctttctgtttcctgcattcttacttcttactacgtgatacatctagtcaccagggaagaagcgaatgacacacttccaaaaaccaattcgtagctttctaaataaaaccctttcaagctggagagagatccatgagcatagagatcttaaaattcatgttcagcaataaatcctggggccccagacagtgtcaggtgcatagggggtgttcagtaaatatcagttaaatgtatgcataaatcgataaacgggattcctggaaaatactacactctccttctccaaattatcttcatctcaaagacaggaacctctaacttttaattctttacttagattatgctgtctcctaaactgtttatgttttctagaaatttaaggcaggatgtctcagagtctgggaaaatcccactttcctcctgctacaccttacagttgtgagaaagcacatttcagacaacagggaaaacccatacttcaccacaacaacacactatacattgtctggtccactggagcataaattaaagagaaacaatgtagtcaagcaagtaggcggcaagaggaagggggcggagacatcatcagggagtataaactctgagatgcctcagagcctcacagactcaacaagagctccagcaaagactttcactgtagcttgacttgacctgagattaactagggaatcttgagaataaagatgagctctgaaaattgtttcgtagcagagaacagctctttgcatccggagagtggacaagaaagtaagtcagatctgattgcctatttactctctggtatctctatatatgacattaa

SEQ ID NO: 8982 - DNA, 2300 bp, Homo sapien
agcaaagctgacaaaaacaagccatgggaaaaggattccctttttaataaatggtgctgagataactggctagccacatgctgaagattgaaagtggaccccttccttataccatatacaaagctcaactcaagatggataaaatacttatgtctaaaaccccaaaatataaaaaaccctggaagataacctaggaattaccatcctggacacaggaatgggcaaatatttcatgacaaagatgccaaaagcaattgcaacaaaagtgaaacaaaacaaaacaaacaaacaaaataattaactgtaagagcttctgcacagcaagagaaactatcaacagagtgaacagataatctacagaatgggagaaaatttttgcagactatgcatttgacaaaggtctaatatccagcatctgtaagaaacttaaaccaatcaacaagcaaaaaataaacaaccccattaaaaagtggactaaggacatgaacagatacttttcgtgttttatttatcaatcttaatttacttcttatccatttggagtgtcaaataatggccaaagaaattgtaattataaattaaagaacaaaatttagcaagtaaaaataaacaaaaataacacaaaaatgtattatccttttacttttgtcattaagcaacaaatatatttctgataatttgtcaaatattttctccttgaattaatagtttatcttatttaaaagggtatattgtgtttttaaaattttattttaaatttgggagtacatgtgcaaatttgttacataggtaaacttgtgtaatgggggtttgctgtaaagattatttcttcacccaggtattaaccctagtacccattagttatttttcctgatcctttccctcttcccaccctctatcctccagtaggcactaatcattagggaaatgcaaattaaaaccacagtaagataccatctcataccagtcgaatggctattattaaaaagtcaaaaaataacagatgctgatgaggtagtggagaaaagggttcacttatacacctttgatgggagtgtaaattagttcaaccattatgaaagatagcatggtgattccttaaagacctaaaaccagaaatttgacccagcaatcccattactggtatatacccaaaggaatataaatctatcataaagacacatgcatgcatctgttcatggcagcactgttgacaatagcaaagacatgcaatcaacctaaatgcccatcaatggtagactggataaagaaaatgtgatacacatatacaaaggaatactatgcagctataaaaaagaatgagatgatgtccattgcaggaacatagatgaagctagaggccgttacccttaacaaactaatggaggaacagaaaaccaaataccacatgttctcactaataattgggatctaaatgatgagaacacatgtacacatagaggagaatgacagacaccggagcctacttgaaggtggagggtgagaggaggggcaggatcagaaaaacataactatgtagtactagtctgaatacctgggtgatgaaataatatgtacaacaaacccctgtgacatgattttacctatataacaaacctacacatgtagccctgaacctaaaagttaaaaaaaatcaaattatactgttaaattattagcatgatttataaacaatattgttttaggataaagaatttaattgcttggcaattgcaaattattaaattaaatatcaatatgttagggaggctaattcaaatgatataaatatttaggctataacaaaaggcagctatatattattaacctcacctcaaaaaggggcataatttccattcccttgactttaagggtaaattaagagaaatttgtaaagcactcaaaagaatattcaattcaatatgtggtggacagttgagaaattatgtgttatctatgtcatgggaaagcaacttttaaaaagaaaacatttcctctgaggttttcacaaataagtgaaactgtgaaccctcatatgtactgtgaaaggacaatttgaggagcatctctgattagcagcagatttattattctttcctcatttcatgttatacttaataaaacaaaacatacctgtatacacacacattcactcacattgaagatgcaagatgaagaaagatacatgacattgaatgtacagtcaaagaaaaggagttctgcccaaacatctcaacttacatttaaaggtatggaatttaatttcattttttcaattggtgtgaattaacatggtagtt

SEQ ID NO: 8983 - DNA, 2300 bp, Homo sapien
ctcgacaagggagaacatgtaactttgttaggattagagagtccaacgtttagaagcttctagatttttaaaatttttgagaaaaaaaattgtgaaaagtcactatacaaatgatggaaagtatttttaatacatttatctaaaaatggaatttttctatattatgttgcaacccattttacttatttatatacacatttttatgtgtatgtttctctacatatatatttacatatatataaaatcttaaaaatcaccataaggaaacaaataaatccataaaaatgggaaaaatatttaaataggtcattgaaaaaagatatatgagttaccaatacgcacgtgagtaaatgctcaatataacatcagagatgtacaaattaaaatcacatttagattctactacacgcctactagaatggttaaattgaaaaagattgggcatatctaatattgctatttatgtggagcaaatagaaccatccaatattcatgttgggaatggcacaactttttggaaaaaaatacatttataaaataaaacatacattttctatgtaacctagcagtttcacatccaggtatttcttcaaaagattaaaaaacgtgtcaatagaaaaacttttgcataaatgtttattttgaccttatgatatccaagaagtggaaaaagctcaatgtcataatggatacattttattataaaatagataaaaatattttatgtctgtacaatgaaatactactcagtaataaaaagaaattaactgctgatctgtgcaaaaacatggataaaactcaaaaacattatgctcagtgaaagacatcagacttacaagaattgccaactgtatcattctgcttaacaggaatttctaaaaccagcaaagctcatgtttattgacagtaagttggctgctgcctggcttcaggggtgaggatgaactgcaaagcaacagcggggaacatttccctgtgttgaaaatgttttatatcttaactgttgtatcttgactgttttcctttttggaacaaaactaaatttcactcaaccatacttgagtaatctctatatttttctatacatgcttttctaatagttctttggatacaatcttttgttaacaacaaaggtagaatatattcatttcctcatgaattttctgtcttttttttctgtccaaaaatgaaaagagcaattttgttatctgtcctttccttctgcccagaaatgattaaacctgtatttcttattctcttcatattttctttgttttaattcctttgtactacagtttcttctctattctcatttgcttttcctcttcaagtttctctctcagaacaaatgcagtgttaatcccgaagccgcttgcgggacactggcttcttctcctcagtttcctccctaatatatttgttgaggggtaatacaaaatcactgggaaactgattagagcagatttgaagacaaaattgtggcctggtaacttagcaaaagcataatggtgtcatcttgtatgctgatgataacgttctgggcactttgttactttcgttttcttttttccctctgtgtgtctttgtgtgtgtttgtgtgtgtgctcacacccacacgtgtgactttgcacgcatttgtctttgagagagagataatagtttttgtttttctttcagtagccaaagtttaaaccattgctttttctttgattctatcgcttttaaggtgatctttcttaacacaggataagaaagcagtaatgtcctaaagaatgctgttgaattaattagtatcagcctctcctacagttctggaaggatacgtggttaagtaccactcctggatgaatcagaaaaacagccacttgagcaatttcgtgttctgtggttcagatgagaatcccagttgagaaagtaagaaaatatgtgtttattcttcagctttaaattgttatatcacaaacttccttcctccttggcaagctttcttttttgacgagaagaaaattgtaataaacaacagtatgactaatagatagtcacatggttacttccagtttgcaaaatgctatttatactttgagttactcttcaaaagtggtatacctctagtttggagctgtgctgtaaaaacaagagtaacatttttatattaaagttaaataaagttacaactttgaagagagtttctgcaagacatgacacaaagctgctagcagaaaatcaaaacgctgattaaaagaagcacggtaagaacatttttgtttgtttagaatgaccgttatttattgaaattgtga

SEQ ID NO: 8984 - DNA, 2300 bp, Homo sapien
tggctgctattgcaatttgaccctcattactataattggccccagcttgtttcagagtggcactctgacacttggcgtttcctacttcaaaccctgtcccaatactctctctgaattcagttctgtgggaacatctcccactgtaatctttggcatgtagagaagaactatgctaagcttctcagtgatgtttatgtaggacttaagttcttccaccagcgccttccttactgctttggtaaataaggtgcccattatatcatcccatagaacatagtcagttggtgggtttcctgtccttatctagtttatccactgtagcatgcccacttctctaagcatttttatcttttcttcagctacctgccatgggaattctggaatgttactctactcagcgtgagccattgctttctccaatcttcttggagttatttcagcagtatgtcagcactgttcacagtatttttccaagttattaaattctgtattgcaactgaatgccctaatgttgataaaatctcccttatccagctttatgtttctctcatgatctagcaccctcagaatccaatcccattgtgtacactccaagctgttgttattatatattggttaggtccaaattcattctgagtatagccctttctctcccttataagcttagcacataaccttagttattggccttatgaccaataactaagaaaggcaagtaagggagggattcctgtaaggagggtgtgaagggcacaatattttctttaaggaaaaaggcatgacctcgacaagggagaacatgtaactttgttaggattagagagtccaacgtttagaagcttctagatttttaaaatttttgagaaaaaaaattgtgaaaagtcactatacaaatgatggaaagtatttttaatacatttatctaaaaatggaatttttctatattatgttgcaacccattttacttatttatatacacatttttatgtgtatgtttctctacatatatatttacatatatataaaatcttaaaaatcaccataaggaaacaaataaatccataaaaatgggaaaaatatttaaataggtcattgaaaaaagatatatgagttaccaatacgcacgtgagtaaatgctcaatataacatcagagatgtacaaattaaaatcacatttagattctactacacgcctactagaatggttaaattgaaaaagattgggcatatctaatattgctatttatgtggagcaaatagaaccatccaatattcatgttgggaatggcacaactttttggaaaaaaatacatttataaaataaaacatacattttctatgtaacctagcagtttcacatccaggtatttcttcaaaagattaaaaaacgtgtcaatagaaaaacttttgcataaatgtttattttgaccttatgatatccaagaagtggaaaaagctcaatgtcataatggatacattttattataaaatagataaaaatattttatgtctgtacaatgaaatactactcagtaataaaaagaaattaactgctgatctgtgcaaaaacatggataaaactcaaaaacattatgctcagtgaaagacatcagacttacaagaattgccaactgtatcattctgcttaacaggaatttctaaaaccagcaaagctcatgtttattgacagtaagttggctgctgcctggcttcaggggtgaggatgaactgcaaagcaacagcggggaacatttccctgtgttgaaaatgttttatatcttaactgttgtatcttgactgttttcctttttggaacaaaactaaatttcactcaaccatacttgagtaatctctatatttttctatacatgcttttctaatagttctttggatacaatcttttgttaacaacaaaggtagaatatattcatttcctcatgaattttctgtcttttttttctgtccaaaaatgaaaagagcaattttgttatctgtcctttccttctgcccagaaatgattaaacctgtatttcttattctcttcatattttctttgttttaattcctttgtactacagtttcttctctattctcatttgcttttcctcttcaagtttctctctcagaacaaatgcagtgttaatcccgaagccgcttgcgggacactggcttcttctcctcagtttcctccctaatatatttgttgaggggtaatacaaaatcactgggaaactgattagagcagatttgaagacaaaattgtggcctggtaacttagcaaaagcataatggtgtcatct

SEQ ID NO: 8985 - DNA, 2300 bp, Homo sapien
cccaggaggtggaagttgcgtgagccgagatcacaccattgcattccagcctgggccacaggagagaaactccatctcaaaaaaaaaaaaaaaatgacactgtgcttctggaaataacctaattattaccagaggaaggaattcatgtctatgccatacaagagctttcaccctttagaagtgttttacggaaggtcacacacacacacacacacacacacactgatcaaattgcggaattctctgaagcatacagagaatggcatttattctggcaagaactgtgcaaattgttacaagaaacataagggatggcaagtatgaacaattatatttcaacagatgcaggaagcagttgaaatatggcttctcaacatctggggcttgcatacttgtcatctggaaaccagattgggtcagttacatgtggaaaggaataagttattgccaggccaaatttccatattaaaagaagtctccattaccagattctttttttacagacaccaaatagaccagggagttactaaaaatggaaggaggtcgtgagaaagcaagtcatactatgagtaggacctcaccttatgaattgcctctttagcaaaatcaactgcagaaaggaaagacattgtctgttaaatgaaaggtaataaatggaattcgcaggtggacaaaaatacctcctgaaatcccgtaacccagcggggtacagatgagacacgccctctgcagatacagtgtgcaactaccagtgtgactctgagtgcccgttttctgtctctgcaccgaagcaccaaaagcaaagattccaggctgaagcaaattttttttttttttttttgagacggagtcttgctcagttgcccaggctggagtgcagtggcacgatctcggctcactgcaagctccgcctcccgggttcacaccattctcctgcctcagcctctcgagtagctgggactacaggtacccgccaccaggcccggctaattttttgtatttttagtagagacggggtttcattgtgttagccaggatagtctcgatctcctgacctcatgatccacccgcctcggcctccccaagtgctgggattacaggtgacagacaccgcgcccagccagttttacagctttttataaagataaacatacttatatgatgcagcaattcaatttctgggaatttatccaagagaaaacttgctcacacaaaaatgcctgtgtacagcagtttcatacataacagtcccaccctagaaacaaaagtccatcaactagtgatcaaagagataatttctggtataacatgcaataggaatactactaagaaataaaagggaatgaactacttacctgcacaacaacttgagtgaatctcaaaagtattataaatgaaataagcaagagacaagacactacatattatatgataccatttatataaaattctatgaaaggggctggccgtggtggctcatgcctgtaatcccagtactttgggtgactgaagccagaagatcacttaagcccaggagttcaagaccagtctgggcaatataatgagacctagtctctacaaaaaataaaattagcagggcatgatggtgcgcgactgtagtcccagctacttgggtgggtagggcaggaggattgcttgagccaaggaggtcaaagttgcaatgggccaagttttccccactgcactccagcctgggcaacacagtgagaccctgcctcaaaaaaaaaaaattccatgaaaggaaaaactatgttgatataaagcaaagtaatgcttgccagggtccagggtcagaaaagatagtgattacacaaggaaaaaaagaaagatgatggaaatgttccatagcacggttgttgtggtgtttacatgattgactttacgatccttttgttatggatgagttaatttttaaattccttccttaaactaacaagtctgcctacttttatctttgatctaaaattagtactgatgttttccatttggattggttaagtctcttttgactgaagcttgctcagtgcctaaataagtgatgtacatgaaaagctttctagtcctctcctactgatctccatcggttagcgccttgccatgattaatccagagctgcgggatggcagagctgatggcttcatacatcggataggtaagttttatagagtgaatgagaaggaagtaaaggaaagataaaacaaaatacaggacagcttaaaaatatggactctttacttactgtgaaagtctactaaagtaagtgagggatggggaagcac

SEQ ID NO: 8986 - DNA, 2300 bp, Homo sapien
gagataccacatttctaccatttatagctttgaaatctgtgctaattaattactgaagtcacaagaatacattacataaataagtataaataattcttatgtatagaataaggtctatacacatacaatatatgcttatacatgcatatgtatgtgtttgtatatgtatttgtgtgtgtatatatatgaaaatttatatatatatatgaaaatttatatatatatatatatctccaggctggagtgcaatggcgggacgccggctcactacaacctccgcctcctgggttcaagcgattctcctgcctcagcctcctgagtagctgggattacaggcgtctgccaccacaccaggctaatttttgtatttttagtagagacggggtttcaccatgttggccaaactggtttcaaactccttgacttcagatgctctgcctgcctcagcctcccaatgtgctgggattacaggcgtgagccacagtgcccggccgtatatgtatattttaaagagaatgtctgtggggagtagggtgtgtgtataaactttactttgcgtggttctaatatgcataaacttcacttctcacagtttaattaaataactccccaacagcacagtttaattctttcagcgtacttatctgtatttgtattatatttactgtaagtaattgtataaagtagaaacttccatgctagtttttcagttcacgaatcactatatacatgtttgtattgtgattaacgaccaaccatgtcacttttttccaagtctgtcaatgattgattggtcaccatgcatcttttatcagttaatacagaataagatggagagttattctgtattattttgtaaatgtcacatgggtttgtcactgtatgacaaattccaaaggaaatttgaaacaggaagacaagaagaggaaggtaattgaaacaggaaattggttagtgacacaaagtgcagcaaaaaatgatggcgctgaaaggggaaataaaatagaagagaaatgaagttagagaagcaatagctgttgatagggttattaataattcaccttttgaagagtctctagataatgcaaccagaggaatttagtaaaggcacacttattgacaaaaataaggtaagtggttgtgatgaaaagaatgaagaggtcccagaggaagttatacgagctaaagtgttcacatcaaatgaactctcaatgtgtttcctaacatttcaagtgcaaagaatagtatattggaagtctatccaaatttaggaataaaaaagcttgagaaggcatctaaaagatgctggctccatattgtaagcgatagaacaacaacagcacgtactcaattcacactactcattttcttttaagcaaaacacttgaaactcagtgtttttaatgttttaattatagcatactttaaaaatattaattttattgttgtttacatttccctatacgtttatgagtgacagtaaagtaattttcaatcaggaaaagaggataaaggaaaaatcatacttttccctattattaaaatagcttggtgtgatatcagcttgtgcagtaatttttattatcacacactacagtgcaaaataaaaactgcctgtatatgaaacaagctttcattagttcctatgaaaacatgtaaaaacaatggctttgttttcccacattttactaaacactccacaggtacacttagaacacagtggttaaaaatgtagaacagaaaaaagttattaaaaacaagaaaatgggggcagatccactttgtggcgtgagagaatgtgtacactttccagtgcaggcaatttatgttatatacctgtgtccaatcggagatttttagggagacaatataaagaagccggaaagggagggtatgggactccccattctctgctctgcgtaccaagcaggtgggaggtgaggtgcccattaggttgaattcttatcgctgtgccccagccaatcgtgggctgcggaaatcatgggctgtagagtcatcgctgccggggcagaggcaccgttggtgcatgcccggctgccgttgctgcccctgcctcgtacaaacgtcagagaaggcacatgacacgcccctgggggccatctggcccaagtccacctgcgcggctgagtggaggatgctaggttgctgtgctgtttctcctactgtcttgctgccgcaccacccctcagaaaaaccgggtcgtcagtttcctgcggtttgcactcaccaaatatacttagcaatttgcaattcacccgcaggattattccagcctctgt

SEQ ID NO: 8987 - DNA, 2300 bp, Homo sapien
aaaaagaggcagcaaaaccgcctgcctcctcttctgcaggcttccaagtagagtttaaattgaagtttggagtttcaatactgtgctagactggacctattaatttctgacatgagactgctctttttacttcaaggaaccataaaagccttgggattgactccagcctacccagatgtagggatttctaagtctcagagagagcttagtggaaaagtaaagttaattctgtgtgtacatacaaaagtgcgtttctttccaaccacaagattcacctgtttctctgttctctgatccctgtgtatgcattcttcccattttcatgagtgcatctgagggctgtgggttagtgattttccttgaccataaatccagtaattttgtttcctgttgagtggaaggaaagaaaggcagaaccttaagaaatatttcattcatacaaaattactttttaaataaatatacaatgttttctggaacctcgtgattgtgttggatttttttttcctatttatttcattaaccatttcataaggaaaggtttcctctgactctttagaatggacagcttcttttaaacctttaaatcattgcatctgcctgtaattatttccatttttctagcattggattttgagatgagttacttcagaatgagtatttaaatgttttagacaaaagtagataaaaaaatctgtatcattgtcacattttttgagatttagaagccaacttgagttgcagtaaccaaaaatgtggtctggcaaagcccacagtccctggtgggttacgatctgaagatggtctgaagctgagttggttgtctggcagcattcccttgactggcctcacttccaggcactcctgcacagagctgtggggtgttcattccccatcaaatctcctgttgccctgaaaaatttaaagaggcagagaaagtgacaactagacctagcattttggtgtataagtgcatatatttcagtttttttgttattgttgttacggcagtctgaatttagaactttgtgctaacaacaggttacagcaaccctagagtccatcaatgggtggaataaaaatatgtcatatatacatacaatggaatattattcagccttaaaaaggaaggacattctgacacaagctacaacataaataaccatcgaaggcattatgaagcttcttttactagcaaagttactttccagaaaccttagtagctgcgatcttgcttcagtccataagctttctgtgacttgacttagagtagcaggcaattagtccataaaagaaacataatgaatatcctgatgcctctcaaccatctggaaaatattaaccgggcaccgaaatacttgataaatgctgtgaaaaacatgggattgggtggtgaataggttgactgacaaggtatgtagaagagtggggagagtgtactttagggtgggtggtgagactaagtcactcttctcattaaaagaatgtgtgctgcctgtacaaatttgtcttcatctttttcagccaatccactccaatgggcttatggatatgctggccatattaacaaattaagacacaagatttccagttaaatttgaatttcaatcgaccacagataattgcagagacagcaaatacaaatattgatgagcaatacttacattaaaaataagtcatttttacctgaaattcaaattctgttttcccacacatagctacattatttcctgcacgtagctacatccctcctctgctatgtaaacccccaatttcagtcacttggggagatgaatttgagactgatctgcagttcttctcagctgcagcaactgaataaagtcatctcccctggaaatacttgcctcagtgattggcattctgtgcaatgagtaacgggacctaggctgaacctctggcatttcagtaacagattttggttccctcatcaggaagacattgctcttggcttggctgtcaccagttgggagaatttccgcaaccctaagcagcagcctatgtgttttaggcaggatgtgggttttagtctttctatttagcattgctgctgccagccccaaccacatttctgattgcctaggaagaacagcctttcaaatttgacttctgcatgtggataggtgagtgtcttttgtggataccgacagtgggaatggctcctctcaatttgagaaattctgaaggaatttccattggcaagttcagcaaggccaactgacggagagaggaagcaccctgactgttccagttcagacactcttggggcttgttagtaattg

SEQ ID NO: 8988 - DNA, 2300 bp, Homo sapien
ttttataacttgtatatattagatgttcacctaagtaagaaacataaagttggctgggcatgattgcttacacctgtaatcccagcactttgggaggctgaggcaggaggatcatgaggtcaggagatcaagaccatcctggctaacatggtgaaacctcttctctactaaaaaatacaaaaaattagccgggcgtggtggcgggcgcctgtggtcccagctactcaggaggctgaggcaggagaatggcgtgaacccgggaggcagagcttgcagtgagccgagatcgggccactgcactccagcctgggcgacagagtgagactccgtttttaaaaaaaagaaacataaagtaaaatacatggatacttgcaccaataatgcaaaagtttcagctatttttattaacctaacgacattaaattagtcttatttatcaaaaaatcacacaaagataattttgttcttggctgggtttatagtcttataatctctttgtcaaaccctgacacctttaaatatctagcagagacaaatgtaaaacccaaacaaaaaaagtatgctgacaattccaaaggcatttctatttttattttacaaatgatctaaaagctctcttgtttattaaagatttacttaagtcatgtaaacttgaaaaatgcttagactcatttacttaatttatgaacgctttttaatttataagccaatttgctaccctctaaaaacaacacgtaacatctagacacatatacctacatacacacaaagatccaatagcttttacctttaaattccagccatgagatagcaatgcaaactcactggtttatgaacatgttcacatggttgaactttatttgttctgataggtaatccaataaaggttgtgaaacaaaattttgaataaagcagtttccatgatagtttgattatttttttttttgagacaggatctccgtcacccaggctggaagtgcagtggtgtgatcaaggctcactgcagcctcaacctcccaggctcaggtaatcctcccacctcagcctcctgagtagctgggactacaggtatgcaccattacacccagctaatatttgtattttttgtagagacagggtttcaccatgttgcccaggctggtctcgaactcctgggctcaagtatctgcccacctcagtttcttgcgcccagctgacagtttgattttttttttttttttttttttttttttattgataattcttgggtgtttctcacagaggggatttggcagggtcatgggacaatagtggagggaaggtcagcagataaacaagtgaacaaaggtctctggttttcctaggcagaggaccctgcggccttccgcagtgtttgtgtccctgattacttgagattagggattggtgatgactcttaacgagcatgctgccttcaagcatctgtttaacaaagcacatcttgcaccgcccttaatccatttaaccctgagtggacacagcacatgtttcagagagcacagggttgggggtaaggtcacagatcaacaggatcccaaggcagaagaatctttcttagtgcagaacaaaatgaaaagtctcccatgtctacttctttctacacagacacggcaaccatcccatttctcaatcttttccccacctttcccgcctttctattccacaaagccgccattgtcatcctggcccgttctcaatgagctgctgggcacacctcccagacggggtggtggccgggcagaggggctcctcacttcccagtaggggcggccgggcagaggcgcccctcacctcccggacggggcggctggccgggcagggggctgacccccccacctccctcccggacggggcggctggccaggcagaggggctcctcacttcccagtagggggcggccgggcagaggcgcccctcacctcccggacggggcggctggctgggcgggggggctgaccccccccacctccctcccggacggggcggctggccaggcggggggctgacccccccacctccctcccggacggggcggctggccaggcggggggctgacccccccacctccctcccggacggggcagctggctgggcgggggggctgaccccccatctccgtcccagacggggtggctggccgggctgaggggctcctcacttcccagtaggggggggcgggcagaggcgcccctcacctcctggacggggcggctggccgggcagggggctgacccccccacctccctcccggacggcatggctggccaggcggggggctgacc

SEQ ID NO: 8989 - DNA, 2300 bp, Homo sapien
cattacacattgtatacaggtttcaaaatatcacatgtacctccaaaatacatacaactattttgtatcaataacaaaatttttaaaaaactgatataggctgtgaagggcaaaccatgtagtcatctcagagctcagcttattcttgtggatataaatgttttagctggctctaaaccaaggattttgtatgaagtaatacttattcaaatattttcaacaaaatagagtaccttgcaaacaggactttgagatttttcatttgtttccctttacagttcgtcatatacgcttcatcttctagtgttgattgatgaaacaacgttccacatgagacagcagagcaatagaacacagaacaggactctgcctgtgtggtggccggtttccatcctttcacaaacaaagagatatttataaacaaatatttatatgcaaatatttgatccacctaggaaaaatagagggctactctttcccaccaggagaggccttatagcctgtgcacatatttgaacaaggcaaccagagactttgatggtctcaactctaccactcaccaactgtgtgatgttggatacaaacttaaccactttgcaactcacttccgcatctgtaaaataagggtgataataatagcacctggtttagagagttgtaaagataaaagcaacattagtaaagtacttaggatgaagtaatcatgttttgaatatattttcctttaaatgtggctgccaatattttcatggtaatattttcaaatgtattcaatagctttttctttatcaggagaaaatcagttgttttaattaaattgacattgaatttttgatacatttaggagaatttagtttctttttatacagtattgacgcttctaatcccacagcatgtttttctatttttttcttttcttcaatagttttaaaatttttttgttcattttggttatgcaaatatctagttaatttctatctgtaatattttcctatttatttttagtagctcttataaagggagcattttgtttttcctgtctatcctgacataataaagcaattagtttttaattgatttttaaaaatatttatgcattctctttcatatgtataataataatacctaaccattttatgatttacatgtggcaatgtcaagaagaattttaaagtaagatttactaacgaatattagagaacatgctcaaaaacagtcctctccaccccctcacttccacttgcattcttgatcaagaagtgaaataaaaaatactaagactattgagtcaaactaataagacacaaatctggactttggagactcatttccctcccacttttgatagcttagctgaggaggagatcaaatggttgagtcagtctgtagagagatagcaaggctgattatagttttcctggcctgcaaagctgtttccagagccctcagtatacagaccttggccatcagtatgcatactctctggtgtggtttctgggcatcagatcccttaatatataggttggcgctaaagtaattttgtaaacttttaatggcaaaaaccacaattacttttgcttttaatggcaaaaaccagaattactttagcaccaacctatatattgttatttagagaaactaggcattccctacctctcttaggcaaacctatagctatgtaacatggcaacggaatgacactaactgtctcattctccttgggagtgctctctgtatgttcagtctcccagtgaagagaacccttctatcaggaccttcatcatcatacaaaaggaatatctatgccaggccacagctgcagattagtgagtgtctgagaactgcatcttttctgttatttttctgcttgaaagtttttcaccaataaatcctacactatgtctgcaccatgtggtgctagttatttgtgttctcttgcatgacactgatgatgttatccaaacacaatttcaaaaactactttctgtagttggtaaatatatagaaattgagaaaaaggaagaaatatgaggaagaaagatgttatctgttgcaacagttcaatgttcttaactgaagccacagatgagatttggctcatttgcagacatatgggtgattggtacagtaggtttataaacagaagtttaaacttgtaagcttaagcttccgtttataaacagaagtttaaaattataggtcctgtttaacattcagctctgttaactcactcatctttttgtgtttttacactttgtcaagatttctttacatattcatcaatgtctgaagaagttact

SEQ ID NO: 8990 - DNA, 2300 bp, Homo sapien
agcctgagatataggaaaggaatatcttcaaaggcggagtgttaacctacttcaggcattaaatatgcagttctaagcattaaaggatcaagaactaatcctggcacattcctggtggtttacaaaaatacatgggacatgttttataatgaaatcagctgctcaagtcctagagaatgtggaaacctcaacaaagcaatctaattgttctctttaataccatcttaaagtttttgttaataaacaaaaaatgtttacaataatttaaaaattgtctcaatgtccttggatcttacctttacatatctgatttaatgtaacaaattaagttttcatatgtacctgtttggtacctaagagaacagagtaaagctttattggaaaagtgtcatttgtactataacctccacacattttcttttctctctgttactttgtcacagttatttattcgattattttttagtgtttctgtatattttaggtaacaaaacactgaaggaaagcagtgaccaaaagaacgtgaaagacaggggttactgtgacagaatagcctcaggacttgctgatgagtagatgtagaaaggaaggaagagagggaggatcaaaccccattccaaccccaatcttccagaaaagcctgaggataaatgatgggagagcgaagaatcccttttagctgaaacagaagttatgagaacagaagcagtggtagatgaatggtaagtgactgaatttacccagcttatgattgggaacccctgaatattttaactgagataagaaacacagcaacaaaaatggtgttgggatttaatgttttttaaaaatttttagtcttttcttaaaatttggcatttatttcaaatgtgtttttttttaattaagaattagttttggtaaaaatatttgaatcatactaagtttggctttccaaaatcagggaatgtcttttatacgtgttatgcttattcttcacctcattctcaaaataatttgaagagtatagagaaagaaatttagaatgaaagataattttaagtgaattgacaagaaattcagagtgaaggagatagcaggggagaaaaaatctacgggctatgccaaagggcatgttaataaacaaaatatctgctactgcagcccacataatcactatattgaaaagtctaacactctgctaagtaaagaaaaatagaattcaaattatttataaggtaaatgcctactacttaaagctttgctagtcatggtgatttaacaaaaataaaaatctgccataaaactatgtaagagttaccctatggcaaaatagacaacatcctccccaatattcctataataaatgcatcagctagctttgtatggctgttcttacaactactttcagtgcaagctaaaataatgtaaaagcccatttcataaagttaagtgtgtgcaatacatattatattgtgatgaaaaggtgctaggaaccattcagtctcaaatattcatctaagcacagctgtacttgaaatgaagtgatttcatcaaatcaaaattcttccattccaggaaactcactttaaagcacaaacactactaaagaacaatgcagcaagtcaccaactctgtattattttacttgatttgatagttttccttcaatacctaaatctaagcaatatcaggcctgcctcatgtggatccttcaaataaaaaaaagtatgaaatatgcaagaagttgtgtaaattctaggtcataatcaggaatgatctcttccaacacaagactatgaaacagctaatttagcccctatcagatccaattatattacacttgcttctcacaatgagataaactatatatctgctggtgagctatatccatgaattttcagcagaaatctctcatttgagcaatgtaatttagactaagctagggctaagataaagcatgaacttttgttcttagaaaggatgcacatgatggaatgtccctttatttagtgttgaagataaaaaaaaagcaggaagcaaataccttatctactcctttaccacaagttattattatttttgtgtttttgtgttcaaggtccatgtatctctgagcagctatgaagaagcttcctggaaaacaataagcaaaggaaaacaaatgtgtcccatctcacatggttctaccctactaaagacaggaagatcataaactgacagatactgaaattgtaaagttggaaactacattttgcaaagtcattgaactctgagctcagttgcagtactcgggaagccatgcaggatgaagatggata

SEQ ID NO: 8991 - DNA, 2300 bp, Homo sapien
atttggtaaatgactgcaacaaagtgagtttttaaatagtgtaactgataaaataagctacagaaatgctgtaagtttttaagggagaaaagtatataaagaaatgtctaaattaatatgatcatacactaataatgatagatgatatagctttttggatcataataatagaaagtatgtgagaagtgttatcaatcttctcttagaaataattaggaatcaggtgacattcttcatcattgttcaagctaagcatcatttcatggatagtgagaagttaatactttgttaggaagctttaaggtatgtgaaagaattaaggaaatgaggatgaaaacccagtttttgcaaaatctggtgaaagtcatgagacgtgaggccagccagacttcctgaatcgagtggggactcagggaactttcctgtcttacaagaggattgtaaaacgcaccaatcagtgccacgtaaaacgcaccgatcagcgctctgtaaaacgcaccaatcagcaggattctaaaagtagccaattgcggtgaggattgaaaaaaggtcagtctgatacgacagaaacggaacatggaggggacagtaaggaaataaaagctagccaccccagccagcagcagcaacccgcttgggaccccttccatgctgtggaaggtttgtcatcctgctcttcacaataaaccttgctaccactcagtctttgggtccgtgccatctttaagaggtgtaaccctcaccgcaaaggtccgcggcttcatttttgaagtcagcgagaccaggaacccaccggcaggaaccaactccggacacggaccagaacagagatagaaaaccattcttaatttcttatttttgtaatcatctatttaaactggtcctcatgtcaatggtctctgccttttctgaattcaactagaatagtaaacataagcatagatttattatttgtttcaatatttttgatagtggagttttattgatatatgacttagagcctccaaacatttttttgattatttcatcaatttgaaaaaaaaaaaaacaaaaaacatgaacaagtaacatatgtatatttaggtgtttagagatcatgcacagcgttcctaaagagaaagtttttacattgcctttctgcatctgcttcacagctgtggggtgagtgcacctcacgctggacacctttgactaagataatctccacacagatatgaaccttggaagttttagatcactccccactcatctgaaaccacaaaactcatacccaatccttcccctaagtacagttatctaatattctgcctctccccaaaggaaagctttagaggagattccttaatttcgtccctcatatatagcgctccccccccatattttcctgggttctgtattaactacatattgctgctgtaacaaattaccacagatgtattaacttccggtagttatctttttaaaatcttgtcctgtgtattccttgctgtctgcaggattatcccatggttgttgttctgttaggaactttcccaaccatgccagaagagggcactcccattcatactcacgttaagtagctaagtagctatcagtttcttctccatgctccattaccaacaccatgtctctctctctctgtctctctctctctgtctctctctgtctctctctcacacacacacacacacacacacacacacacacacacgcttgaattttctataatagcagccaggtgtgtggcacagctctttctgtcttaatgtgtgtctctctgcttaatatctaatgtggctgagaataaactagaaccaatgtctccaggcagattagctagccttagatagatgtaaagaagacaacctgactcttttctgaaacattcagagcatcctctaccccgaggatcatgggaattccctcatgttcctcctgctctgcctcaagcaccccttctttgctgcacagcaagaaacagttctgacagagcagacagtttgagatctgtaacattctaatgagaatatctctaaggagaatatttggcttttctcactttctctgtagagaaacaaattgtcattcttctcttacagaggggcagtagagtgtgtctgggtcagctgagtgactacatcaaagctcccagccttgaaaaacacatgctgttcccaggcctcaagatattgaaacattaattagataatttaaagtagcgttttcttctacaatgtctgaagaagtgacctacgcgacactcacatttcaggattctgctggagcaaggaataaccgag

SEQ ID NO: 8992 - DNA, 2300 bp, Homo sapien
atgtattaattctaattcaagatgcactgaatttccatcatgtgaatcagatgttttatttatttctctctcattgtatggataatgtctataactagagaatgagactcaatcctaccttttcttccaaactgtctatcttcactagggtggagttcttgtctatgcagtcctttctactgttagcccaggttttctcctcatttgttgtaaaatagtagcaactattttggtaccattgccacatcttaggacatggattacatctgtggtctgaaaaggaaattatacccaataatataaactgaagactctagagtgactggagaaggctttgaaacaaaatcatgtaattgaacaatagggactgagagcctgcaccctgaaagcatactgctttagaagcctctgaaaaaaaagtgacccctggttatgggttggggcaacagggattctcttttcatggcttagtcttctgacctcagaattaccagctatgcctttaagctttcagagcaacatgatcacctagaaatagttaataaaatgaggggttgaagtatccagattgatatcattccaagatacttcccaaatttgcctgtggtttcaaaaatattaaatgaatttgtatatttccttgctgtgtgtaaatttagtgcaacatcattaaggttcactggatgacataactctctcaatactcttaggtggtacatgtgatcaacttagaccaggataacatatgccatctgactggtcagcaggactaagtctgattacctgaagtatgaatgattagctcttggcacagtttgatggccatttgttcctgcctcttcagtacactggagatctgtgacttgagaaattcctcctccatggacaagttgttggagttgcccagttgctgggataagttatcctgctgctgttggatggttttctgaagttgactcaatttctctgaatctgagttaatgtcattagatatctgcaaaactccaagacatgacaggagacaagttcatatattcttctattcttataactgtagataattctcgtgacagaaacatttcttaattgttcaagatttattagtagctcttagtatttgaggtatcatgaaagaaacaaaccagatgcctttctattccaaattatttatagttctttataattttatttacatttttattattgcactatattaaaataatgatttaataatgatatatttctgacatcacatctaaggaagggccagtcattctgccactcattttcatgaaattgttttatttttgttttattttatttggagatagatgatgtaattgttgttttaatgaaaacagcattctttgggacaatggatatctcaaactctgcagatgacctgagatgcttgtttaccaaaagaaaagaaaaagcagatcttaatggcatatcagaccatttctcgtcatgggtccatgaaatatgcccttttcataagcatttaaggtgcttcatcagcacaacaaatttaagaaccactgcaccaaaagcactaaattttagaaaagaaatgtcacccttctatatcgaaccaatggacgtacgttattgcattttcacttaatttttaaatatacattattgtagaagatcggctgctaatcctcatactgattggctccagaatatctgttactgctgcttgaacatcatattccttttcaaaagagcaaggtacatcattagtctctttttatgttggcaaagatatgtccaaatcctaattaaccattaaatcctaaaaaattatccattaaatcattaaaaagaaatgaatgtagcagaggagatgttagtatcattcagcaaattaactttcttgactgtgagttccctgtaagcgaataccatgccaattcactactctgtataccatatacttaacaaccctataaagtttgtattctcaggatgtttttctcattactcaagaactccctaccatgttcatccccaacttcccgaggatgggtcagaatcaatagaatgttcctttgtggctgtggtgcttgagagtggagcttccattgtcatgtggagatggttcaactctcttacttggtaaggtgtatcaggccactcttcctctttgtttatatgtctttctcattcatagaaatcaggctgctgctgctacttggaagatttctctccactagagaagtttcatgtaagcagactgaacctagtctagtgttaagtctttcaggtaaataaaaatagcaagcacttccttc

SEQ ID NO: 8993 - DNA, 2300 bp, Homo sapien
ataagtatttaaatgaggaagtatatatttcctctgtctctttttgttatcctattcaatatgcaaaaccaggctgtgtgatctaaatcaagtttcttatcctctaaagcctaggtttcatatctaaaaattaggaatgatattaccagacttgtaaggctgttgtttgcacacaaaggaagaattaaatgtgatcatttatagactcgcctgagagcatagtattttattattaggtactcaataatttttttaacttacccttaccttctcacctcacctctgtaaattttaacaaaagacaggagacctgcatatttaccaattccttattctctatattgagtaaggtagaaattttagagatcctctaaaaatttttatccttgctgtcttgccatgttatggattcctgaattattttatattactggtcttttgctccattgccacctttcaggacagggcttacatccattatctgaaaagccagacgtatatattaattatcttgatttctttatattaaatatggaccatttaatgcaatgtttgagttagtcttacaaatatctcatttcctcccatgttcacaatagccaaaatatgaaaacaagctaaatgttcatttcattgatgaacaagtggataaagaaaacatagtgtgtgtgtgtgtgtgtgtgtatatatatatatatatatatatatatatatatatatatatatatacaagaaaaaactttccacaagaacctccatgtcctcatttagaatttaatttaattttttacctcacacacctctttttttttttttttacttccacttgacacctttctggggtaataggtatgttgtacctgaattccactctccctcaaaatatctgtctcaaatttgtatatacattagtaggtatcaatcaggaaggtctccctcaacccattcaataggccctgccacaaaatttgaaaagtttaaaaaattcagagccctgcttatgtacatgggtgtacatttttgcagacaaaaatcccctgtgccctacctactcagcaatcttcccccttcctatcaatcttcctcttcccctgaatcattggtcacaactgatctctttgttttctttgtcttggtttttctcgaatgtcatatagctaggataatatgatagcttttcaaaccggcttctttcacgtagtaatatgcatttaagattcctccatgtttttcatagtttgacaacatttcattttgttgtcgaatgatactccattgcatgaatgtaccacagtttgtttatccactcatcttttgaaagacatcataattacttctaatgtctggcaattatgaataaagctcctgtgaaaatgtgtgtgccagtttttgtgtgtgttgggagcaagccccccaaaatccggccataaactggccccaaaactggccataaacaaaatctctgcagcactgtgacatgttcatgatggccctaacacccatgctggaaggtggtgggtttacgggaatgagggcaaggagcagctggcccgcccagggtggaaaaccacttaaagacattcttaagccacaaacaatagcatgagcaatttatgccttaagggcatgttcccgctgcagttaactagcccaacctatttctttaattcggcccatccctttgtttcccataagggatactttcagttaacctaatatctacagaaaccatgctaatgactggcttgctgctaataaatacgtgggtaaatctctgttcggggctctcggctgtgaaggctgtgagacccctcatttcccacttcacacctctatatttctgtgtgtgtctttaattcctctagcgcctctgggttagggtctcccagaccgagctggtctcagcagtgtgtacaggttttccactttctatggttcctagattgtctgttaatactatacttacctctataagaaactgtcaagtttaccgggccgcgagggtgcaggctgcgcagatggtgtggtcctgcgccccgagggccgcagcagctcatccggcagctcccaccccaacaacctggaagggggcgggacttccgtttgtacccggctgtggcaatctgtggtgaagttgaaatgcttttctgctagactggcaacatgttttgattcttctcaaataactcgcaagctcttgtgaagcacaacggcctaccttgtcctgaagaaaacatactctaaggcccacagatgattaaacccagccatttatgtgacaatagcatttttatttttct

SEQ ID NO: 8994 - DNA, 2300 bp, Homo sapien
tgagctagttggctgagttccgtgaggttgtctgtgaggcataaggaatagtttcccttggctcatgctggagactgggaatgcacacaagcctcttcctgctgctgctcttacttttatattcatcactgctcttttaattggttccagtgctgggacgggttaaggccttcccccatggcatggactttcaggttcccctgtgggggtatgtatcctggagccagtctcttcacctcacacaccctgggagcttacagtttttcacctagctcatggtgtaggtataacctgctgcttctttcaaagagtctgtggattctttcagttttcctgttcagttcctgtgttgcttcttgggaaaagagttcacagtgagaaggtttttttttttttttttttttttcagatggagtctcgctctgttgcccaggctggagtgcagtggtgtgatcttggctcactgcaacctccgcctcccggattcaagtgattctcctacctcagcctccccagtagctggtattataggcacccgccaccacgcccggctaattttcatattttcagtagaaacggggttttgccatgttggtcaggctggtctcgaactcctgacctcaggtgatccacccacctcagcctcccaaagtgctgggattaaaggcgtgaccaccatggctggcccacagtgagaattttttactcactattttgtccttccaagtggtagagtcatgctaacactgcctccaatctgccatctaaaaaaaaaaaaattccaatttttaaaaaatttagaataatttgatgaacaacaaacagcttgaaacacatgtgaatccacaatgtgcacttcctcatagatcttttatatggtctggctaccccaactggagcattctgacactcctttatatttagcatgcttgattttgcccacctatcacctaacatctggaaaagttttggtagagtaatataagtctattgtacagattcaggaagaacttttagacattatctaaaacaatcttcttgtctttcagtttaggaaatgtagatgcaaattgttaattgtcctcccaaaggcacaaggttgttactgatacctgtcttgttatggtttgaatgtgtttcctgcagaattcaggtgttgccagtgtggtagtattgagagaggtggggcctttaagagatgattagtccttgaagtcttctctcttgaggatggtattaaggcctttataaaagacgctacatgtagcatttggctggcttgaccttctgctttctgccacgtgagaatacccttcctcctctacagagagtgcagctctcacctgacatccaaacctgccagtgccttgatcttagatttcccaccttctggaatgctgagaaatacatttctattgcttataatttatctggtctcaggtatcctgttgtaggtcagcacaaacagactaagatgggaatataattctaatgtactgattcaggaagaattttttcacattacctaaaacattttcttctcagtttaggagatttaggcacaaatgaactggcttccccaaaccacatggtggttagtaatagttttaaaagtttttacttccagtaaattgtataattcctcgtgatcataatgtaccaaatgtgctataaaatgttgaatcaagttcagatactataagaaagaccactactctgttcttggagaaaggaaggggctaggtcctataatctcttctcttttcacaaagacacagagaggttaaactaagtgactccctaaaggatgggtaagaaacagggatgtgtgtccttccaagttattattattctgcagactctgaaggaaccacagtgctacaccgtgctattgtaagttcttgccttctttacagtgaagttacatgagaaatgcaaacaggtaaacaaaaaagacctgagaaaggccaactttttgacaactgtttagactgagacggcctaaacagaaaacacatgctatttcccctcagcctgactgatttggcattcagagtacaagctcacaggagaggggctgggcctgtccagtcaggaattgcagtcagagactttccctgcccctcgctgggaaagaacattaggaatgccttttagtgccttgcttcctgaactagctcacagtagcccggcggcccagggcaatccgaccacatttcactctcaccgctgtaggaatccagatgcaggccaagtacagcagcacgagggacatgctggatgatgatggggacaccacc

SEQ ID NO: 8995 - DNA, 2300 bp, Homo sapien
cttgttaacaggccaggtgtggtggctcatgcgtgtaatcccagcaccttgggaggccgaggcgggcggatcacgaggtcaggagatcgagaccattctggttaacacgatgaaaccctgtctctactaaaaatacaaaaaattagccaggcatggtggcgggcgcctgtagtcccagctacttgggaggctgaggcaggagaatggcgtgaacccaggaggcagagcttgcagtgagccgaaatcgcgccactgcactccagcgtgggcaacagagcgagactctgtctcaaaacaacaacaacaacaaaaaacttggtaacagataggctcctgaattccttttagagcagttactttagaaatcttacagttaggccaggtgcagtggctcacgcctgtaatcccagcactttgggaggccgaggcaggcggatcaccagaggtcaggggttcaagaccagcctgaccaacatggagaaatgctgtctctactaaaaatacaaaattagcctggcgtggtggcacatgcctgtaatcccagcttactcaggaggctgaggcaggagaatcgcttgaacccgggaggcggaggttgtggtgagccgagatcgtgccatttgcacaccagcctgggcaacaagagcgaaatttcgtctaaaaaaaaaaaaagaaagaaaagaaaaataaatcttacagttaaattctttctctgccctttgagaagcaaatctaccacacagaactgtttcttcaaggacttgggagctgtttctttgaaatgcaaacattcagggagataaatcttgctctttctttcagatgcagcataaggaccaacttagctgggtgcttcacttcaactatcaccatgtccttctgtcatatagataggcaaagtttctctgtcctctggataagggccaattaacaaatccagagagtctagtcacattaactttccttaacaccactcagtatcttttccttagcaaactccactttaaaatgtcatcagctttacttttggggaagttgagttcagttaatgctgcactggttcctgttgcaatagtattactgaataaaacctgtcctcaccacattaactagtatccagatttgttgatccttgacaacactcagatgtctcctgcactctactggcttcaaggtcggataaatgagttgaacacctcttcagtttccagcaatgttaggtgttttctatatttctttgatttgatcattactatggaaactggaagagagggaaaaaaaatcaaacatctaacataatatttcagtcccaacaccttccataagctgttccttgcaatataagtgtatggaatgatgaaagaggcagtgtagcgtaacagaaaagaccacgagttttgcagcaagagtcagctttgatttgattccttgctctaaatttttaaaattagcttcttaaacctgagaaagaggctaaattttctgtctcattttttcatttgaaaatagaaataataatgcctactatatagacttggaaaagtgagattgaacaagaaaatatgtacaacatgtggtacttagctcatagtaattgttcaataaatgttattttgtgttaatatctgataattcccaaagagatttgttttctctgtctgttgttacaacaatgcatctcctcatgccatccctcatttacctatctatatatttcctttattaagcaatgagtttcttcataggtatcatttttccttgtattgtaagctcctaccaattgaaaaggtgggcatccagtacctgtttatgtaatttaaaaaatacatgaataaatacatgaacaaagttatggtaaacttggagcaccaaaactgaaatagtttgcatcggttaaattaattaatgtcagacttagttgtgagagtaatgaaggcagcataagacattaatgtatgcatttttcttacatttggtctgaaacaaagactcatctgctatgctgccttttagttttcctgagtcagcagtctcagaaacaggatctaaaggtacaaatggaaaattaccacagcatagtttcatttcctgctcttgaatatctggttgaactacttaagcttaatttgttaaactccggtaagtacctagcccacatgatttgactcagagattctcttttgtccacagacagtcatctcaggagcagaaagaaaagagctcccaaatgctatatctattcaggggctctcaagaacaatggaatatcatcctgatttagaaaatttggatgaagatgg

SEQ ID NO: 8996 - DNA, 2300 bp, Homo sapien
atacaaaacaattagccgggaggggtggcgggcacctgtaatcccagctactcaggaggctgaggcaggagaattgcttgaacccaggaggcggaggttgcagtgagccgagatcatgccattgcaatccaccctgggtaacaagggtgaaactccatctcaaaaacaaacaaacaaacaaacaaacaaaacacatgaaattcaccatcacaggagttattgcttggtgggtatagagtttcagttggggaagatgaaaagttctggagatggatggtggtgatggctgcacaacaatgtaaatgtacttaatgccactgaacagtacacctaaaaatggttgaaatggtaaacactttatgttctataatattcatggcatccaaaataactgagtcactgtagaaatgataatgtgcccttttcagtgtgatatcgtttcagtattttttaattcttttttttttttttttttaaagggagtctcgctctgttgcccaggctggagtacagtggcacaatctcagctcactgaaaatgaaaagcattttcattttccacctcccaaatagctgggattataggcttgcaaccaggcccagctaacttttgtatttttagtggtgacagggtttcaacaggttggccaggctggtctcgaactcctgacctcagtgatccaccccccccctcagcttcccaaagtgctgagattacaggcatgagccactgcacctggccaactttttcaatttgttctcaaatactctgcacataataaaaggaatataggaaacagggaggaggagggaaatggaatcctaattaggctgtcaatattggtaatttttcctaatagtttcctatatgttttatttatgtatttatttttccattcttcctttgtgtattcttttctttgcacttttttttcctggagtaatttaaagtaaatgccagatatcatatcattttgcttataaatacttccttcagaagacatctctaatagatatatatctggttaggaggttgtcaagggaaaatagaaaagtattctatcagtaaatacatatagacatacttatgggtctctcatgtaagcgtctttgtgacatgagtcaatcatggattttactgaaatacattatttgatgggtaattcaactgtgctgaatattagtactatactaataattattatttattggcttcttattatgctccaagtacaaagcttgtcatttttaaccagcgtgtcatttgaattcctatagcaacgtgacatttttcacaaacctagtgtaaaaaagcttattatttttacccagcatgtcatttgaattcctataacaatgttatcaggtagacattatccctaatttccagacatgtcatttgaattcctataacaatgttatcaggtagacattatccctaatttccagacaaagacatagattcaaagtattaagatttcccaagattgtagactaaaggaaagtactgaaactagctctttctgcattcaaagtgctctctgctgctacgttacactggcactgcatgaactagtagccccagataaattctaaaatcacccaggacacaccatcgctggaaatgggagccatatgtgattcaccccaaaattcttagatccattgccagataaaacagtgaaaatcaaaagagaatatatctgattcgtaaaagacaccatatagaaacagtctgctaatgaaattagcaaacaaacattggaatcaaatattttggcccataattctggcacattttttacaaatgtagtgtgacttactctctttgaatttcagtttctgtctctgaagagtgggtacaatatctctcctctgatgctcatgaaaaatagttttccctttcataaattacttagcgaaatatcctgaaacaccttcagaatcaccactttctccacctgcaatacacataactcaagaatttgcgtcagcgaacttcccaatatgaagcaaagcctctccttcctcctaccaatgattgagtcattcttctattagataacagtagctatttaaatacttctgcagaagctcacatatttttagtttgttgaagttcgtgactgcttcactctctcattcttagcttgaatttggaaatgacttttgatgacctaaagatccagactgtgaaggaccagcctgatgagaagtcaaatggaaaaaaagctaaaggtactagggatgggaaaatgtgtacagggaaagaatcccagtgttagccccaaaatgtaaatt

SEQ ID NO: 8997 - DNA, 2300 bp, Homo sapien
tgctctactgtctttctgtcaagaaaaagagaagggaaagtttcatgatgggttccctacgtacagggcactcatgatagaaatatcctattcaaaatgctttcctgtctcttattttattttctctaggaaataacatctaaagcaggtcaagtgggtattctgctcctgttgtatgaatgggaacgttaaggactggaggaattacataataatttagtggaaggccacctaaagccctgctctccttgtcctataaaataccttccaccttgccaagtcttctactgaaatctggaaatcacccttcatcctaaccccagttgcctaatttaaaaaaataaaaaataaaagactgtcagtgctcatttcgtcttgaaactgacagattttaaatcaccagtatggtaccaggccattttctcattatttgttttccttagctgagaacaaaaccagtttatatcctgcattctcatatcccatcatcaagctatgtgtgaggacccttagagtatgatcagctcacccaagagtctcccttccacaatcactcagcataattagatttactgagctagaaaggtcctgaaaggaggttttattcaattcttatgagatagatatatcactgtaaactaacttctacttttcttatcccagcctggccaatatggtaaaaccttgtctctactgaaaatagaaaagttagctgggtgtcgtggcaggtgtctataatcccagctactcaggaggctgaggcaggagaattgcttgaacccaggaggcagaggttgcagtgagccgagattgcaccactgccctccagcctggtgacagagagactctgtctcaaataataataataataataataataataataataataataataataatttttttattaaacatttggtattaagtaaaagatcacctacttaagtataaatcattcatacagcattcttttgtttcttttaatattttgcttttttgaggcagattctcgctctatcacccaggctggagtgcagtggtgtgatctcggctcactgcaacttctgccttccgggttcaagtggccctcctgcttcagcctcccaagtagttgggattacaggtgcctgccatgacacacagctaatttttgtatgtttcgtagagaaagggtttcatcatgttctccaggctggtctcaaactcctggccgaagttatcagcccgccttggcctcccaaagtgctgggattacaggcatgagccatggcacccggccacatttgtgtctatagctttgtttcattgtaagtattctaggccaggcacggtggctcacgcctgtaatcccagcactttgggaggccgagtcgggcggatcatgaggtcaggagatcgagaccattctggttaacatggtgaaaccccgtctcgtctctactaaaaatacaaaaaaacttagccgggcgtggtggtgggcgccagtattcccagctactcgggaggctgaggcaggagaatggcatgaacccaggaggcagagtttgcagtgagccgagattgcgccactgcactccagcctgggtgacagagcaagactccgtctcaaaaaaaaaaaaaaaaaaagtattctatgcttttgcatgtgtgcttgtttttactctaaccttaggttttattttcctgagtgacaagacttatttctcaatcacatcactccttaaccaaagagagagagagagagagaaagagagagaaagaaggaacaaagaaaaggcaagaaagaaagaaacctatacatttgcttttttaaaatttggttttaaaaaaatgtctttctcagttatctatttcaatgggaagtgaagtcagggaggaggaagatgtcactgataacacctgaaaattctaatcttccgacttgatttctcatcttcaagtctgttttctccaaagatgagatggctttcctgttcacttggcaacctctcagtcttaccccaatgcttagggatataaatgacccagaaccaggagagttgattatcaacatagtgaaggggagggtttcaaagagcaagaaggggttgttagtcacacggagagagaagaaaggagattagcagggtgactttcaccctgcaacagtcacgctggagtactctggtgaaggatcaagaatattaccagttttctgatgaagaaaggaatatatttggtcaccagcaatctgcctttgaccatcctcaaagccaagtttttcatcgctgtctagaaaaatacttcattcagaggac

SEQ ID NO: 8998 - DNA, 2300 bp, Homo sapien
ttttttttagacagagtctagctctgtcgcccaggctggaatgcagtgacacgatcttggctcactgcaagctcccgctaccacgcccggctaatttttttgtatttttagtagaggcggggtttcacgtgctagccaggatggtctcgatctcctgacctcgtgatccacccacctccgcctcccaaagtgctgggattacagtcgtgagccactgcgcccggcctcattttagttttgatgcaaatatagttaaaccctcccgggttctcccttccgggttcaagtgattctcctgcctcaggctctcgagtagctggggactacaggcgagcgccaccaggctcagctaattttttctgtattattagtagagacggggtttcactcgtctcatgttggccaggatggtctctatctcttgacctcgtgatccacccaccttggcctcccaaagtgctgggattacaagcatgagccaacgcgcccggcctatttttatttatttattctttttgagacagagtcttgctctctctcccaggctggagtacagtgggcgatctcagctcactgcagccactgcctcccggattcaagcgattctcctgccttagcctccacagtagctgagactgtaggagcgcgccaccatgccttgttaatttttgttttttctgtagagacagggttttgccatgttacccaggctggtcttgaactcctgagctcaagcgatcctcggcctgggcctcccaaagtgctgggagaacagacgtgagccaccgcgcctggccccctgtgggtgtttttaaaattagagacactgagaccccgactgaagaagataggccacggggctgctgttatctaatatttatcagaactcacccgacttgtatgggcaacgcagccccttttcactgttctttttctttgcaaactccacagtcctccctgtcgctgccctacagtactggttggaaggtctttcttctttgactctaggtggggaaatccagaacgaggcttcgcctcacctgccctaatgcccaatcttctactagcattccaggcagcgctttctagtcacgtgagggatacctaaccactggaactaaataagatgtgggggaacaactgaggtcatcacctaaattgcttgatactctcttttccagaagacgagccccctttctgagtttatggcagaaagtgaatccctccctccctcccttcctttctttttctgtaagacggtgtttcgctcttgttgcccaggctggagtgcgacgccgtgatctccgctcgccgcaacctccgcctcccgggttagagcggttctcctgcctcagcctccagagtagctgggattacagccatgcgccaccacgcccagctaattttgtatttttagtagagacagggtttctccatgttggtcaggctggtctcgaactcctgacctcaggtgatccgcccgcctcggcctcctgggattacaggcgtgagccaccgcgcccggctagaaagtgaatcatttctatatttgattgtacgtgaagccctcggtagtccttactgacatcatgtctcctttagactttgattacactccgtgtccttcatctgactcctctcttcagattcctgagtcacgctctgtttatgttgctgttcaggagcgaactgcggcaccgcccaaacactgtgacgccagcgcgggaggagggccgcgggaggggcagcggaacgcgcagagggcacggtgcaagcacgggacagctctgcattggccaaagggatcccaggaggcctggccctcttttctcctgaggctggatcccaaccagcaggaaaaggctggattttcgccttttgtatttgttttggggcccaaccaagaaaaacagtggagggggaataaaacatgtttaaatcttttttttgtcttaaaaccatctttaatttcacagtcacaaaataaaacataactcgaatgttttgatgtttgcagtgacatcgattgtgaaaaaggttagccagaaaggaaacgcagtgagacagagcgctcggccaccccctgccctgggcgcctggcgcatggggggcggggcggggctcgcggggtgacgtcacagcccgacgcgccacccagctgtttttgtgctcccagctctagcgaaaagccgccggtatttctccatctggctctcctctacctccaggcaggctcacccgagatccccgccccgaaccccccctgcacactcggcccagcgctgttgcccccggagcgg

SEQ ID NO: 8999 - DNA, 2300 bp, Homo sapien
cttagcctccacagtagctgagactgtaggagcgcgccaccatgccttgttaatttttgttttttctgtagagacagggttttgccatgttacccaggctggtcttgaactcctgagctcaagcgatcctcggcctgggcctcccaaagtgctgggagaacagacgtgagccaccgcgcctggccccctgtgggtgtttttaaaattagagacactgagaccccgactgaagaagataggccacggggctgctgttatctaatatttatcagaactcacccgacttgtatgggcaacgcagccccttttcactgttctttttctttgcaaactccacagtcctccctgtcgctgccctacagtactggttggaaggtctttcttctttgactctaggtggggaaatccagaacgaggcttcgcctcacctgccctaatgcccaatcttctactagcattccaggcagcgctttctagtcacgtgagggatacctaaccactggaactaaataagatgtgggggaacaactgaggtcatcacctaaattgcttgatactctcttttccagaagacgagccccctttctgagtttatggcagaaagtgaatccctccctccctcccttcctttctttttctgtaagacggtgtttcgctcttgttgcccaggctggagtgcgacgccgtgatctccgctcgccgcaacctccgcctcccgggttagagcggttctcctgcctcagcctccagagtagctgggattacagccatgcgccaccacgcccagctaattttgtatttttagtagagacagggtttctccatgttggtcaggctggtctcgaactcctgacctcaggtgatccgcccgcctcggcctcctgggattacaggcgtgagccaccgcgcccggctagaaagtgaatcatttctatatttgattgtacgtgaagccctcggtagtccttactgacatcatgtctcctttagactttgattacactccgtgtccttcatctgactcctctcttcagattcctgagtcacgctctgtttatgttgctgttcaggagcgaactgcggcaccgcccaaacactgtgacgccagcgcgggaggagggccgcgggaggggcagcggaacgcgcagagggcacggtgcaagcacgggacagctctgcattggccaaagggatcccaggaggcctggccctcttttctcctgaggctggatcccaaccagcaggaaaaggctggattttcgccttttgtatttgttttggggcccaaccaagaaaaacagtggagggggaataaaacatgtttaaatcttttttttgtcttaaaaccatctttaatttcacagtcacaaaataaaacataactcgaatgttttgatgtttgcagtgacatcgattgtgaaaaaggttagccagaaaggaaacgcagtgagacagagcgctcggccaccccctgccctgggcgcctggcgcatggggggcggggcggggctcgcggggtgacgtcacagcccgacgcgccacccagctgtttttgtgctcccagctctagcgaaaagccgccggtatttctccatctggctctcctctacctccaggcaggctcacccgagatccccgccccgaaccccccctgcacactcggcccagcgctgttgcccccggagcggacgtttctgcagctattctgagcacaccttgacgtcggctgagggagcgggacagggtcagcggcgaaggaggcaggccccgcgcggggatctcggaagccctgcggtgcatcatgaagttccagtacaaggaggaccatccctttgagtatcggaaaaaggaaggagaaaagatccggaagaaatatccggacagggtccccgtgagtgtagaggagcggaggggatgggaggggaagggcccgcgggggcgggggcgggtagtcgagatggcttccctggggcgcccaggcggctctggagaagggaggttccgagaattacttaatcctgaacgcccttcagtgccagagccaatggacgtccagactgtagagcttttaaaaccccgtatgcctgggccccgaaccccacttcagggctgacggcgttttgggggccgagccgccgtcttcagtgactcagcaacccacacacggtctcagcagctgagaccgtgtgtgggttgcggtgcacaaaatagggcccctgtgggcgagactggttagatcggggccatggattggctgcctttaagaacgcagggacattgtgctgtgcggtgaggtttgc

SEQ ID NO: 9000 - DNA, 2300 bp, Homo sapien
aaggaagtaggaagttataaaagatccatgccaagcagcaccacatgcagaaaattatgtaagattacggaattttgatgaaggcattgaaaatggacacttgtccctaatgacaaaaatatcaaggtgctgttccctgataaagccaaaaggaagctaatatttgagtttaagatgtgaactgtattttgaaactaacagatttatccatgacctaggaatgagactggatgaatatttgaaagaaagcaaaaaacacatggcggcagatcctaaccctctgtacacatctgaaacagtccctgtagggcaagagactgtaggccattgctaaaccaaagagatcgtttgaatttaggggctgtgtctctcccaggtaggctttgcttattgtaggcctacttcctggattttcctaaggaacaaattttgtccttggataggacattacatatcattttcgacaagctgtctgattttacgaaacagtggagtttttaaataacagccaagttcagaggcaaagtcacaccagctgttgtggaagtgtgtccggaattggtgggtttttggtctcactgacttcaagaatgaagccgcggaccctcgcggtgagtgttacagctcttaaggtggcgtgtctggagtctgtcccttctgatgttcagatgtgttcggagtttcttccttctggtgggttcgtggtctcgctggctcaggagtgaagctgtagaccttcgcggtgagtgttaacagcttttaaggtagcgcgtctggagttgttcgtttctcccggtgggctcgtggtctcgctggcttcaggagtgaagctgcagaccttcccagtgagtgttacagctcataaaagcagcgtggacccaaagagtgagcagtagcaagatttattgcagagcaaaagaacaaagcttccaccttttggaaggggacccaagcaggttgccaatgctggctggggctgcctgcttttattctcttatctggccccaaccacatcctgctgattggtagagccgagtggcctgttttgtcagggcgctgattggtgcatttacaatccctgagctagatacaaaggttctccacgtacccatcagattagttagatacagagtttccacacacaggttctccaaggccccaccagaggagctagatacagagtgtccattggtgcattcacaaaccttgagctaaacacagggtgctgattggtgtgtttacaaaccttgagctagatacagagtgccgattggtgtatttacaatccctgagctagacataaaggttctccaaggccccaccagagcagctagatacagagtgtcgattggtgcattcacaaaccttgagctaaacacagggtgctgattggtgtatttacaatccctgagctagacataaagactctccacgtcctcaccggagcagctggatacagagtgtcgattggtgcactcacaaaccttgagctaaacacagggtgctgattggtatatttacaatccctgagctagatatactctccacattcccactagactcgggagcccagctggcttcacccagtggatcccacaccggggctgcaggtggagctgcctgccagtcccgcgccgtgcgctcgcattcctcagcccttgggttgtttgttccttcccggtcgatgggactgggcgccgtggagcagggggtggtgctcgtcggggaggctcgggccgcacaggtgcccatggagtgggtgggaggctcaggcatggcgggctgcaggtcccgagccctgccccgcgggaaggcagctaaggcccggcgagaaatcgagcgcagcgccggtgggccagcactgctgggggacccagtacaccctccgcagccactggcccgggtgctaagtcccccattgccccgggccagcagggctggctggctggctgctccgagtgcggggcccgccaagtccacgcccacccggaactccagctggcgcgcaagcgccccacgcagccccggttccgctcgtgcctctccctccacacctccctccaagctgagggagtgggctccagccttggccagcccagaaaggggctcccacagtgcagtgggggggctgaagggctcctcaaatgccaccaaagtgggagcccaggcaggggaggtgccgagagcaagcgagggctctgaggactgccagcatgctgtcacttctcagcaggctggattggatttggcacttctttactgaaggtcagttcttctcagcgccgcttccatgttttctg

SEQ ID NO: 9001 - DNA, 2300 bp, Homo sapien
gatacagctatacagataactagttggccatagttccccaaatattccaagggacataggcgaggcaatgataacttcaggaacaagtggagatgagtgggagagatacagtacatggaaatcattcacctgtctacgtacaaaaataaatagaaagaacagaggccgggcacggtggctcacgcctgtaatcccagcactttgggaggccgaggcgggcggatcacgaggtcaggagatcgagacaatcctggctaacacggtgaaaccccgtctctactaaaaaaaaaaaatacaaaaaattagctgggcgtggtggcgggagcctgtagccccagctactcggtaggccgaggcaggagaatggcgtgaacacgggaggcggagcttgcagtgagccgagtgagccactgcactccagcctgggtgacagagactccatctcaaaaaacaaacaaacaaaaacaaacaaaaaaagaacaatcagagttggcagctcagaaagagttaaagaggtatatacatatatgtttactgtgtgtgtgtatgtgtgtgtgtgtgtgtgtgtttaggtatcttaaatatttaagcctggagttcttgaagtaaacttgtatttgttggatttttatttctaagtcagtgaactaagatgaaaaaaaggacaatgactgatggacgtattctcaccaaacagggttctaaaaacttagaacctctaacttccaaataaaggtggttgtgttagtaatgaaagtgtagtaataatccctattgcacattctgtcataaatttgtactctctcaagagaaaaactaaaagcaaacccctaatctcctatattttgaggcaattttacatgggggaaaaatagtatcagacaggtttcttccagaccagctttttctaacactaaaaatgaatagatttcaagtaagcaaaggatttttaaataaatcacttcaactaagatttgcatacagtctggatgaagtagattttacgcttatattcttcagtgaggatttatagctcaacaaatttgttggtgcaatgaaagcagctctaggcacacaatgcaaactgaaaagatggaaagttttgacttcataaaaactgagaagtcaaagtagtcttttctttcatttttttctgttgttggttgaaagcccatcttttacaaaagggtttatctatagtaatattataatgcttgaacataaacaatatacaaaatataatacacaaaacgtttatttgagtgtctgcttttgtatgggggtgcatggtagattgtatttccagatactaaatcatggatcgaaatctctcctttcaagattcttattatagccaatctcttccacattggaaatttgacctgttccacatttgatattcctattaacaaggttactcttctgtagatgaaaaagtgtatatcgaagtatcagtatagtatctgaattagataacacactaaacaatataataatgtattagtaaaaataaggaaaataaagaagctgaagtcgtgcttaaagaactttaagaaaatgaaaattgaggtgttgaaaaaagcttttaaggctaacgtgaatgaggcgtccaagtgggaaacccatccagttctacttttttgaactttgcctgtcgtggccaggataattaggtagagatcagaagaacagagtgagacatggaaatcccaatttatgtgaccttgggcaaattacttagctctgtatgcctcagttttctctttgatagattgaagatatttatatatctttactatcaagccatttacagaaataaatgagctaagatatgccaagtgctttaaattgtgttaagtacaaggtaaataataaatgtttattattaaaagaggaaaattctgtaagtaattttgttatgctaagtaaatttacctttggtttgcccatcatttccttcattttccagataaccctttaaaatgaatttgattttcaaacaataaaaaacaaaacagcaacaaaactccctctgacctcctctcaccttctttagtccttgccaaagtgttaatattgcaaaagtactgtgagaatttcctgtattgtggttcctggaacacttcagaggcttgtgattctactgcttcttattcacactataatacatgtctcaccaatagatgattcaagaacatcatttaaatacacaatttttcattctctatttttgctaaatttcttcatactcaactttcagattctttaatctccagctcagcttcaacaattcaacgctg

SEQ ID NO: 9002 - DNA, 2300 bp, Homo sapien
caaagagcaaagagaaggttagaggttttacatattgctttttgagaaagttcattgatatttgtaaggatttggtgagctggcaagctccgatttttgcgtgacaacagtgtgagcaaacattagttctagagttgcagtaagctacttcagaagctacagataaaactggtttctggttacaacaggcagtttcagcagccaggcttgcagataattacattcttggagcaatgctttgtacccagaatgttttcccactggattctccactctgttttatttagttatgaaaagaattactcaatttttataatcaactttcacacctaaattacctcccaaaggcacctcctaatactataccattgggagttaggatttcaaatatgaatttcagggaaacagaaacattctgtccataacattctgcccatggcaaagtttatgttctttttgcctgcatttattctgtaaaaagtaaagtagaggttgctcttcaaagactttcctccctaactaattaggaataaatagtaacttctcttagaagcaaaatttattcaaagacctgtgctcctaaatatttgccctggcatgcttatactggtccaagcaagcattaggtcatagcctgttcctcttccttatttaaaagtgtttttacctttctcagcattccacaagttacttcctccttcctttgttctcctctacctttgcctcttttaaaaagttctaaattgctagccagtcgggacaaatacagaatgtgaggtcctgttccagtcaatggaaactggatacagcagtagggtggatgcggcaggttataaatgatgctgtctcctttgtttggtgtacactcgtggcaaaactgctgatgagtataccctttctgcaggaagtaaaaaaaaaaaatggccacactaaataaatctatgttcaagtgctatttttttatggcactggggaacaagcatttcaaacaatttggtggcagtctgtatggggatacattctcctccaggggtggtctccagtcctctctcatgagggagtgcactcccctacctcattgaaggggccctcaggaatgacaaattgagacaaataaacccagactctcagcaacacagagagaaaaaaaaaaaaaagaaactggccagcaacctagcttaaaggatcctcacatactgtggcgacaactttgtgcacaggccaagaaagaagaagctgtgggagccaataaagtatttccttggtgatcgggactaaaaaaaaaaaaaaaaaaaaagccacaggacggtaaagcattccttagttaggacgtaccaaggagagagaaactgcagggtcagtagattattccttagtcgggatgtcttggaggttaaaaataggtgagaaatccccatagaaggggtgttgaacctcagaaagaggtgagaaatccccatgaggcgggttgaacctcagaaagaggtgaggaatccccatgggaggggggcgttgaacctcacacaaactcccagtagtaagaaaaatattcagaacccccctttcctttcttcttgggggaagaaagaatagccccactgccaccagtcccttccctagggaaaggggaaggagggggaaaacagcagcataggtggctggcatggaacaggaattaaaataaattacagaatgtgtaagcaaaaactcagttgtatataagaaaacccaattcccccctgaggaagagaaagagccggagtcctttaaaaattaactgcctgttttctgtggctagtgagccttatctctccctttcccaggcattatgaagaccctatttctctagctgtgcagctgcaaggtcactagacagataaactcaagtcataaaacatgtttttccttgaaaagaaatgatgtcatgtatgtctcaattgaataactgtctttgtttcttgcttctgttatacgcttccccctgcacaaatcttcccccacccacgaaatgcttaaaaggtaacttgactctttgtttggggctcagtcctttggatgttaatccaagtggaccagtgcacctaaataataaatatcctcctcaatcccttggtctctctgattccttatatatcccgatacatttctgggggctcatcaggattggagatgacagatttactgtcccctttgcctgcgatactaggtccccggggccaggagagacccggcatccaaggtgtgccacagctgagcttcacccggatatatagaccagctctccccacgtcccagcaccc

SEQ ID NO: 9003 - DNA, 2300 bp, Homo sapien
aaagtgagtgtatgttcaacattgagaaagaaattggagttttaacatactatttctttatctaactaattgttttaacccgacatacaggacccattttagaattttcttctttaagaatcctttccacactctgtcagttggtttagggacctttatatatgacaataaaactctccctggtgcttagctttatcatggtatttatttcagaaatcttcttttaggtatgtgtggggacttcccagttggctgtaagttgccatttgaactaaacgaaataggtaggatattcaaatgttcttttttatcctattcctatcccccttttctcaattctgtatttaagagacaatctctattcaatcgaaaactacatatataaaaataactcttcaggaaattgtgattcaggtttttcccataaaaagcctgcatttactcatttattcatttcctttcaaaaaccaaatatttgttaaaatgtagttgttagaaaatatcagcctatatttcctctatatagatctatttttactatataaaatagctaatagaaaatgttgattagctgaaaagaatcttggtatgtcagaaaataacatattttcttcaacttgttttatattcacctatcttgtttaattttgaatttgttttatacttattcattttatatcacctaaactaaaaagtaatttccagctgggtgtggtggctcacgtctgtaatctcagcacattgggaggctgaggcaggaggatcacctgaggtcaggagttcgagaccagcctgactaacatggtgaaacctcgtctctactagaaatacaaaaattagccaggtgtggtggcacatgcctgtaatcccagttattctggaggctgagacaggagaattgcttgaacccaggtggcggaggttgcagtgagccgagatcgccccgttgcactccagcctggacaacaagagtgaaactccatctcttaaaaaaaaaaaaaaaaaaagtaattaatttccatgtgggcaaaaactttcttttggattgtttactttgacattctcaagatctagaaaagtgcatagcaaatagcattcgctaaagaaaaaaaatgttgaataaatttattgtccaactttaacacatcaccacatgaaagctgttttccttccttatatttcagagttttaagattaatagctttggtttttgttaaaatgttataatgtgttcatcttatattactttatatgatgtcttatgttagtattttaaattaataaacataaaatatatatttagcttatcttgttcattggtatcaattcatatattattcttatgtatactggggtatatatttaagtttctaattctcctgcatatgatgtagatatgacagagatgcaatttcatgttttttatattaaaatttaaaaattcccaggactaattttttgtaacttaaaggccagtgtgatagtaacccaggacaaattattgaataggagctaatttcccactttatctgcaatgttaccttatattttttaatctatgcacatgactttttcttgtctgtatttttacccttctcaatttgtctatctatgccccacatgccactttgcctttattaatacggttttaacataggtcttactatctagtaaaacaaggctcccacattttcttcatcttcaattgtgactttcctagtcttgacttttgtaatttaatgtacatgtagaattctgctttgtaagttctacaacaaaacctgaggtattaactggaattgaattgaatctctaaaatatttaggattaaatggcatcatttaaattcatcattttcaaatcctaaaatgttatttaaaataatggcaaaactacaattacttttgcaccaacctaacatttatccaacaatgggtggtcttaactcttttaccaaattaacaatatttttgtagtgataaggcggaagtactgtggtttatgtttttccacaggaagatgagattataatatttgtcacatctttctcaaagatagaaattcactaagtatctccactttcaattctagatcaggaactgaggacatatctaaattttctagttttatagaaggcttttatccacaagaatcaagatcttccctctctgagcaggtgtgtgtatgtgtgtatgtgtgtgtgtttattattcaagatatgagaaattatatttcaacctcaaaaaaataaaaatatttacactataaggtaattctaattgtttcttagatgcttgaat

SEQ ID NO: 9004 - DNA, 2300 bp, Homo sapien
cttcttagttttcacaaatgtattgttttttattgttcccattaataatattatgtcaaatatagaaggccttttaaaaagtgacctattgtttaaagagatttcagtttaaaactttaggaaattagtaccagacttttatattggtcaacagcaaaatgaacattactactcagcctccaacacatgcagtttgcctataccagggatcctgtcaaaatatacaccacttatagcttcttaagtgcagttatcatagagcacagtccctgacatcacacagctgcagagatgaataaacaaagaggaacctactcagaagtgagtctggcccaggacccaaagaggcagcaaaggaaacttaagggcaataaaatctccatttcaggaaccaaacaggaaatattccaagtagaattaaaccttcaaaatgcttcttcggatcatcaagggaatgacaagacatatcactgcaaaggtaaaacattaaatagatcttcaatattattgttctaggatgtgcagttgaatgcagaaaggtggggaaagattagggaatattttgcacttgtgagaatcagaggtcaaagtcaggatctaatattctaatatgaaatctgaagcctgattttattcaggcattgttcaattgtaatttgtgattaacaactcatggagcattatatttactgataatgaaatggtatattctgagagaaagattactagagtagatgtagatttagaggacagagtttatcattatgttttcctgtgcacgtgagttctcttgtacgtaaaccttctcatcaactctctatctcccctctctcagtgcctctttctctccctgcaggtttactgccacctccagagaagctcactgctgaggtcctaggaatcatttgcattgtcctgatggccactgtgttaaaaacaatagttcttattccttgtaagcatattcttgaaagattataagggaacttttcactataatgattggaagcgccttgaaacatttcataataatgaggattagaattctctgtttaatgtatatctctgaaccccaagataatatgctgcttctgaacttttcaaatttataaataacagaataattgtagaaaacatttatttttttgtgtgtactaaatatatatgtatatatgatacacacacagagagatgtattctgatttcatgactcaaagacatgttttaagagaaaaaatatttagaaaaacaaattaatttttgaaagtggttagatcaaatactataagagatggtgaagttttatgctaatggctttaaaaatatttgttttaaagatctcattatttttatagaaaagtcatttttatttcagattgttccaatttaaaataattttaaattttgtatttcaaagtaagcaactgaatttattataatttgtctagatattaattttgtaagaatcactttaatttttctaggtattggagtactggagcagaacaatttttccctgaatagaagaatgcagaaaggtacattatgattgtcaatgttctgatgttagtacagtttatattttgtctctaaagggatgcaaaatgataataaaatgttttgggaaaataaactataacaatgagccataaatgtttataaaataaagattatatgagggcatgtccttttctccaataataagtagaaatgctcagttaaaatcattataccctcttgttgcatttaattaactgaaatttcctactactataagatgataagagataaataattttactatacttaaaaagcagttttgttcagtgatgtttaagatgtgtagggtggatttttgttggcgggcttgttttgtatgggaacacaattaagggatgagaggtggaccttttattgtgcatgtgcgtatgagtgactcgttattttaaaatatatatttaacaacttatgaggatgcagatattgtgtacctgtatgtttatagctttgcaaatatataaaataattttcatttgtaaacatattgttttgcatagtaattcatatttttatttagcacgtcattgtggccattgtcctgaggagtggattacatattccaacagttgttattacattggtaaggaaagaagaacttgggaagaaagagtttgctggcctgtgcttcgaagaactctgatctgctttctatagataatgaggaagaaatggtaagacgtaaatgtttcaacactttactaaaagcttatttctgtcaatatcatatttgtagaaatcat

SEQ ID NO: 9005 - DNA, 2300 bp, Homo sapien
tctccccaaatcttgtttactataaaaataatttctaaaagtcacttgaaaatggacaaactaaatgacaccctagcagctcagtctcttatattctgaggtgtatgatgagataaactgattcaaaatggccctagtgtgaaaacttcctgttcaaatccgaagtgatacattgatgaggaatctgctttttgcactcttgcctcactctgagctttcacagggcagtctgtgaagatcagagatatctgttttttgttttttgtttttttctgagacagagtctcgctctgtcgcccaggctggagtgcagtggctcccgatctcagctcactgcaagctacgcctcccgggttcaaccgttctcctgcctcagcctcccaagcagctacaggcgcccgccaccacacccggctaagtttttgtatttttagtagagacggggtttcaccggatcacagatgtcttttgtgtcgttaagaggtaacctgacctctccactaaggggcgtgtgactttctgatgacagaaggtatgtgttgctagtctcctgtttctctactagctcatctcctttagtagaaaattgtaaatattaaatgtgatgcaacaaggtaaagttaatacagaataaaatcaaagtagaactgtctgtacatgaataattcagggtgaaaagcaacccaaaatataatatatgtttgaggatttcttaaagtatttacattattgcctgtggagaattagtcaagcacatgcatacatcataataggtttgttaatcaatataatttagagtgaaaccgataaatatcacgacaatgaagaattaatttgaaattttataatcattatagatgtaataatactttatatttagcccagactttaaaaatgcatttttaatggatacatcaaattgtgaatgtcaaacataatttctcatacacatacttatatttaattgaagcagattttatttttttaagaatgtaataatgaagtagtttccataaaatgcaaatctaaacttaattataaataataggacgacctaaaaaaaattgagccaaacaaacattgcaaaaaagatgtactacactgacatgagactcctacctcattagttattttacacactcagtatgaattagaaataataaaatggcaattgtgttaaaaataattaaaatatctaatatgtattgaggactaatgtgtgccaggttgtatgttaagggttttatatacattatacttcataaattattttccccaatctagattagtaaactggtgttgtagacaccaagtaactttgtaaaggtcatgcattatgagtttcaaagctgtaattaattttaggtctcactggctacagagctcattgactagattattaaattatattttctgatttattacaattacttacacaaccaaagtgaccctcgctgccttttaaaacaaccacagggtctttctgaaagtttgaacttaaagtgttctttcatagatggtccaaacttatatttatcattttcagttttcctattttagtcattaaatcaattaccaatcaattctgtaaaataaagagttaaatctttttcagtagtatttagtttatgcataagttaatgtaatgttttacaaggtataaaatatttctttaaaattttaacaatttttctgttttcctcaatcattcagaataaaaaacatttgccaagacctcatgcccttttagtaaacgaatgtaagtcactaacttaatgtattttagtattaaaagttgttctatatgccaacaaattattcctccatctttagcgctcaatccttacattaatgaattttaaaattgtcatacaattagtgcattttattttcaaatttcaattttagttttttacacaggtattctattggtgataaaatatttctgtagaatctgattttaaattaataaagatatttatattcagttacttcttagttttcacaaatgtattgttttttattgttcccattaataatattatgtcaaatatagaaggccttttaaaaagtgacctattgtttaaagagatttcagtttaaaactttaggaaattagtaccagacttttatattggtcaacagcaaaatgaacattactactcagcctccaacacatgcagtttgcctataccagggatcctgtcaaaatatacaccacttatagcttcttaagtgcagttatcatagagcacagtccctgacatcacacagctgcagagatgaataaacaaagagga

SEQ ID NO: 9006 - DNA, 2300 bp, Homo sapien
ttcttcccagagacatatatttcaatgagagttatctgattaatttatttttaaaaaactgaatgagagaattttaagaactatcaagaaagtaagttgggaatttaactttgagaattgatgtcaattacaatgaagtggaaatgtattttctcagaataattagtgacaaatacattaaattcctattggtaagattattattttaaaaatttatcgtcatattagcagtgatattataggggtatatgataaagaagtacgtaatcccaagttttagccaccctgtgtaaatgtagaagttaaacatgtaagagactctgaaaaaggtataagattttagtgtttgtgattgagatggaaacaactgcatgggtagtagtctttgttctccccaaatcttgtttactataaaaataatttctaaaagtcacttgaaaatggacaaactaaatgacaccctagcagctcagtctcttatattctgaggtgtatgatgagataaactgattcaaaatggccctagtgtgaaaacttcctgttcaaatccgaagtgatacattgatgaggaatctgctttttgcactcttgcctcactctgagctttcacagggcagtctgtgaagatcagagatatctgttttttgttttttgtttttttctgagacagagtctcgctctgtcgcccaggctggagtgcagtggctcccgatctcagctcactgcaagctacgcctcccgggttcaaccgttctcctgcctcagcctcccaagcagctacaggcgcccgccaccacacccggctaagtttttgtatttttagtagagacggggtttcaccggatcacagatgtcttttgtgtcgttaagaggtaacctgacctctccactaaggggcgtgtgactttctgatgacagaaggtatgtgttgctagtctcctgtttctctactagctcatctcctttagtagaaaattgtaaatattaaatgtgatgcaacaaggtaaagttaatacagaataaaatcaaagtagaactgtctgtacatgaataattcagggtgaaaagcaacccaaaatataatatatgtttgaggatttcttaaagtatttacattattgcctgtggagaattagtcaagcacatgcatacatcataataggtttgttaatcaatataatttagagtgaaaccgataaatatcacgacaatgaagaattaatttgaaattttataatcattatagatgtaataatactttatatttagcccagactttaaaaatgcatttttaatggatacatcaaattgtgaatgtcaaacataatttctcatacacatacttatatttaattgaagcagattttatttttttaagaatgtaataatgaagtagtttccataaaatgcaaatctaaacttaattataaataataggacgacctaaaaaaaattgagccaaacaaacattgcaaaaaagatgtactacactgacatgagactcctacctcattagttattttacacactcagtatgaattagaaataataaaatggcaattgtgttaaaaataattaaaatatctaatatgtattgaggactaatgtgtgccaggttgtatgttaagggttttatatacattatacttcataaattattttccccaatctagattagtaaactggtgttgtagacaccaagtaactttgtaaaggtcatgcattatgagtttcaaagctgtaattaattttaggtctcactggctacagagctcattgactagattattaaattatattttctgatttattacaattacttacacaaccaaagtgaccctcgctgccttttaaaacaaccacagggtctttctgaaagtttgaacttaaagtgttctttcatagatggtccaaacttatatttatcattttcagttttcctattttagtcattaaatcaattaccaatcaattctgtaaaataaagagttaaatctttttcagtagtatttagtttatgcataagttaatgtaatgttttacaaggtataaaatatttctttaaaattttaacaatttttctgttttcctcaatcattcagaataaaaaacatttgccaagacctcatgcccttttagtaaacgaatgtaagtcactaacttaatgtattttagtattaaaagttgttctatatgccaacaaattattcctccatctttagcgctcaatccttacattaatgaattttaaaattgtcatacaattagtgcattttattttcaaatttcaattttagttt

SEQ ID NO: 9007 - DNA, 2300 bp, Homo sapien
aaatgtagaaagcaaccacctaagatccttttgaaaagttacaaaactttggtgtttgtgactgagatggaaacaatcaccagcatggatcaaatctctgctctcccctcatcttgttgaccataaaaataatttctaagaggcactttaaaatggacaaactaaatgacacactagccacccaaagtctcctatattctaaagtgtgtgatgagacaaactgattcaaaatagccctagggtgagaatttcctgttcaaatctgcagtgacacattggtgaggaatctactttttccactcttgcctcactctgacccttcaaagggcagtctgtgaagatcacagataacgtttgtgtctttcagaggtaacctgacctctccactgaagggcgtgtggctttctgatgacagtaggtaagtgttgctcctctccctgtttctctactagctcatctcatttagtagaagattgtaagtactggctgtgatgcacctgaggtaaagttgatatagacgaaaatcaaggtagaactttattcacgtgaataattcaaggtgaaaaacgagccaaaatataaactatgtttaaggatttcttagagtattcacatcattgccgctggagaatcactcaagtagatgcatacataataataggtttgccaatccatgtaatttagagtgaaacccataaccatcatgacaatgaacaattaattttggattttgtaatcattactggtttaattgtatattatatttagaccaaactttaaaaataaatttttaatatggatacatcaaattgtgaatgtcaaacattaattctcaatcacacacctagatttcatgaaagcagttttaatttttaataaaagtaaggatgaaatcatttccataaaatgcaaatctgaccttaattataaacaattggaagacttaaaacaattgaaccaaacattgcaaaaaagatgtaccacactgacatgagacgcctaattaatgagttattttaacacactctaatgcaaatcagaaataataaaatggcaattgtgttaaaaatagttgaaatatctattatgtattcagtgctaatatgtgccaggttgtgtgtttagttttctacatacattatactttataaattatttttcccaatgtagattagtaaactaggttagtagacactaagtaatttagtacaggtcacatattacaacttgcaaagctagaattaattgtagtctcactgactacagagctcattgactagattattaaattacattatctgaactattacaattacttatacaaccaaagcgaccctcactgacttatacaatcataggagctttctgaaagtttgattggacactattcttccatagacggcccacacgtttatttatcattttaagttttcctattttagtcattaaatcaattaccaatttcttgtgtaaaagcagcaatttaaaaatatattatgttttcaatagtatttatgcatacagtaatgtaatgttttacaagatatatttttaaaattttaatgatttttctgatttcctaatttagaaaaataatcagttgacaatacctcaggtccttttaataaatgaatgtaactcactaacaatgtatgttagtataagaagttactctgtatgctgacagaactattttatcttatggcacacaatcattaaccatcaatgactcttaaaactatggtaaaattagtgtatttctaaatacagtattttaattgttaaagtatgcagtctattggtgttaaacatttttgaagaatctaaccttaatttaataccaatttttttcatgaacttcctagttctcacaagtttaatgtttttattgttcccactagtaatattatgtcaaatacagaatacatctaaaaaatggccaattatatcgtgtgatttttgtttaaagctttaggaaattagtagcagaattttacctaggttaacagcaaagtaaacattattactcagccccaacacatgcacattgcctataccagggatcctgtcaaaatatacaccatttatagcttcttaagtgcagttatcatagagcacagtccctcacatcacacagctgcagagatgagtaaacaaagaggaaccttctcagaagtgagtctggcccaggacccaaagtggcagcaaaggaaacctaaaggcaataaaagctccatttcaggaaccgaacaggaaatattccaagtagaattaaaccttcaaaatgcttctctgaatca

SEQ ID NO: 9008 - DNA, 2300 bp, Homo sapien
gccaccttgtctaaatgtagaaagcaaccacctaagatccttttgaaaagttacaaaactttggtgtttgtgactgagatggaaacaatcaccagcatggatcaaatctctgctctcccctcatcttgtcgaccataaaaataatttctaagaggcactttaaaatggacaaactaaatgacacactagccacccaaagtctcctatattctaaagtgtgtgatgagacaaactgattcaaaatagccctagggtgagaatttcctgttcaaatctgcagtgacacattggtgaggaatctactttttccactcttgcctcactctgacccttcaaagggcagcctgtgaagatcacagataacgtttgtgtctttcagaggtaacctgacctctccactgaagggcgtgtggctttctgatgacagtaggtaagtgttgctcctctccctgtttctctactagctcatctcatttagtagaagattgtaagtactggctgtgatgcacctgaggtaaagttgatatagacgaaaatcaaggtagaactttattcacgtgaataattcaaggtgaaaaacgagccaaaatataaactatgtttaaggatttcttagagtattcacatcattgccgctggagaatcactcaagtagatgcatacataataataggtttgccaatccatgtaatttagagtgaaacccataaccatcatgacaatgaacaattaattttggattttgtaaccattacattttgtatattatatttagaccaaactttaaaaataaatttttaatatggatacatcaaattgtgaatgtcaaacattaattctcaatcacacacctagatttcatgaaagcagttttaatttttaataaaagtaaggatgaaatcatttccataaaatgcaaatctgaccttaattataaacaattggaagacttaaaacaattgaaccaaacattgcaaaaaagatgtaccacactgacatgagacgcctaattaatgagttattttaacacactctaatgcaaatcagaaataataaaatggcaattgtgttaaaaatagttgaaatatctattatgtattcagtggtaacatgtgccaggttgtgtgtttagttttttacatacattatactttataaattatttttcccaatgtagattagtaaactaggttagtagacactaagtaatttagtacaggtcacatattacaacttgcaaagctagaattaattgtagtctcactgactacagagctcattgactagattattaaattacattatctgaactattacaattacttatacaaccaaagcaaccctcactgacttatacaatcataggagctttctgaaagtttgattggacactattcttccatagacggcccacacgtttatttatcattttaagttttcctattttagtcattaaatcaattaccaatttcttgtgtaaaagcagcaatttaaaaatacgttttcaataatatttatgcatacagtaatgtaatgttttacaagatatatttttaaaattttaatgatttttctgatttcctaatttagaaaaaaaatcatttgacaatacctcaggtccttttaataaatgaatgtaagtcactaacaatgtattttagtataagaagatactctatatgctgacagaactattttatcttatggcacacaatccttaaccatcaatgactcttaaaactatgataaaatttgtgtatttctaaatacagtattttgattgttgacatatgcagtctattggtgttaaacatttttgaagaatctaaccttaatttaataccaatttttcatgaacttcctagttctcataagtttaatgtttttattgttcccactagtaatattatgtcaaatacagaatacatctaaaaaattgccaattatatcgtgtgatttttgtttaaagctttaggaaattagtagcagaattttacattggttaacagcaaagtaaacattattactcagccccaacacatgcacattgcctataccagggatcctgtcaaaatatacaccatttatagcttcttaagtgcagttatcatagagcacagtccctcacatcacacagctgcagagatgaataaacaaagaggaaccttctcagaagtgagtctggcccaggacccaaagcggcagcaaaggaaacctaaaggcaataaaagctccatttcaggaaccgaacaggaaatattccaagtagaattaaatcttcaaaatccttccctgaatca

SEQ ID NO: 9009 - DNA, 2300 bp, Homo sapien
tagggcttctagcaggcttgtatcctatttagtgcctcagagggccaaactggctctagaatcatactgtatagggctggggaggggatgagggtccacttcaaggtctgtaaatggtgggtctattattaggtgtgtagttggggaagagtttatctagtttgctgggaaggctgctcatgggtctctgagtgggttcctcaacctgtggcacagaggagttagtgctaagtcacaaggtttcctcggggtctatagctgaaaccagtgtcttcatgtctgtctctggggtcatggttgagtgtgttttctggcaggtctgtgggcaggcagatttgcctcagactgtagttgagttgggctggagctggatccagaattgtttcaagatctgaaataaaactaaggtctgtgcctgcaggggcactaatgatgtctctctccaggtccctgtatgggcaaactgctctctagcatagctgagaagtgtcgaagccccttttctgtccaattaaaggatctgctgtgaaacctaggtcaatggtctcctagttgggacatggatgcacatgtcctccctctgtatccctgagctggcaagactgctcacagtccacagctgagaagggtgaaggtcaagattcaaggctgtttcagaaactaccgtggaactgaagtcagcaagcctgtactgctgacaaagatgattgagtctcacagcaatttcctgtgattaactcaggtcacagttgagaggagtttgagtggagattcagggccattttagtatcttctgtaggacagaggtcagcaagcatgccccagaggtacagatgtatatgtctcccaggaagtctctgtgggtgaaggactgatctcaagttgtggctgacactagttaaagccaagttagagggctgtttcagggtctacattgagactacagttgatatgcctacctcctgagacactagtgtgtgagtctcctcctgggcccctgggcaaatggttttggcagcatgaccaaggcctaaatggggctgaaggcaagcacaggaggatgggtcccttttcaggtctggagatggaatcactgttggtaagtctgccacttggatgcaaatctattccctaaaacaaccttcctaggtcttgggttccactggcattttacaaactcctacttgaattccaaactccctcaaaggaacttttgtctgtggatggctgaaaaattattgttgctgtgggggcatatgtgtgggggaccacctattctgccaatttactgactttcctcctagtaagattttaaaattactttttccccatacatagtttgacttcagtttttgtcatttacaactaaatatttctatgaaagtcgacataatttgttatggcggaggatgaataaatgaagaatgtaatgaatagctatttaatatttcaatttctggtatgctaatatatttcaaaattgattaatattttacctatccaagatatttttatcaagggtaatctgaagattaaataatctatttttaaaaattaagtgcaaaaatttaagaactaagagaagttaataatataactttggcaatgatgctttttgtgccagctacaatcaattgagtaattactgcagtaatttttcagaataattaaggaaaaaatcagtagatatcagttgataatattactatgagttttagaatgttttctattataatggaagtgacataataaaataatataaagaaaagaagtatgcaatgttaagatttagcaacctagtctaaaaggcactcttaacaaggtgagggttgacaatgttcgtgatcaagacagaaaaaaaaaaaattctcataggcacttgaaaaatgaaccaactaaatgacacactttcaaagtcaaccttgtacttttaatagaccaagtatcctatattttggaggtgtgtgatgagataaaactgatttcacaatagcccatgtgtagaatttcctgttcaaaccttagtaacacgttgatgagaaatctactttttccactcttgactcactctgagccttcacagggcagtctgcgaagattgcaggcattgtttgttcttgtcttggatttatgcctttaaatttcaccttttattacacagctatagcaggcctttttatgagactaacctggcctctccactaaaggatgtgtgactttctggggacagaaggtatgtattgctactctccaactctctactagcctacctcatttagtgggtgatttcaagtgctcaa

SEQ ID NO: 9010 - DNA, 2300 bp, Homo sapien
cctctacagcaacatggacagagctggaggccataatcctaagcaaattaatgcaggaacagaaaaccaactactgaaggttctcacttataagtgggagctaaacactgagcacccttagacgtaaatatgggaacaaaagacactgcagactactagaggggagaggagagcagggaagaatggttcagaaaactacctactttggattatactcactattctggtataatatacccatgtaacaaaccagcacatgtactccctgtatctaaaaataaaagttgaaagaaaaaaaattggaaaaattctcaaggacagttgactggccaaagattttttgagtaataccccacaatcacaggaaaccaaagcaaaaatggacaaacgagatcacattaagctaaaaaataaacaaaacccccccacgagattctcttatcttagacttttgacaatttgattatattatgcctcataatagtcttttctgggctgatcttgctcatgattcattgagcttcatgaatctggatttccatatccttcccaagtgaggaaggttttcagacagtatgtctttaaagaaaaaatatttttgactttttatgtctctcttctccttctgaagtttctatactttctataccatattcttggtggtgtctcaaaggtctcatgctttctttgccactttttattctttttttactctaatttgttaattttaaaagactctttttttgagttcactaattcctctgcatgattgagtcgggcattaaaactctctattgacttatttatttctttcattgtgttcttcagctccagaatttttgtttggttctttttaatagtttatatttctttattaaatttttattttgttcatgtattttttgttttagttgtattttttgtttactcttttcttttgcatctcactgagattttttaagatgattgttttgaattactttaaaggaaacttatagatctccatttatttggatcagttgctaaagctttattagtttcctttggtggtgtcatatttgtctgatgctttgttatttgtttatccttgtactgatgtctgtgcatttgaaagagcagactctctttcagtctttacagactggtttcggtaggttaaaagcttctcctgttagtgtcctgggctgatgagattgccttcagtatcatggttgaatggggttacagccagatcacatggttgcttacgggtccagagtgggatctttggttcatgatccttttactagggcttctagcaggcttgtatcctatttagtgcctcagagggccaaactggctctagaatcatactgtatagggctggggaggggatgagggtccacttcaaggtctgtaaatggtgggtctattattaggtgtgtagttggggaagagtttatctagtttgctgggaaggctgctcatgggtctctgagtgggttcctcaacctgtggcacagaggagttagtgctaagtcacaaggtttcctcggggtctatagctgaaaccagtgtcttcatgtctgtctctggggtcatggttgagtgtgttttctggcaggtctgtgggcaggcagatttgcctcagactgtagttgagttgggctggagctggatccagaattgtttcaagatctgaaataaaactaaggtctgtgcctgcaggggcactaatgatgtctctctccaggtccctgtatgggcaaactgctctctagcatagctgagaagtgtcgaagccccttttctgtccaattaaaggatctgctgtgaaacctaggtcaatggtctcctagttgggacatggatgcacatgtcctccctctgtatccctgagctggcaagactgctcacagtccacagctgagaagggtgaaggtcaagattcaaggctgtttcagaaactaccgtggaactgaagtcagcaagcctgtactgctgacaaagatgattgagtctcacagcaatttcctgtgattaactcaggtcacagttgagaggagtttgagtggagattcagggccattttagtatcttctgtaggacagaggtcagcaagcatgccccagaggtacagatgtatatgtctcccaggaagtctctgtgggtgaaggactgatctcaagttgtggctgacactagttaaagccaagttagagggctgtttcagggtctacattgagactacagttgatatgcctacctcctgagacactagtgtgtgagtctcctcctgggcccctgggcaaatggttttg

SEQ ID NO: 9011 - DNA, 2300 bp, Homo sapien
ggagattgctttggctattcagtgtcttttgtggttctacatgagtttaatgaatatttttctatttttgtaaaaaaaagtgcaattgtgattttgaacagaattgccttgaatctatagatgtatttgattacattaaattttcataaaagcataagtaaccaaagcaaaattatataaagtgggactacatcaaactaaaaatgttctgcacagcaaaggaaacagcagagtgaaaggcaacctatagatttgagaaaacattgcaaataacatatctgttaaggtattaatgtccagaatatataaggaacctctacaacttaataccaaaaacaaaaaatagcccaattttaaaaaatggatgaaggacttgaatagacatttctccacaaaagacatgcatgtggccagtgggtatataaaaaaatgctcaacatcactaatcattagggaaatattctaagatgctacctaacacctgttaggatgactattttacatatatatatatatatatatatatatggatacattcacatatccatatattcattcatatatacccagaagaaggagatgagccatcctctcactttcatttattaccctcttccttaaaacgaatatatccatatacatatatatgaagatatatatatatatatatatatatatatatatatatatatatatatgttggtaagaatgtgaagaaattggaaccctagcacattgttgataagaatgcactatgaaaaaggtgtatagagcttcctcaaaaattaagagtaaaactacccatataacccaataatatcacttctgggtatacagtatatccaaaagaattaaaattagtatcttgaagagatatctgcactcccacatcaatggtaggattatcaagaataaataatatttaaacaacctaaatgtacactgacagatgaacagataaagaaaatgtagtatgtacatatgatggaatattcttcagccttaaagaaagaatattctgccattcatgacaacatgaatgacccttgaggacattaagctaaataaaataagccagtcacagaagaacaaatgctttatgattatactatatgagttatctaaagtagtcaaattcataggaacagagaatggtggttaccagggactcactttcaattggttaagtttcagttacgaaagacgaataagttctagagatatactgtaccacatagtacgtatagttagcaacaatacgttgatcactttaaaatctgctaggagggtagatctcatgtcaagtgtcttacttgccctctgctcccaaaataaaggtactcaagaaaaactttgtagatgataaacatgcctactatcttcattgggtgatggtattacgaatgtatgcatatgtccaaactcatcaaattgtatacgttaaaaatgcacagtttttttgtatataaactatacctcaataaagctattgtaataaatctccaatatagcatctattaatggtcatcactccaacataatttgaagaaatgaaaattataatataaaccacgacatagctatttgtttcgaacaaaaaataaatatattaataattaatcttcttaaagaagaaaaatatttagtgtagaattattcagtgtgttgctggttttgtgtcttcttagaaatgtaatagcaggctgtatatacaagatccattttcatataaatagattacaatggtccattaattttttaagtatttatctgtggtcaactgaaaatatattttcgacccgcctcgcatgggcccagggggcgggggtttgggtggctgccctcagtattgcctgcacaaatatctaccaagtctgcgacgaatagctccagcaactttgcaccgtgttttccagtaagcctaccgacaggcactgtgcagattcaagcagagagaagtccaagcactgaggccgctgctgcaccggccatcctgagaccctagtcgaccttccggcctccgcatccccgccccgcactaggacccctgcagacgatcaggcggcagccggggtgactttcttcctcttttggcaacatggcgggcggagaagctggggtgactctggggcagccgcacctttcgcgtcaggatctcaccaccttggatgttaccaagttgacgccactttcacacgaagttatcagcagacaagccacaattaatataggtacaattggtcatgtagctcatgggaaatccacagtcgtcaaagctatttctggagttcacaccgtca

SEQ ID NO: 9012 - DNA, 2300 bp, Homo sapien
atatgccaggttgtagttagacactttgagatggatcttacctcatttaaccctcatagcaaccttggatggcaaaaaatatcactattttactatggtgaatacaagacttagagaaatgaagtaacttgcctgaagtcacacatgggagctaggggctagcatttcaagccagatttgcctggttccaggattcatgctttgtggcaagagccttgttggaagcccgggtccttctgaattcacggtccattgtgctctgtcttcagtcaggccagattttaaacaggaatgaagaattagcaataatgtttccttatgcaagtcaatgaacttcttcactttagtttcctcatttgtaaaatggggacgaaaatacttgtcaatgttgggaggttttaatatggttatatgcacaagaggtactccaatacgtgacagtatctctgtcaccttttcaacatccgctattactacaccccagcccctgaccctgtcacccacttcctatcatctctcacagaactaacttcctttatttattattttggcattgagataaagggatatggaccgtctttactctgatttgggattgacgaagccaatccaggatggagggaaagaagaaaatgcccagcagcaagtattcctgaagcgtccaaactccatgcatgaaactttgcctacattattgagtaaaattagcctctgggagatgtttcatctgatggcctgcacatgatgatgtggccgacttcagggactacatgtccctgtatcagcaatttcgcctgctgttctgtgcctctctatcccacactccttattaaccactatcacctgatttgaacaatttaagttggtttcctagaactgtaatcagaagattgaaaaagactgaatccaataaaagtggaagtcaatgagagatctgagtacattctggcagggtctgcctcatggtggagtgacaaaaatgaattttttcaagtcttcgatataggtgaaaatgtgaggccttgctggaaggttttagggatagattttatgaagtgagatttcgtgggaaaactcaagtagagaaataatttgccagtatctttttcttaaaaaatcaaatgtgcacattttcacacacaactgatggaacatcaaagggaacatctcttctggagggcatttggtgatatatattagagttctttaaatacatataccctttgacatacaattttatgcttaaaaagtttccctaaaaaaaaaaagtacagaccaaatatattttacaatagaaaaaattgaaaacaatttaagtatccaatagtaggggattgcctaaataaatgatggtttatccctgtgagtaatatttttaaaataacatttcagatgaatttctttgaaataatggaatacatattatttattagaaaataataaataaaaaatactgtgtaaggaatgataccaaccttgatagtaagcacaacatacagagaaaaaaaactggaagaatatatgccacaattttatagaggaattacggatcttttaaagtaatttaaaaaatacatttacttgaaataaacagatagaaaaaggaacttttaaaaaataatgacatataggagaacatttccaacagagagactgttatttaaactaagagctaagtagttcaatcattacacttcttttatatgtctatatttttatacatagacatttcagtaatgtcttttaccagcagtttctctaaagtacgttagttttttgttaatgatattagttttattttctccaaagatgtgtacaaaattttatcttttcagccctcaaatattgattttgaacattattttgcaaagagtactaagtggttggttagttgagatagaggaatatgcagcttttgactatctttcctttcccgtcagtaccagctttcatgatacaatttcctcttatcactttggtcaagaggtggggcagaaaattttgagttacagtatcattcgaagagaatttatttctgcctttcatgttatagcccctaagggatccaggacccgaaaggccagcttctccctcattttgaaatcagttttctccacctgcaccactgcatagcacagatacaggtaatatccacttttattttctcagatctttctaccagattatccttagtcttactaattctagaaatacggcatttaactacaaatgacttagcattataacagaaatgataggaaagcattcgctactgattgtattaatgctgcactactttg

SEQ ID NO: 9013 - DNA, 2300 bp, Homo sapien
ggtaaaacatggtgcttcctgtttcttacgtactttccaaaatggtggcccattgtagggactgattcatttttctatattaatagttatataactactaatatggactcaaggaaacgtggcccaatttgcctttttagtcattctacttgaaccttatgctctagctataccgaatttcttagtgttccccaaacatgaattttcacaccactgtctttgctcgggtcattttctgcctggaatgctttttcatcccactgaacatacacagaacttacttctcaaggtccaattcaaacacttccgttgacaagccttttccaatactcttttttcaaatttccctactctgcaatagaatgctcttgcttcctctgctgtactaccggcatgttttacacacttttttttttttagacgaagtttcgctcttgtcacccaggctggagtgcaactgcgcgatctccgcctctcgggttcaagcgattctcctgcctcagcctcctgagtagctaggattacaggcacgtgccaccaaacctggctaatttttgtatttttagtaaagacaaggttttgccatgttggccaggctggtcttgaactcctgacctcgggtgatttgccccctttggcctcccaaagtgctgggattacaggcatgagccactgcgcccggccacatataggctttcttttctttttcttttttttttttttttttttttgagacagagtttcgctcttgttgcccaggctggaatgcagtggcacgatctcagctcactgaaacctctgcctccagggttcaagcaattctcctgcctcagcctcccgcgtatctggtattacaggcacgcgccaccacgcccagctaatttttttgtatttttaatagagacggggtttcaccatgctggccaggatggcacatatattcttaattatagcaattgctcccttgtgctggtattcgccttacgtgtttgctttcttttctagactaccagatcaaatggcttatttctagtttcaaactgtcacataggaaatgtttgttaaaactaatgttttataaaatttaaagcttattttacatattatctcattagatctctcaagaattctgtgagcttggcaatgtagattgctgtatatgcattaggctgatgaacaaacaggcttagagatagtcacttgcccgaggttagttagctgttaagtgttgggattgaatcccaggtcttctctccaccactttctactaaaaatcactgaaggttgtcaaccgacagataggattactctgtgtgttgataacaaaagggtgatcaataatatctgaaaaggaaactttgtgtaaaagtctttcccttaccttaaaaactacgccacactggagcattctttcattcccccaatttaattctatctggcgagaaacaataatgggctaaaccattattgtatcgtaagtcaaattgccaaaacttcacaggctactaaaagttaacccttattgaatgaattaagaaccttagaagttctgctgttaaaaaaagcacggtgactgtcagggtttttcaggtgtggggggtgtgagggttttaagagttggattcctttgactttgtctctattattataggcttagaggtcccgggtaactaccaatcgctatccaaagggaaagcaccctgttagaaattaagtaagaaaaatagtttatattcccggtctgccatttcgattctaagctttatctttatttagctcacagttaaagggggcatagagccacacccacctcacaaacgccgcaaggattgggagaccagaaaagtaaaagtgacttgcaaacctttagctctaagtccataaaaaagactatcatatgctcacatttctaatctttgctagtataatgtaatctttattttgaaaacaatgtgcctccattcctagtaaagcgaaagtcacggcgctgcgaccctcccttcagcgcctccggactctcacgcgatactcggctttcacgctttagtctagggctgcactgcaggaggaagagaagcgcctgtggtgacgcacttattccgcgcgatgacgtcactgcaaggcgccgggggacacgttggctgcgttttcggcgggcttcccgggtacaaaaatggctgtggctagcgatttctacctgcgctactacgtagggcacaagggcaagtttgggcacgagtttctggagttcgaatttcggccggacggtgagaagaggcccacggcacgcggtgctggga

SEQ ID NO: 9014 - DNA, 2300 bp, Homo sapien
ccctgaatgaaaacaattacttctgataatccactaaaaaggaggcaaaggaaaggaaaataagaatgataatagcagtgatcacttttctaatagccttcctgaattcaccgtgctgatccaacgttttatttttcagaacttctcctttgtgccactctcttaaggtctgttttttgaaagtttcatcactagtgctagtccttccatgtggcctcatgaattgtggaagctttctcagccacatttctccttgccattttggtttacacactggatacagtggactttgctatctaactattcatcaacttcttagatcccattctaagaataagaataaggataagaagttccctcttctgtgccaattttccgcccgctggctacttggctgtttacctgagcttctgtcaaccaactgcacagttttgtttctcttgagtcgtaagggaattgtttaactattaaacccatatacaagttcatggtgctccaggaagagtggaacacaagtaaggcagaatctgggaggcttctttacataggtctttcaggcactgagagattctgcctcagtaagtaacactgtggttattagtatcagtattaaaaacaatgcataatgtaatgatagaggacagcataatatggctaatgtaacacctgtacaacatagtagcatattatataagctatacttctgatttttgttttatgtttttatcaagtcactacaaaactggatcacatatttagacttatttagcagaaaatcatattttctttcaagttaatcagaattaaagaagtaggctttgttgactatagaaccatgggagtgtcttgtcaagcaaaggcaaaatataaatttaggagaggtatgggacagtggtaaacatgagttctctttggaaagaaagaaccaagtttctagggctgttatttgaaatatgtactgattatattatatagacttaacagtgatacacataaagaatcccttgccagacaaacaagaaactaataactagagtctacttggaggagactggaggagagttaagaactggataaatggagaagaatgggggggagaaatatttttatgctatacaattttacactactattttttgaatcatatgaatgtattttctttttatttaaaagagaaagagaaggtggcttggtactgatacttcctttatatccttgtagcaatgagtgtccgtgtctatatctgatatgagcagaggaagcaccttgaagctctgagggatgaggaattaaatagtttttattgataaatgctgtctgttcactgcttgtgagggtgtggatatttcagagaaacaaagcaaatgtgtaactcatatccttcgacatctgtcaattttttatttgttatctgaattaactgtgtgtaaaaatgaaattaaatgttttctttagagctagaaatggtagctcatgcctgtaattccagagactcaggggattgaggcaggaggattaattgagcccaagagtttgagatttaaatgagccatgcatgatcacaccactgcactcaagcctggctacagagcaagatcccaacttcaaaaaatgttttgcttaaaaaatatgatgcacagctaaaaaaaatatattagacatgcttaatactgtaggggaggtagatcatgcccacataacccatggatcacagttcagatggatgttttgaatctgtacttgatcatgggagcagaagtctcgggtgggaggggagactttaaaataatttcagtaacagttgaatgaaaggacaagagcagatcagagctctttgctgtataatagagaaaagagaaacgctgagaggaagagaaggttgggagggttcttccaacctgaatatcagctaggtagatagagataaacggatgactcagagaggtagccatttacttaactagtgatctgtagaggcggtttaaaattctgtgtgtacttcatttattttttttcattcattttatttttttcaaaaaccactcaatccttaggaattactcacagctgtgctgtgtgcattctctgtgggcctagcagggaaggggacagccctgtggcaatgggcatgacacggatgctcctggaatgcagtctcagtgacaagttgtgtggtaagtacggattccacagatgtctatcctctgattttagaattatgaaggctaaggtctcggtagattctagaaggaggatgatttgatttccagtagaaatgaagacagtggtgataaaaggat

SEQ ID NO: 9015 - DNA, 2300 bp, Homo sapien
aaggacattgagatgcagacccagcgctgaaccccaagctattcttgttagtggaaaatacctttgtgctttgattttcttttttcttataatgagtgactttccaggaattcctccatgccttccgtaaatagattccaccccactaaaccagtagattccttcctcacaactgcagaatcatacaagagggaatatactaagtaacacatggatggatggctttaacagtttagaggagcgcaggatctggcagttaggattcatgtaggctaaactggagaaggaagagatctccagtgtatatttcagtgtgacttcccactaccgttcagtacttaatctggacagagagataatgggcattcaacaaattcctatggaattaataatgaggcagaaataacgatctggtagaaacactggggccaaagcattgttgacaatgagttggaggcttataaatttgagatggaggtaataattgaaattacaagggaatgaaaacttgaagaaaaaagagaaataatggatattctaaccatcttattaatgagtataatgtgtgggactagctatacatatataactcctggtgaatgtctgctgtgtaactcagactatttggtacttagttgtttctgtgtgtgggcattatcatttccagtgttttctctaactcaaaatgtttttaatgtataatttatgtgatttgctcaaaaaaattggagagaaaaattttgcctcccctttctggattgtattttggtttcttttttaacttctatttctataatagtaactagattttagacaaaattctgtgcatcagaatgagtatctagcaatacattgcagaaattttaaaaatgagtaaaccactttatctgtcatggaggagcatgcttggggaggtagagtagaaaattacataatatgaagttccaatcagttcatttggatttgatgtatcacttatgacataaagaatctaaagaacaactaactgatgagatgtcttcctttccccttttgaggtaaaattcacataacataaaatcaaccattagccatttaaaaatgaacagttcagtggcattaagtacaattcatcctgtttttaaaaagccctgaaggaagtgaaaatgccaatagagaaagctctagagaactgacatacctcaatctctaaatatgccacattacattgactcaagttctttttgctctaatgactgtcagtttgtgtttggtatgcgttcaatgctgaataaattggtcacatattcaagttacctatgactcttatttctttaattgaatttgtattaggtgttaatatctaacagaattccttcagctatctattgtcttaagtattttctattattttagtttccatgtggacgggtaacataactaccttgttcactgtttccccagaggagaacccaggacataatgggatatatgtgtgtgtgtgtgtgtgtgtgtgtgtgtgcgcgcgcgcgcgcgcgcgggctctaaatgaatgatctattacgtaatcttggggttttaattctcattaattccttataggttcccccacgtctccgcagtggtcagtacttttttttttcttttttttttttttttttctgagacggagtcttgctctgtcgcccaagctgcaatgcagtggcacaatctcggctctatgcgatctctgcctcctgggttcaagagattctcctgcttcagcctcctgagtagctgggattataggcgcccgccatcacgcctaatttttgtatttttagtagagacggggtttcgccacgttggccaggctggtctcgaactgctgacctcaggtgatccacccgccttggcctctcaaagttctgggattacaggcgtaagccaccactcccgtcccttcagtattatcttgtaacaccccggcaaagccttcaggtggagaatgttcctggcgcggaataatccacctgaatgtgaatcctgaccatttttaggcgccaatggaggccgctgctacggggccggccgtgaggtggcgctgttgccctgtatcgtgactccgttttcacctggactggagtcaccgtgatacctgacatctagcaatcactagagtaggaaatgagtatagatcagcaacaagtccagcctttacagttgcagcagaggtttcctgtggctcgagtgtggcgagtcccggaaacctcggagcccgcagacttcccttcgcgggagcccgcccgaactccatcctttgccggcagccacgccccgca

SEQ ID NO: 9016 - DNA, 2300 bp, Homo sapien
aatatgagtgtatgaattagtgaatgaaggaatggataaatttatgtgtatctgtatccaagttgcttcctacttatgattattaaaacatagatcatatttgttctaattttctttagatttatttagtacaataccaacaacttccagctgctcactgctttgtttggatgacaatgatgagtagttttggaagccagtccagcacaaattctaggaaatcccagggtgcatctgtaattattttagggtcttccagaggttggagatcacacctgttagttatgaattacttccaaggatgaatttttttaaaaggctttactgttggatcggtttgaagagttcaatctccttacttttttttcttgtaatgtaattctgaaaggtaaatagcaatgataatcattttgctgaataagaaagtcaatggtcagtcctcaccagaataaatcatgtttataatttaattgtaattaagaccataatctttcacatgaagaaataatttaatcattcttagaattagaccagcattttaaaagcatctacatttatataacatcactgtatgctccatactgaagtcaaactaaaatatgaatctaacatttaagagtttgtaattttttaaatattgatgaattacatagaaaagctcaaaattacataatttgctattttttcaaataacttattttctttgtgttttttgtggatgaaataagaaagtaagaattcaggaaagtttcataataattgatagcaaatgtgcagataagtaattgagtttggaagaatttggtctgttttcattttgtaaacattcactatgtccaaactctgtgctacgtactgtactaaccagtggagatacaaagatgaattacacttgatagttaccctactgatgttaaggtagacatcgacattacagacatattcctggaaaaaaatttggtaaattgtttgagggaacaggcaataacttaaaaaacaaacaaaacaaaggagctttaggtggaccggacactggagtgacacatgataatctcatctacttttcatgtcacctttgagaacctctcataaagcaggaaaccgactctgggacattgaatctctgtcccaagttaacctggttaataaaaaacaaagccagaatttatacctagtctgtctgaaccctaggggccaaatagtcctgtattccagacagtctttgggtacagatcccagaccctctggccctgtgtttactaccatccagcccattctcaaagggcatgtgggctcttcaacttgggaataatgtttattgggtgatctgtttctctatacctctcatcctcgaggctaagagggctcagttccttaagctttcaccagctggcagaggcaactggagcagaaggtaggaagtggatttattcagctttttttgtgtgtgttccttattaaatatatattgacagctccttatttgttgcggttaaattggtgtaaactctgaatttacattaaatctgtgaggtcaatttcctcatctgcgtgttacagatgaaattatccgtatattacctttcaggagtaagttgccaaatagtcttaaggttttattattccaggtcttaacagctgtgctacgaatagctgctggtgcttgatacatgttgaatgactgactagatgcaaaggatttaaaaacaagtgtttgagagggtaaagcgcagagtagtttgggtgccctattttacctctccttgtcagctgcgggtgtcaagacgggttgagggaggagagccaatgcaccccgctccaacaaagggtcagcagcgcgggctcctcggaacgctccagaagacaacccgggcgccccgttcaccctggctttccttggttctgcaacgcgacccgcgcgctcgcgtcccggcggattggagccatagaaagcgcaccgggcgcctttaaatgctaatgagagtccagggcccgactcccgagccaagtttccccaccctctcccctcgcccgcccttccctcccgggccggtgcgccgcctagaaaaacttgtgcggggccatttttggggcagtaagatcgagcgaggagcccaagagagagcgcgcagcacgaagctcgagccgcctccgccgcgcgaccccacctcggccgccgccgcctgcgccgcgagatccgccccggcctccccgagagcgagccccggccgccgcgaccaccagccgcgctaaccgccgaccaaccgccaccgaggcgcctgagcgagagcagaggagga

SEQ ID NO: 9017 - DNA, 2300 bp, Homo sapien
taagtgaaataaacgttttattgaattagtacttttgggaaggttttaccccattagggttaagtttttttcttccatattttgtttcctgcctctctaatgtttcaagcatctctagtgaccacagtgactggggttcaaagtagtaagcttttgacaaaatgctctctcatagaactttttttttaactatatattcacataacttcacgctatacaacattggtattcataaaatctacatttatttccaaaactaaacaaaaacaagtctaaaaattatttgagaaaatacatcatcatagttcccatgagcacttcatttaccaggataaactgtagggtaaaaatgatgagtctaggccaggcacagtggctcacacctgtaatcccagaactttgggaggccaaggcacacggatcgcctgaggtcgggagttcaagaccagcctgaccaacatggagaaacccggaatctactaaaaatacaaaattagccaggcatggttgcacctgcctgtaatcccagctacttggcaggctcaggcaggagaatcacttgaacctgggagatggaggttgcggtgagccaaaatagcactccagcctgagcaacaagaacgaaattccatctcaaaaaaaaaacaaaagaaatgataagtctaggtcagggatcatatccaagatcgtcctatcataggtgatgttccagttgcctgtgaacatggctacataatcatacagattgtccaaaagttaaggctacatctccggaatgatggtttgtcctttaaggaaggataagagaagacatgcattcccaggaaggtgtgaatacccaagaactattctatggaaccccatgtagtaaagcgcttctcagtaactctaaattagagaagctatttcaaactaaaaattcatctctagagatgtggaaagtttaatcttcagtctcctgctagaagggttgaggatctagatactcatgcaatttgtatggaggacagtggagagaatgaaatacagaattttactatctcctctctcatgcatacaactacccttgagaacattttttaaatttttgaaatctttatgaaagtataattggtataaaaagaaccgcatatatttaatgtataaaatttcaaacacccatgatatcttcaccacaaacaaggtaatggacatatctaatacctctcaaagtttccttgagaacattttaagtgaaaatgaaaaatttaaggtaatcaatagtctttttttattacaggtcctctaccttattatatataacattgctaaataaccattaaaagtcatttagtcagtaagacaatgtgttgtattaagagacactatgccatgtaattgttcatctgaacagccaaaataatgacctaaagtttctttggaatcaaataacctacatttagtgttaactttttaaagttcctgaaaatatataactctcactatggaaccaaactttggattctttactaattatcaatattaacattcagcaaaataaaaattcttcaagaactttccaattttaccagttttatacttgctaccaaattcttgatgttcaggttgccagaatggaacactcaatctaatttgaacttcagtacttcctgaaagcactgatcttaagtaatcagggacatacactaaaaaattattgatttttttacctgtaattcaagtttaactgagtgtcctgaatttttagtcgctaaatctagcaaccctattgaggttactagcatacatcacaaattaatgaatccaaaatgcgtacaccttagcctcagaaagacaatgcaggaccatgaaagggaattggcccaatttgcatcttagtaaacagtagctcagcctaaattaaccgtatgtggaaaattacaacctgctgagtaggtaaatgggcatacagtggccaggccaaggatcgccaaacacattgtttgtcaagactaattaggatttaatgaagatagctccagtcttcatttatcattccagtctccatcacaaaacagactacaacaaagaggtaaagaaaactacatcaaaatctaagaagcaggtgtggatgtcaaactccatcaggtcaactagaaactaattgcatatttaaacatggcagataaagtgcagactactttattgttcttagcagttggagagttttcagtggggatcttagggaatgcattcattggattggtaaactgcatggactgggtcaagaagaggaaaattgcctccattgatttaatcct

SEQ ID NO: 9018 - DNA, 2300 bp, Homo sapien
tcccttctcttgtttgcattcattttctcttatatgctattggaagtcattaatatctgtcatgattctgaagatttgttttgtgttccttcacacttttgtcttgtttaatggataatctaatgttatcattgcaccgtatattctttgtcgttgcagaaaaaaaaaatgcatctaaatcccacactaacatttcatcattttatgtcattgactaaatacaaagaggttctacttcttttctgacaaatactggcaaaggccttgaactcaatgagtagaagaatgtcaggcaaacaggctttggggaaaagattttagaactcatcaacccttgctataaaatcaatcatgcaaaacaactctctactttgaaatgaaggccggtccttatcttcaccgccctttcctctccatttctggaagggtttgtcttgatcaagaagggagaaaaacaatctttaatgagattctatctaagatgatatatgatgtgggaaaaggagtataatctcaagaatgaaagtttgacagagagaggaggcacagttatgtatagcagaaccaccttgagaaagaaggttgagggtcccagtagtcagcgtgttcatgagtactctagctggtgatggcaattttagaagtcatttcccaaagattccctggaatgttctctctagccttctaactcagaaatctctgacatatttttttccctctgcatcattttcttttctattttgtttccagcagtagtttatagataactaggtttctttaagttattaagtttatgctttcctgttacacattacacacatgtaagaaatagaaaaaatcctgcatgtgttgtatacattgtagaactatttaaatacaagaagccctagggtattgtgatttgtattacctacattcaaatgtattttgggctaagttgtactttcccttaccccaaaacaaataaatctaatttaatagtagaattagtcctattccttggaaatactggtatgtaaaaaaaaaaaattattattattattttgagacagagtctcactgtatcgcccaggttggagtgcagtggcacgatcttggctcactgcaacctctgcctcccggttcaaatgatccccctgcctcagtctcccaagtagttacttttttatgtgtttgccctatctagaaatatgactataatatgcactgtgagattacaaatcttataaaaggagttgattggaactagaataatgtaaaatttaaattttcttaattttagattacaatgcttattatacaagagacagtgattcaggaaatgaattgtcttcaagggtatttgtcacattaaaaaaaaactaaagataacaaatctttacctggcatatttcacttctgaggaacaattgaaaagaaagcaaattcttagtaaatattatcatgtgcctgcctaaaaaaaagtcatttctaattagatttgtattatatccttccctaattagccgtttaaatgaagacaagaattattatcctctgactaaatgttaaatatctacaatctaattgtactaattacttccaaagtgaaaatttctttgcatctgggagaactgatttgtggcttatttataacttacatgatgaaaatgaagttttatttacacagttgggtttttattaaacatttatctctttttttatgactccctattcaaaactcaatttgaagatccaaatatagagctacagcaagaagcctgttgcaaattcatgatataaaatctctttgaatttgcatgggagcaatttcagccaaacatttcaggtatcactcactaaaggataataattataatttttccaggctataaataactagtcaagctgctcattagttggtttcatcttcaggagtgtagagacaatcctatttcagaggagagctgaacacttccggaagaataacaacgtcgaaataacagcagatgaaaacattattgcatgattcgaagaattgatctatcatgctttaacaggtcacctgtaaattagctcatctacagtgatatttgaaatcagattgttctctctacaaacatgttcagtcctgcagataacatctttataatcctaataactggagaattcatactaggaatattggggaatggatacattgcactagtcaactggattgactggattaagaagaaaaagatttccacagttgactacatccttaccaatttagttatcgccagaatttgtttgatcagtgtaatggttgtaaatggcat

SEQ ID NO: 9019 - DNA, 2300 bp, Homo sapien
tgtttctgcaatgaaaatagatgttaaagtctgtcagctaggatccctctttaacttctcaatgctaagataaaatccaaagggcaaataacacataaactcacacacacacacaatacacacaaaaaaaacatattcaacggtgtcaaataaattgagatcatttgggttttatttatagcaaggaaagataaaagagggtggcattttagtaagtataggcccttaggtaactctggtcatatcctatagcatattttcgtttacatttgaatataggcataactttcttaaattgatcagtattccacacggctaaggaaaagaagtgaggtagtgggaaagaccatgattcagaaggcaagcttggattctatatctggatttaccaggaatttttaatatgtcagttattaatcaccctcctacatgatatattttcatcttcatcttttctggacattacaaattgatcccagagtagttccatttccaaataataaccttgaacctactttattcccctccacaaaattttatctttcaaaaagtttaattaaaataatgaaatattgcattccctgagatgtgaacatggtgcgaccttgtctgtcagttgcatgcaaatcaatttctttactctagtgaagtccttctcagaatattacctgttttatggctttggtcatgacaagcacagtgtgtatttttgagttgtataatctgatatttcttcagaaacaaaattcacagagaagcatgaaagaaaccccaaatttcactgaatagaataacaatagctatttactttctcataaaaatctgcaagattaatttttatctctttattttgtctaaaaccctgaacatatgacacattatctcattaaatactttgtattgttgtgtttgtttgataagcaatatttaatattgccttaaaatttaatattagtttcaaaataatatttctgggaactgtgtattgctgtgtgcctttttctattatttcaaatatgttctactatgcccaatgacatgtttcaatatgtcccaatgaaacagtgtgtttccaatgtgtgtataattagcatactaatatttataatacacctgctgccaaaaaatagagctaagaaaattcagagcatgtattcttatcactcagttcagactgaagagtcttgtatatctatcacgctttttagttccaaaaatatcactttcttgctctttgtcctcctcactgttcaggctgatctgtttccattctaaagataagtgaccagtattttgactattttttctatgtatggaagctacattcaggtacaaagcaagaacactctaagaaaccctaacatctaaaccagaattttccgtgtctcatttgctgacaacactacaatgtcatgtttatttccctcattgtatcttcagttgagaagacaaacactgcagagctttttgaggatattgggaattacctaattaatgtatttctcaatgccctagtgaatggagtgtccttttggccctcttaagtcatataatggggagaaggtgaagttcgcatatgataaattcaccttaatactcctatcttcctacacctttagattctttcctctacattccaccagttatgccatttaagcctcatttaatgttaataataatttgtttaaagctttagtcaaccaagcaagcaaactggccacacaagctaacacagtaaacctagaatctgtaatagcaataactatgtcaatatactaacaaggatggatagtcatccagcaaattaaattctagccatattttccaagtaattgataccttcttgaagttcctggtcaacagctcagattgataaatccaaaatatacagagcttaaaataagaaagagtgtgcaaatttaagaaatcagatccattcccatttgcatcctagaggctttcagtcatcactgcaccaaaggaaattactggccccaatcattgaagtctttaggcagctctagcccagagcaggactggctatcttcttcatctgcatcacagctaacaaaaaggagagataaagacaactatatcatggtctaagaggcagacagatacattgttcttcactggtcagctgaaagtcaattcatcatcagtgatattcaaaaatcacaagtctttgctggcatgccaagtgcaatagaggcaatatatattattttaattgctggtgaattgaccatagggatttggggaaatggattcattgtactagttaactgcattgactggct

SEQ ID NO: 9020 - DNA, 2300 bp, Homo sapien
atacacaacctgtattatttacttaaaaatatttttgtaatttttgttatttcttctttgactcaagagtatttacaggttttttgtcttagtaaattgtttctttctctagttatctttttattattgaacttcattttattcctttgaattcagagaacattcaacacttgtgagatattcttttggattcatgatcagtcttggtaaaaatagtctatgtgcacttgaaaagaatatgaattattttaccgttgaacacaagtttgtcaattgttttttcatgtattttccatctattgatttttggtgtttctaagatgagttattgagttatgtattttacagtctttcattgtgattgtagatttgtcttatttttccttttctgtaaatgtttggtagattatttggttcataaatttttgggattaccctacctttctgtagatttgagcatttttatcactataaagtacactccccatttcttctctaatgctgcttcttaccttaaagtctgctttatagaatattgttataattatgccagatttcttttggatgatgtttgcatggcttatttttccataattttactttaaagttttccttttctatatttaaattgtgtttcttgtaagcagtatacagtcagagttttaaattcttctttgttactattaattttttacttggagtatttagttcatttacattttatataattatattctccatttctagaagttttttccccaaatgttccaatttctttctaacagtctcttgctgctcttctctgaaattgcatcttgttttttgtaaacagtgtatacattagctaatttatctatacatattcttatctgtcaatttcagtatgtgcagcccatgagaatttaagttttctacttgcttttggttggtttgttttgttttgctatcatttgtagtctattcctaagcttaatttaacttcattttgaaatcattgtgcaattttatttatggtagtcatgccaggataagtgagagaaggtcttcttttctccaaagcttagtttattcatatttaatgtaaatacaaaaatagcccctcttttaaaggattgaaggcttgtgaaattaagatgagaaaaagatacttaacatagcgctaggaatataataaaagctcaataaatgttagatttcacttttaatttcacttttaattcttagatcagtatgttgatttacttaattgtttcccacctccctcattagaatatacactccataaatcacacaagttttgaaattctgtctaccactatattccctcaaagatcaaaagagagcttgttgtatctagacattcagtaaatacttgttggataaatgaatgggtgccagcaaacagtaatgtgttaaatgaagagattattcctaagagcctttcatgtcaagggtagtcaacataatcttctgcattcaagggtgtaataaccataagtataaaacaacagcaacagatttgtgacatatttgtgaaacttgtcatacctagagttgagcttaaattttaattaaaaattaaatcgatcatttagagtaagtatctacagtggctaaatttgtttttcatttctatatagtattttctgtacatatataaattgattataaatgacataaataatgatttgatattttaaaagataaagtcaaaatttttgtttctgttttgcattacattctataggtatatgtttggcactcctcctccacaattcaatttattaaatgcaaaatagtctcaggaggacatgtaaaatccatgaaacagaaactttcatttgcattttaacaaattatagataggcattcagtctgaacatacattctccagactagctatgttttgtagacatatttggaaaggtcttcattaagaaatttctgattccatctcaagccattactggggcaatttcaagtctttatataatgaaagagaagaaagtcacacttccgtcgagcagccaatatatgcctcattctgcagcaggtaatctaagatagatgtaacagaagcaatattaagaattagcagatatgctacgtgtagtggaaggcatcttcatttttgttgtagttagtgagtcagtgtttggggttttggggaatggatttattggacttgtaaactgcattgactgtgccaagaataagttatctacgattggctttattctcaccggcttagctatttcaagaatttttctgatatggataataattacagatggatttat

SEQ ID NO: 9021 - DNA, 2300 bp, Homo sapien
gcttacactggagaatgtcagggtaagggtctgagctgagtgatatttgcaggcatcacctgttgtcttcctgcactcaccagccaaggagaagcctgccttccaccaggactgcagtttcctcagccacccacacagtgaatcatgtctgcatggcacgcccctctgctccttctcgctgaccttcctttcctacctgatggtctaccataagccacctaggcagaactacttatctccacttcccatgttaaacagtgtctggtgaaatcagaggcagcaatcctagtaacacagctgggtctgtaggcccaaacaactactctctctcacccataaaaccctaaagcacagctagaactcttctgcttcccacatagagaagaattgctaactcataatatatttcaccttcaaaatatgtccataattatgccagagaaaatatttattttttggtcactttgccaaagtaaagttatccataacaaacaccattgattagaaaatcttcctgtaatattacctccaacccttcagaattgccagaccagaccttcatctgcacagcacaggatccacttatccacaatggtcaagaggcctgtctttaagatttccagtcacattcccccgaccctgtcatacttccaaccaagctatcctcaaattatcaccagccctgtacaaaaatgtaacaataatacgagacctatacaatgcctgtaatgaaaagtggcagctggtgatactgattgatctaggggttccatgaaaatataagcagaaaactactagataggacagaaaaatcagcaggtgaagattaagctaccaactcaggaccctaccaaacttttcagaaacacaaaaccttggtgccaaattttaaaaacaaaaaagaagaaagcaagcaaagagaagtacagaaccttgtttagaaaatcaaataaagatttctcccagaacgcatgaagaaagcagtaagatataaaacatagacatagggaggattgattcacaatataacatatcaacaagtaaggttcagcacaagagtgaagaagaatgagtataagaatattgcagagaaaataatctttggtaaaggcaatctgagaagcaaatagaatggaaactaattaaaaaatagaaaatcaatgtaatacttgaggctttcaacaggctatcatactatctaattagattgtattattgtgtccactcaataaccagtgtgattaaaatatttggtacaagaagtaagacctaaactgaatcatatagaacattctagaaaagagaaagatcatggaagaagtcttagggacataaaatagcatggcttgttcaaggaactgtgtattcacactgttctgatgcagaaatctaatggtgctttctgtggccaattttgccttactaacctccagggtattaataaagatagaatgttttaatacctgtgttctacaacaataaagtatctctggttaatgctagattaggagaatcttaatctctttgggccagagtagcctgagggtaaaacttctgtcatccacgtgtgcccaagtgtgtgttgtcctcacacaactcaacattaaacagaaatgatctctatattattatgaaattaagctacatatcatccatataggtatatatgctataaaaatggaatttatgctacactaatagctagagatattaatcattttcacttctggctataagatcactgctgacaaacatatacaaacgtaagcacgtgtgcacacagacaaccaatgaaggggaaagactaactgtctaacccaattgaaaatcaaatgatgaccaaacttcaattgtagtatttgtgctgattgcttggatactgtttcttcagaaactatgctcaagtcacagtttgtacctaaccacatcctaccaccacatcctgctgggctaaaatcccaaaaagtaataagagacgcattcaactttatgagaggaaagcaaaacctaatctttcaggtggtgaggtccacccagtatggagctcaaaggtgccattgttctgctcatgtttataaagggagctgccatgtttctctcaacgcagagttgggagcaactccagagcctccttcaagatgctgctggtcctgctctcagtggtccttctggctctgagctcagctcagagcacagataatggtaaaaaaattatttttttaaaaaaggagatggggagtgggatgaggggccatgactcttctagggcctcaggggttcaccctacaccactgcagcgg

SEQ ID NO: 9022 - DNA, 2300 bp, Homo sapien
ctttagggttttatgggtgagagagagtagttgtttgggcctacagacccagctgtgttactaggattgctgcctctgatttcaccagacactgtttaacatgggaagtggagataagtagttctgcctaggtggcttatggtagaccatcaggtaggaaaggaaggtcagcgagaaggagcagaggggcgtgccatgcagacatgattcactgtgtgggtggctgaggaaactgcagtcctggtggaaggcaggcttctccttggctggtgagtgcaggaagacaacaggtgatgcctgcaaatatcactcagctcagacccttaccctgacattctccagtgtaagcaatgagagaaagagattaatgtatcaggaaataataaacatcagctatgatctcaccacacacaaccacaacagaggtgacggaggagctgaaacagacactgtcagtgagtgagggtggggtcaaatcgagaagcaggactgcagcaggagcttaggcacttgtaggtgagtggacactctcagcaatccacttgccttttacaacagatgaaaacttaacatacccctaatataattcttgatttctacttcctaaaacctgctctccttcatactaatttgttatggctaccctaaaaaaatgccccacaagtggcttaaacaacagaaatttactttctcatagttctggagcttgaagtacaagattaaggtgtcaacaggtttggtgtcttctgaggccctgtctccttcacttctagatggccggttcttgctgtatcttcacatggggttttatctgtagacgtgcatccctggtacccctctgtggtctgtgctaatgttcttttcttatgaggacaggtgtcagatgggattagcaccaaccctatcagcttcattttaacctaatcacctctttaaaggccatgctgcaaatagagtcacattcagtggtatcgggggtaagggattcaacatgagagtttggagggaacacaatttagctgataacacctcacaatcttttctcagttcatgacatttgtttcactcaaccattcaaaaacataagtgtcactcttgattgtttagtctcctccgtgtactgcccttagcaaatccaattggttctaccttcaaaagatatcccatatatgatcagtttcataatctctatcagaaggtcctgagtcaagccatgattctccctcctggaggactttcaacagtctccagctgatcttggtgacattcctgcccctcaccacatcccaagcagttctccttacaacagccagagtgatcttttaaaaatagaatttagaacatcagcaagatggctgactagagttccctggcactcatttccccacaaaaagaaatcaagaaaacaaacaattttatgtcagccagtgtgatttaaaaagtatgctggagaccaccaggggaacagaaacacctctgtgaagtacagaaactcaatatagcatcctgcctctgacatactctctcttcagtcaaggttggctcagggtcatcagtaactccattctacaggaaaaagtaagctgtagttccccagtggtccacattgccataaaaaatgtcaacaatctttgccccactgttctcactggcacaaaaaccagtctggagagcagttgggatttccaaactgcattgccttacatagtaagagaccaccttgagcaccctctgcccctgcaatgtaaggtgctatggctcagtgccatctccaaactgaacctacatagagagtgtgtcttgctttgagcatcagtagcacctggctctctatcacttgaggccccaccatcattccaacacattcatacaggtatctgcagcaccatgaccctagcttcccagagcctagccagataaactaatcaagaccccggcatccgaacccatgtggtgcaccaccaatccagggaagaagtgaacagcagggaagccacccatctgcctactagccacgacacccacatgcacccacacctcacaaccagctagtctgctgagcctgtgcatgctggtgcccagcctgaaaactggtcctgtggtgggcccacccccaggactacagcctgcttgggccacaacaactctgagtttgtgcatggtctaataattggtcctgcagtgaccctgcctcctcagatgggactctgcagagatggatggccctgctacacctgtgagcactgacagcaacccgcccacccagcaggaagacagcagtgcatgtaagtgcacacacc

SEQ ID NO: 9023 - DNA, 2300 bp, Homo sapien
tgtcttgcaccaggcctgcagcttcctcagtcccccacatcatcaggcaatatctgcctggcactcctctttgttccttttctctgaccttcctttttgacatgatggttgacctgaagtcaccgaggcaggactgctcatctccaggtcctatgggaaacagtacctggtgaaaccagagacaataatctccataacgcattgggagctgctgggctcaagcaactactctgtgcctgagatacaactcatacggcccagctagagctgatctacttcccacagggccagagaagaattgccaattaagaatgcattcccccctgaaataggtctatatttattccagggaaaataccaatctgcctgggtcccttacaagaacaatgtcgtctgtagcaaaatctaatctactaggaagccttcttgtattattatctgcaacttttcagaagagccataccagaccctcatatgcccagcacaggatccactcatgcacacctgtctagggccttgtctttatgattttctgtcacctggcttctcagccatgcctccaaccaagctatcctcaaataaagactaaccatgcacaaaaagtgaaaaattacacaagacctactcaaggtctgaaatggaaagtgcagctggtgattctgagtagtatattttatgaattgatgagcagggaatttctaggtatcacagagcaatcagcagctgaggagagagcgacaaaaccaggactctgacagggctttttggaaacttaatttttggagcaatcagcagctgaggagagagctaccaaaccaggaccctgacagggctttttggaaacttaattttttattgtcaaattatacagacaaaaatgaaagtaaaggtagtgaggagtaccacacacctttacttagaaggataaataaaggacacctttgtagggagaaaaaaaaagatataggacgaaaagtaaacatggcaaggtagactcagaatacaaaatttcaacaaataagtgcgagaaaaagaatgagaaagaatgagtattggaatattacagataaaaatccttggtgagaaagaacactctgatgaaacaggtgacataattactgagtaaaagcagaagaccaatcaaggcaattgaggcttggacaggtattacaaattatcttagatgaatgtataattgtggccatttaattatcagtgatgacaattacaatatttattagaagaaataaagtagaggatgaattctatggaatattctggagaaagtggaggtcttagctatatgacatcgtgtggctcacttagggaaccatatattcagtttgttcaggtctagaaattccttggtggtttctgagttcagttttgctttaataaaccctaaagatatttttaaaatacaaatattttagcttgcctgtgttgtatagcaccaaggcttgcctgagtgtagtgagattcacagaagtttggacaattcttgtagcctgagcaggctgccagcacctttctctcatatatgtgtgcctgggagtgtgctgtcctcacacatctcacagataagcaagaccatctctgttacatgaaaaatttagctaaatgtgaaaatatccacgcacacacatcatgagagatggaaagaggctatcaaaacagtcagagatattgaccatcttcactgttagctgtaggatcagtgtccaccccccgacacacccacacaaactcacatacacagaaatgaaaagcacagtgaaaagcagaatagcagtctttccaaacagattgaaaaccaaaagatgtctaaagttcaatcctgacactgtgccgactgcttggacacagttccgtcaaaacatttgtccaagtcatagttgtgccttttaggaattagacacaaacaatatcctacccaacccttcctgctgagctagagtcccaaaagaaatgagggatacacttgacctgaagtaagcaaagcagaagccagtctctgaggcgaggaggcccacctggtagggagctcaaatgcaccattgtcctgcttgtctttataaagggagctgacacgtttctcccagcacaaagttgggagtgacaccagagcctcctgcaagatgcttctgattctgctgtcagtggccctgctggccttcagctcagctcaggatttaaatgaaggtaagatgaattgggggaagatattgtgactctgattggggtttacaggcaaatgctatagaggaggaaagtggagggaagagaggaggatgagaaaa

SEQ ID NO: 9024 - DNA, 2300 bp, Homo sapien
aggcacaatatgagaaatgaaaattaaatgtcaatattccttaaaaacatagctgcaaatatcctaacacaacgttggcaaactgcatccatcagtgacttaaaaaatactttacatactcaaacctttcattgtttcctcttcctgccctttgcctcattttccttttcagttcagactgctgaaaaagtttttctgtgatgctccctagcatctattctctttctcttatagaagtgagagactacatctctttgattaaatttatatttttaaatgttttctcttatggaaacacaccaggaaaatgcagctcagaaccgcaagcctgttatccattctctatgtctttgtcatgtgttatatcacaagttctaaaaactgtggtattttttcatataccagcaagtacagtaccattcctcaggcctatttgtacagatttggggtattatcaagttgtgaccggcatccccaaacccttttctctagataggtaggaagaacaccctaaaatgaaaaagtataaaagatctcttcagccctgggtcaagaatgcaaatggaagaccacatgccacatagctacatatttaaaggtcataaatatacaaacctaacaaactgttaaaggagacattttctattctatcttgacaaatataccattataacaacaaaatagaaaatatctacctattttaagttataattgaaacttgcaaatcattaaagatgatgcaattattttgtaaattttttagtactctgtagatcacccaataaagattgcatgagtaataaaatacaaacattcataattcacaaattatatctttattaaataaaaatagctttgtattcatctagctaaatggctacttattatcttataatcaagataaagtgttttatttatattaattttgaattagacaatctttcttgagtctccacgttttcagaattttggtaatccactttttttcggtagtttttgaaagagtggggcggggtgaggaaccttgactcttcacaatgaacacattagtccccgcttatctgcagtttcagtgacccaaggtcaaccacagtccaaaaataggtgtgtacagtacagtaaggtatcttgagagagtgagagacaccacactatatattttaacacatttttttactttttatttttttaatttttatttattttagatacagggtctccctatgttgcccaggccggtctcaaacttttgggctcgagcggtcctcccgcctcaatctcccaaattgctaggattacagggatgagccacaacccctggcaacttttattatagtatattgttttaattgttctattttattattagttatttttgtaatcttttactgtgcttgatttacaaattaaactttatcataggtaggtgaatacaggaaaaaaatatattgtatatagagtttggtactatctgctgttttaggcatccactgggggtcttgggacataggcctcatggataaggggaactagtgtatctatttctttgcttggttttcagttttgcaagttatgatgtaatatagtactgctttctttggtagctgttgctgattttgtaaaatttgtttttttatcacttttaagtttaaaaaagaaatatgaggggaaaagcggataaaatgtgaaggcatttggtgcctatggagggatggtggtgagcactgctaagtagtgatgaggcagggaatgagaaagatggatgctttgtaaacgagtttctctttagtcacagtattgaccagatccagctttagctccacaagaaattgagcactcttttgaaatagcataggtaagtctttgcatattttataaagcttcattggctatgctattagccataaaagcttcatttagctacatattctatgaatcagatttttataatatttgtacctcagaactcaagctggttgaatctaattttctatgctcagacaaggcaaaaaagtacaaaacaatgaaagagaatatatctttatttgcatggttgcaaatgtgagtttaactttgctgcataatcatctatgaaatatttctgcccatggtgaagacataaatatcttagctagggctcagcagagaaattgaagaaaaataaagatatcaccagaacagttatgtgaagatcgatcagcaaactttagagatttctgctttgacgttgagccaacaatgaaagaaggagcagaaaaaggagaaggaagaagaactccactggacactcaaggatgtga

SEQ ID NO: 9025 - DNA, 2300 bp, Homo sapien
agctgagcgacctttaggagcatttcctgttcttttcctgtactctgctgccaaggagaaatctgtctttcaccaggcttgcagctttctccgttacccacatcatcaggcaatatctgtctggcacccctctttgttccctttctctggccttcctttttgacatgatggttgacctgaaatcaccaaggcaggactgctcatctccaggtctaatggaaaacagtatctggtgaaaccaaagaaaataatcccagtaacccactgggagctgcttggcttaagcacctaccctgtgcctaagatacaacccatcaagcccagctaaaactgatccagtttccacagggccagagaagaattgccaattaagaatgcattcccacttcaaatatgtctatatttatttcagggaaaatatcagtctgcctgggtcccttatgagaacattgttgtctgtagaaaaatctaatctattaggaagccttcttgttttgttatctgcaactcttcagaagggccagaccagaccctcgtatgcacagtacaggatccacccatgcacatctgtctagggccttgtctttatgattttctgtcacatggcctctcagccatgcctccaaccaagctatcctcaaataaacactagccgtgcacaaaaagtgaaaaattacacaaggcctacacaaggtctgaaatggaaagtgcagctggtgataccgagtagtatattttatgaattgaggaacagggaatttctaggtatcacagagcaatcagcagctgagaagaggagtaccaatccaggaccctggaaggatttttcagaaacttaatagtttattgtccaattgtagagacaaaaatgaaaataaagatagtgaggagtaccatacaccattgcttagaagattaaataaatgtcatctcccacaagtcatgtggggagaaaaaaactatataggaagaaaattacaaacgacaaggtagtctcagcatataaaatatcaacaaatgaatgtaagaaagagaatgagaaagaattagtattagaatatcatagaaaaaatcatctttgtgaaagaaaactctgatgaaactggtgacataaatactgagtaaaaaacagaagaccaatcaaggcatttgaggcttgaacaggcattacaaatcatcaagttgaatatataagtatggccacttagttattagtggtgaagactacggtatttgttagaagaaataaagtagatgatgaattctatagaatattctggagaaagtggaggtcttagctacatgacatcgtgtggctcactttgggaaccatgtttcagtttgtttaggtctagaaattccttggtggtttctgtgttcagttttgctttaataatccctaaagatattttttaaaatacaaattttttagctttcctgtattgtacagcaccaacgcttgcctgagtgtagtgagattcacagagtttggaaatttcctgtagcatgaggaggctgcggggcagccttctgtcatctatgtgtacccagcagtgtgctgtcctcacacaactcacggataagcagaaagcatctctattacatgaaaaatttagctaaatatacaaatatccatgcacacacatcatgagagatggaaataggctatcaaaagagtcagacatattgaccgtcttcactgttagctgtaggattgctgcccaaccccctgacacacccacacaaactcacatacacacaaatgaaaagcacagtggaaagcagaatagcagtctttccaaacagattgaaaaacaaatgatgtctaaagttcaatcctgacactgtgctgattgcttggacacagttccgtcaaaacatttgtccaagtcatagttgtaccttttagaaattagccacaaacaacatcctccccaacccttcctgctaggctagagtcccagaagaaatgagggatacacttgacctgaagtaagcaaagcagaacccagtctctgaggcgaggaggcccacctggtagggagctcaaatgcgccattgtcctgcttgtctttataaagggagctgacacgtttctcccagcataaagttgggagtgacaccagagccttctgcaagatgcttctgattctgctgtcagtggccctgctggccttcagctcagctcaggacttagatgaaggtaagccgaattgggggaagatattgtgactctgattggggtttacgggcgaatgctatagagggggaaagtggagggaagagaggaggatgagaaa

SEQ ID NO: 9026 - DNA, 2300 bp, Homo sapien
aaaaatttccaaaatggttgtccttacacaaatgtttcatgtctgtataaataagaaaatagataaacatttttcccttacttatcccaggcctctttctttcactttggtggcagttatcttgaaggcattcgaaacaatggtctctatgtttaattgaaaagtcttaatgggcctcttaatttttttttcagtctcacttattgctgtttgataccccaaaccggtgagattttatacccctctgaaaccttagatttctgaactctctcttgctcttaattcttatttgcaaaccagtcaattcttttcctttctcatcttctcataatatcttgctaaaatattttggagaacaaccctggcacaccgttttgactttcatcaaccacttcccctagggccagagactcattaaacatggccttcttctaagttattgcatataatgtttttaaaaagtttgcttatacaccacatgtgccatcgtgttgccagtctccaagatctgttccttcactatccaaatcctctaaacaaattctcccactttcagttccaatttctgtgttagactgggtagacaaactgcatcacaaatagctccaaaatgtaaaacgtttcaaacaatatgatttaattttgttcttttaatggtactgatatgtctgagtaaccttccctatgtagttattcactaaaataggctgatcacttggtgacctttaacacatagcttccaagattgccttggggtcaccttattccaggcagccaggagcagaaaaggtgcatggaggaggatgcatggcaaatttttatgggacgggcctggaagtagtgcacataatttccactcacattacattgttcagcttttagtcacattgcatctgtaagagaggcttggaaatatagtctatatgcttagaaaaaagagtagaacatgaaatttaggacatggaagttggagagtgcattttgcttaaaatagccatacaaatgtgaaacaaaaaagttcctgcctatagatgcatggtatagcttgtttatgtcacttttgtagtttgaaagtgcccttaaacctgtcttgaatattagttcttttcttctttttcataaattctaaagaattccagggccaggcgtggtggctcacacctgtaatcccagcacttttggaggctgaggcaggaggatcacgaggtcaggagtttgagaccagcctgcctggccaatatggtgaaaccccgtctctactgaaaatacaaaaatcagctgggcgtggtggtgctcgcctatagtcccagctactcgggaggctgaggcagaaggatcgcttgaacctgggaggcggaggttgcagtgagctgagattgtgccactgcagtacagcctgtgtgatggagtctcactctgtctcaaaaaaacaaacaaacaaacaaacaaacaaaaattccagttcaaactgaatgtccctaacctcagagaactatagtcaattcttcactgaagcatttgtatcttcctcgtctttaattctggtatattttgtttattctttttagctcctgtaacattgcatacaaattatttatattaatagttttaggacttgggtgaaattcttgaattatgaataattttagggacttatttctataaatcatattgcatcaacaaaaatgcttggtatgtagaaggatgttactgaatgagagacaaataattactgaaataaatgttatttctaacaatttctattcaaaatttaagatatttgtattcaagtggtatggctcaggggagatgaaaatgcaaattagtgaaaaatgatctctcatttttgcatgtttacatactcgacttcgcttctttagtcattaccatgaatggaaaattgtggctgatgctgaagataaatagacatcattagtgtttgttctagaaattatatagtagctgactgaaagtggtaagaaaggtattcatgaagctttgtatctcttaacaatttggtttagtaccggagttacaatataaatagaacaaactatttttttcatgaagatctctgaacatatatctgaatttggctatgccttctgaaattgtgatgaaaacatagatagaaagcatcataaatgcatgcccatctgcaactgtttgactataaagctgtcagtgaagtagaatatcggaaatattttcatagaaatgttcgttggaattaatattttctttctggtggtggcaacaagaggacttgtcttaggaatgctgggaaacgggctcattgg

SEQ ID NO: 9027 - DNA, 2300 bp, Homo sapien
aagcttccaatgcccaagccagtcaatgcagttaatctgtacaatcaagccatttccaatcatgaattttctaatttgtacaatcaagccatttccaatcatgaatactctaatcatgaattctcctaatatcaccctcagcaaaagaagtgtggattaggcattcaaatctaaacatcaaggggcagataaaaactacaaccacctaaattattgctcctatcccactctcaggtggaaagaaggaaatctttcttcagctctagagcattaaggagtaggatttggagctttgtgactgttctttgcctattcccgtcccattggaataggccctcaatctggccatgttatcagtgggtggctgctattttccccacggtctcagggtggaagataaggttttcatggagttacccagaaacggagcaagtagggcgtaaagggtggcacaaaagaggaatagaagacagaatgagtccacatagctttacatatttggaaatgaaaaatccaggacgtaatgactcctgtgactctgaatggctctgtgtattagtctttcagttttcaaagggagtaaattatatgtgtgaactgaaactatatatcttctcccagttctcagaattgatcatttattttacatcgctcttcagtctctataccagtattttagaagttgtcataagtaattcctctaagtgctacctcgctggagtggtactggagcagcaaagtagcaaaagaatactagctgggaacacaaaattaatttttacaaatttatcagtggcacgttatttctaccagtcatataatcagtagactatatagaaacagaggtactctagggtaccgtacttgtgctctgaatagctgctagacatgcagtgcacggtgcgatgtgtggtatctcaacaatgcttttcagaacaagactgtaaccttaaggtcatgatcagaaatcacacatttgaataatccatgaatgaagacggtgtgtgcgattaaaaaatacagtgctttctagttaaaatgggagataagtgaaggtaatgaaatgtgcaccatttaaataacaaaagtattgtggctattagagattcactgtgctgttactctaatggtattaagagtttggaagtacaggccgggcgctgtggctcacgcctgtaatcccagcactttgggaggctgaggcgggcagatcacgaggtcaggagatcgagaccatcctggctaacacggtgaaaccccatctctaccaaaaaatacaaaaaattagccgggcatggtggcgggcgcctgtagtcccagctactcaggaggctgaggcaggagaatggcgtgaacccgggaggcggagcttgcagtgagccgagatcgcgccactgcactccagcctgggcgacagagcgagactcccgtctcaaaaacaacaacaaaaaaagagtttggaagtacagagtagtattccagctcttggagcctagccacaggtttcacagatgcatctccatgcagaaatggctgaagcttccacagctaatctgaactttttaagggtttacatggctgggaatataattttgtatgtatgtccttatgtatatacgcgtgtgtgtccactagttttttgcttgaatgtttatcattcctgtcacttgcaatttaaatattcctaataaatagaaaaatccaaagactaagattgtgatcctttttatgtctatggtatattatgaatacagagaccttgtgcttttattggcgtaggaatcatcttgccctaatattaatattatgaaatcaaaagggtaagattcctaacatcccacataacacagcagacaaactaaagttttaatctagctttggcccttacaaattttgtgccctacggcaagttacatctcgcttagattttttcattttaaagtggaactatctgcatggatgttcgtacatgctatataacacatcctattccagagccacctaccatcagttgagctctaaatggtaaatgccacagtgagaagcagacaggaaggggcggagcgccagcggcgcccggggctacgcgccgcactgcaccgagcggcggcagcggcaagcttgggtgtgagcccgggagccgctttgcttaccgtcctgccggtcccagccgtcgctaggaggtccgcgggccctgcggcaaccctcgctacagacgctgggcgggcggcgacacctggctcatggcccccgcggcggctccgtcctccttggccgtcagggcctcaagccccgccgcg

SEQ ID NO: 9028 - DNA, 2300 bp, Homo sapien
aatatgttcacatagtcacccaaatggagcatcctactctgtcaccatttcaggattaagactagacagtcttttgtgttacaaattgggacatcagtgctctgggaaacagtgatgtccacgattctaaatcccttggtattactatttcattgattaaactacacttctgatattttagactaaaatgttttggcttatcgcagtctaggaaacctgtcttgggtatataaaacagacagttgatgcacgattagggaaaaataaggcaacctatgaaaatggccttatggattaaaagaagtgagctcctatatggtcagtggaatccaggaaaaatttaatggaaaaagcgccacctaagcttagctttaaaacacagagtatcttcaggtagaaaaggctataggagaatgtgcccaaatggagtttggctggagacaaagaataaagactagaaagaacaattaccctaggccagacatggtgttggacggggcaagatgcttactacttaaagccatagaacactgtttgctggacacaatgagtggaatatagaacaatgcaactattttaacactttacccctcttagtggtttattagttaattttttcctgaaaaaaaaaatgcgtatactactttttctgcacttttctatatcagatcttgatttaaaactttaccactcttggtgatttattattagtttttttaatccgaagaaaacatgtgtatactcctttttctgcatttttctatatcagatcttgattggctcaccaccattacacacacacacatctcttttctcccatcctcccagcgttatagaatcatttgttgtaaaatcagtattcagtatttacataattatgactgactttacatgactactattattcacagttgaggtataccgtgtatacagtgtagtttttaaatttttatttttctcagcgttcaaaattatatgttctgttttcttaattttgaaaaatatgcattcactaatttatccccacactctttggaaaatgaaagctctctaggctgtattcaaatacaccaggtactctatcaattttcattttttaaactattctacctgagctctccatctttagccatttcctgttgacttcatactgttctcccctaccactctccctctttaatatattaccgttttagaaactttatggctaccctgtaagtaataaaaatgtctttccccactcaacaacagacagtacctttcaagtttccactttataaggacataacccccattccatttacttcccccgccctccttcaacattcccacttgtattttccggctgtatttttaaaacatggtaaataacatttgcactccactttgtaaccataattaagtatgcccttaaacaataaaaaccataaacaacatttgtattttacgattatttaaatgttattcactgaacagccaagctttgtgctactatgggatttcgttttctgcggttccaagtcttgatccacgtcctgccacaggatcactgaagtagagcccattttcttacactctcgccattagttcaaaagcttgcagcattttatgtctggtacttggaggatgattttcctgtacagttttgcgtttttttcaccgaaaatttctgattattattgttttctcttgtgggatgaaatatgtaccttctatatcacagccttaataccttcagcttcttattcattgaaatcttgcttacaatccagtccgaggattcccggtttactgattttctttttcctgcaaattttagccttctgttttgttttgaaataatgcatcctctgcgctttgtcacattctgaaattcgtcaggtgttttaggatgcacactttcttagatgttttcgagggtcttaactgcagttctgtttccggaacagcgtattctctttctagggattgtaggctcccggccgccccctgaggagctccgctagcagctaagagggcagccacgaagagcgcctgagcactctcgcgagactgtggggctcgccattggctgctccgccgcgccgcaacggaccctgggagtcggccatcatgctggccccggaggccgttagcttagtcatggctctaaatatgtacctgcaatcggatgttgaggatcaccgagcccgcgacgtagaagtacgggaagttcatgcgcagctgccaggccagctcgaagaaggcgagcagggtgcgggagagccccttgcagaagacgccgtacgaggtgggtgtcg

SEQ ID NO: 9029 - DNA, 2300 bp, Homo sapien
tggagaaagtcagggaaagggcctgagataagggacttttaggggcatttctgttgtcttcctctactctcctgccaaggacaaatctttcttgtatcaggcctgcagcaacctaagttggcgacaacatcaggcaatgttggcctggcctctctgctgctccttgtttctgacattcctttgttacctgatggtctaacttaagacacctaggcaggattggtcatctccagttcctatggaggagaccagagatagaaatctcaataatataatgggacctgctggcacaagcaagtactctctgcctaagataaaactcatgaagactagctagaaccagtccactttccatagagccagaaataatttccaattaataatatattcccctttcaagtatgtctatatttttgccagggaaaatatcaatcttcctggttcccttgcaagggcaaagttatctgtagcaaagccttctgtattaggaagtcttcctgtactattacccccaactcttcagaagggccagaccagaccctcatctgcacagtccaggatccactcatccacaatggtcaagaggtctgtctttaggatttactgtcacataccctctctacctccatcatacctccagccaagctgtcctcaaattaataccagccatgcacaaaatgtgaacaattacacaagacacacagaaggtctaagtggtaaatggcagctgactcactgactaacctgtatattccatgaactgatgagcagggatttactaggtataacagaagaatcagcagctaaaagaagtgctaacaatgcaggactctgagagggctttttggaaacacaacatttattgtgaaattacacagacaagaatgaaacaaaggtggtgagaattatagcttattacttagaagattaaataaaggaaatcttaccaaattcctggggaaaaaagccagatatataaagaaaattacacaaaatgagcttgactcagaaaataaaatatgaacaaagaagtaccagaaagaacgtcagggaggaatgcatatcagaatattgtagaaaaaatactctttgtggaagaacaatctgagaaaacaggtaacacaaatactgactaaaccaagaaaaccaatacaatgcaattgaggctttaatgagggtatctgattaccttatttgaatgtagaattgtagccacttaattatcagaggtaggaattcaatacaattcttaaaagaaatgaagcagagggtgaattttgtagaatattctagagaaagggaagagcatgaaggaagttttggcaacatgatattgcatggttcctgcaaggaactatatattcagttttctcaggtctagaaatttcctcgtggtttgtgtgtccattttgcattcataacccctaaagatactttaaaatacacaattttggccttcctgtgtttcacaacaagaagcctttcctgacttgagtgagatccacagaagcatgaacaatagctgtagcctgagtaggctgtgaggcagccttctgtcatctgtgtgcccaggagtgtgctgtcctcaaacatctcccagatagcagaaactatctctatcgcatcaaaagttaagctaaatgtgatactctctgtacacacacatcacgagagatggaaataggctataaaaacagccagagatattgatcatcatcaccgctggctgtagcttcactgcccacacacacatacacagaaataaatagcaaagttgaaagtggacaatagtcttaccaaaaagattgaaactctaatgacgtctgaagttcaattatgacaccgtgctgattgcttggacacagttcctttaaaacctttgttcaagtcatagttgtaccttttagaaataaggtacaaacaacatccaacccaacctgttcctctgggctagagtcccagacagaaataagggatacacctgacctgcagtaaggaaagcagaacccagtctctggggtggtgaggcccacccagtgtggagctcaaaggtgccactgttctgctcctctttataaagggagctgccatggttctcccagcacagagttgggagtgactccagagcctccagcaagatgctactgattctgctgtcggtggccctgctggccctgagctcagctcagagcttaaatgaaggtaagacagaaggaggagaagatgtggtgactctgcttggggcttaggaggtgatagttgtaattatggggaagagaggagaatgaaaacacagatgg

SEQ ID NO: 9030 - DNA, 2300 bp, Homo sapien
caagttcctgctgcagtcctgcttctctcttccacccaccctcacccacagagagtgtccctttccgcatttccatcacctcttttttgttttgtctggtgagtgcatagctgatatttatgctttcctgataaactttactcattgctgacattggagaaggtcaggaaagggcctgaaatgagtgatctttaggggggttttcattctcttcctgtaccttcctgccaaggggaagtcggtcttgcatcaggctgcagcaacctcagttggtgacaatatcaggcaatgtcagcctggcctctgctgctccttttctctgacattcctttgttacctgatggtctaacttaagccacctaagcaggattgctcatctccagttgtattcccatttcaagtacgtgtatatttttgtcagggaaaataccaatcttcgtggttcccttgcaagggcaaagttatctgtagcaaagccttttttattaggaagtctgcttgtactattacctgcaactcttcagaagggccacccagattctcatctgcaaagcccaggatctactcatccacaatgttcaagaggcctgtctttaggatttactgtcacataccctctctacctccatcatacctccaaccaaggtgttctcaaattaataccagccatgcacaaaatgtgaacaattacacaagacacatggaaggtctaagtggtaaatggcagctgttgatactgagtaacctgtatattccatgaactgataagcaggtatttatcagatataacgaagaatcagtagctgaaagaagtgctaacaatgcaggtctctgatagggctttttggaaacacaacacgtattatgaaattacacagacaagaatgaaacaaagatggtaagtactatatcctaatacttagaagattaaataaaggaaatctcaccaaattcatggggaaaaaagccagatacataaagaaaaatacacataatgggcttgactcagaaaataaaatatgaacaaagaagaaccagaaagaaggtggggaggaatgcatatcagaatattatagaaaaatactctttgtggaagaacaatctgagaaaacaggtaacacaaatactgactaaaccaagaataccaatataatgcaatttaggctttaacgagggtatctgattatcctatttgaatgtagaattgtagccacttaattataagtggtaggaattcaatacaattattaaaagaaatgaagcagagggtgaatattatagaatattctggacaaagggaagagcatgaaggaagttttggcaacatgatatcgcatggctcccgcaaggaattatgtattcagttttctcagatctagaaatttccttatggtttctgtgtacattttgcattaataacccctaaaggtactttaaaatacacaattttggccttcctgtgtggcacaacaacaagccttgcctgagctgagtcagatccacagaagcttgaacaatagttgtagcccgagcaggctgtggggcagctttctgtcatctatgtgtgcccaggagtgtgttgtcttcacaccatcacacaggtaacagaaaccatctctatcgcatcaaaactttagccaattgtgatactatctgtacacacacatcacaagagatggaaataggctctataaagagccagagaaattgaccatcttcactgctggctgtagcttcactgcccccacaaatattacacagaaataaatagtagagtggaaagcagacatagtcttaccaaaaggattgaaactctaatgatgtctgaagttcaattatgacacagtgctgatagcttggacacagttcctttagaacctttattcaagtcatagtcgtaccttttagaaataaggcacaaacaacatccaacccaccccatccctctgggctagagtcccaaagagaaataagggatacacctgacctgcagtaaggaaagcagaacccagtctctgaggtggtgaggcccacccagggctcaaaggtgccattgttttgctcctctttataaagggagttgccacgttcctcccagcacagagttgggagtgactccagagcctccagcgagatgctgctgattctgctgtcagtggccctgctggccctgagctcagctgagagttcaagtgaaggtaaaacagaagggggaaaagatgcggtgactgcttgggacttaggaggtgacagtggtaattatggggaagagaggagaatgaaaacacagatggggctgc

SEQ ID NO: 9031 - DNA, 2300 bp, Homo sapien
aagagcctgaaatgagtgacctttaggggcatttctgttctcttcctgtactctcctgccaaggggaagtctgtcttgcatcaggctgcagcaaccttggttggtgacataaacaggcaatgtcatccttgcctctttgttgctccttttctctgacattcctttgttacctgatggtctaacttaagccacctaggcaggattgctcatttccagttcctatggaaaacagggtctgtgagacaagagacacaaatctcaacaatacagtgggatctgctgggaccaaacaactactctctgcctaagataaaactcatgaagctcagctagaaccaatccactttccatagagccagaaagaattgccaattagtaatgtattcccctttgaagtacatctgtatttatgccagggaaaataccaatctgtctggttcccttgcaagggcaaaattatccatagcaaagccttttgtattaggaagtctccctgtactaatatccgcaactcttcagaagggccagaccagaccctcatgtgcacagcacaggatccactcatccccaatggccaagaggcctgtctttagaatttactgtcacataccctctctacccccatcatacctcccaccaagctgtcctcagattaccaccagccatgcacaaaatgtgaagaattacacaagacacatggaaggtctaagtggtaaatggcagctgttgatactgactaacctgtatattccacgaactgatgagcagggatttaccagatataagagaagaaccagcagctaaaagaagtgctaacagtgcaggactctgagagggctttttggaaacacaacatttattgtgaaattacacagacaggaatgaaaaaaagaggttaggagtactatatcttattctgtagaagattaaataaagtaaatctcactaaattcatggggaaaagccagctacataataaaaaatacacataatgagcttgactcagaaaataaaatatgaacaaagaagtactagaaagaacgtggggaggaatgcatatcagaatattgtagaaaaaatactccttgtggaagaagaatctgagaaaacaggtaacacaaatactgactaaacaaagaaaaccaatacaatgcaactgagggtttgatggcggtatctgattatctcatttgaatgtagaattgtggccacttaattaacagtggtaagaatttgatacaattcctaaaagaaatgaagcagtgggtgaattttatagaatattctagagaaagggaagagcatgaaggaaattttagcgacctgacattgcatggctccctcaaagaactatgtattcagttttctcaggtctagaaatttcctggtggtttctgtgtctactttgcattaataacccctaaaaatactttagaatacaaaattttagacttcctgtgttgtacaggaccaagccttgcctcagctgagtgagatccacagaaacttgaacaatagccctatcctgagcaggctgcggggcagctttctgtcatctatgtgtgcacagaagtgtgctgtcctcacacatctcatagatagcagaaaccatctctatcacatcaaaaattgagctaaatatgaaaatatctgtacacacacatcacaagagatggaaatagggcataaaaagatgcagagatattgaccattttcactgctggctgtagcatcgctgctcacacacacataaacagaaataaatagcacagtggaaagtggatgatagtcttacctaaaagattgaaactctaatgatatctaaagttcagtgatgacacagtgctgatggcttggacacagttccttcaaaaccattgttcaagtcatagttgtaccttttggaaataagacactaacaacatatcctatccaactcatctctctgggctagagtctcaaagaaaaataagggatacacctgacctgcagtgagcaaagcagaagccagtctctgaggtggtgaggcccacccagtgtggagctcaaaggtgccattgttcttctcctctttataaagggagttgccacgttcctcccagcacagagttgggagtgactccagagcctcctgcaagatgctgttgattctgctgtcagtggccttgctggccctgagctcagctcagaacttaaatgaaggtaaaacagaagagggaaaagatgtggtgactctgcttggggcttaggaggtgataatggtaattacggggaggagaggagaatgaaaacacagatgg

SEQ ID NO: 9032 - DNA, 2300 bp, Homo sapien
gggaaagggcctgaaatgagtgacctttaggggcatttctgttctcttcctgtactctcctgccaaggggaagtctgtcttgcatcaggctgtagcaacctcagttggtgacataatcaggcaatgtcatccgtgcctctttgttgctccttgtctctgacattcctttgctacctgatggtctagcttaagccagctaggcaggattgttcatttccatttcctatggaaaacagtgtctgtgagaccagagacacaaatctcaacaaagcactgggatctgctgggaccaagcaactactccctgcctaagataaaactcatgaagctcagctagaaccaatccactttccatagagccagaaagaactgccaattagtaatgtattcccctttgaagtatgtctatatttatgccagggaaaataccaatctgcctggttcccctgcaagggcaaagttatgcatagcaaagccttttgtattaggaagtctccctgtactaatatccgcaactcttcagaagggccagaccagaccctcatgtgcacagcacaggatccactcatccacaacggtcaagaggcctgtctttaggatttactgtcacataccctctctacccccatcatacctcccaccaatctgttctcaaattaacaccagccatgcacaaaatgtgaacaattacacaagacacacagaaggtctaagtggtaaatggcagctgttgatactgactaacctgtatattccatgaactgatgagcagggatttaccagatataagagaagaaccagcagctaaaagaagtgctaacaatgcaggactctgagagggctttttggaaacacaacatttattgtgaaattacacagacaggaatgaaaaaagatggtgaggagtatatatcctattacttaaaagattaaataaaggaaatctcaccaaattcatggggaaaagccagctacataataaaagatacacataatgagcttgactcagaaaataaaatatgtaaaagaagtactagaaagaacgtggggaggaatgcatatcagaatattgtagaaaaatactcgtggaagaagaatctgagaaaacaggtaacacaaatactgactaaaccaataaaaccaatagaatgcaattgagggtttgatggtggtatctgattatcttatttgaatgtagaattgtggccacttaattatcagtggtaagaattcgatataattcctaaaagaaatgaagcagtgggtgaattttatagaatattctagagaaagggaagagcatgaaggaaattttagcaacatgacatcgcatggctccctcacagaactatgtattcagttttctcaggtctagaaatttcctggtggtttctgtgtccattttgcgttaataacctctaaaattactttagaatacaaaattttagacttcctgtgttgtacaggaccaagccttgcctcagctgagtgagatccacagaaacttgaacaatagccctatcctgagcaggctgcggggcagctttctgtcatctatgtgtgcacagaagtgtgctgtcctcacacatctcatagatagcagaaaccatctctatcacatcaaaaattgagctaaatatgaaaatatctgtacacacacatcacaagagatggaaatagggcataataatatccagagatattgaccatcttcactgctggttgtagcatcgctgctcacacacacataaacagaaataaatagcacagtggaaagtggatgatagtcttacctaaaagattgaaactctaatgatatctaaagttcagtgatgacacagtgctgatggcttggacacagttccttcaaaaccattgttcaagtcatagttgtaccttttggaaataagacactaacaacatatcctatccaactcatctctctgggctagagtctcaaagaaaaataaaggaaacacctgacctgcagtgagcaaagcagaagccagtctctgaggtggtgaggcccacccagtgtggagctcaaaggtgccattgttcttctcctctttataaagggagttgccacgttcctcccagcacagagttgggagtgactccagagcctcctgcaagatgctgttgattctgctgtcagtggccttgctggccctgagctcagctcagaacttaaatgaaggtaaaacagaagggggagaagatgtggtgactctgcttggggcttaggaggtgataatggtaattacggggaagagaggagaatgaaaacacagatgggg

SEQ ID NO: 9033 - DNA, 2300 bp, Homo sapien
ccccatttcctgtgttcatgatagtagaaagcaacagagaacagttggcccctgagctgccaggttgtgggctgggtagggaggatccattgcaggagcattggaaagccttgagcactctgccctgcctgtccacacagcagcaccttcacagccttctagtagttctgatcagatttctgcctcttaaagcggccccacagactaaaagccatcatctggaatttggagtaaaagggcccacaggaaatgaagcactctaagaaaattcagctgggcaggtattttaaggtcactgactgactccaaagtgaaggtagaacccatattgaccgcaattcatcacacttctgtaacttcagaactcactgctgactggtggagaaggttgcaattgcattcagtccgaatctctgaacatattatttagaaatattagcttatccagctgcctacggagcttcccatctgggctttcagttgctacattctctaaagccgtatctgacccacaccttactaacactatgtgcttctacagcattcacccagtgttacagctcttttagaatctgtctagcaggttttccagtcttcactggaaagcccttgcccccaaatataaaaaaataataaggcattcacccctgaactttagcagggcttccaatcgcctttaagcactcatttaaaagaaaagtcttttattcccttataatagtattaaatcattagcaaatgattctcaaaactattttttgagtgctctcttctgtgtgagaatgtaggaaatgatgaccaagtatacgaagttggacatgcctagtcccaggtggccttttcctattggcacagctgctggcattcacccgtgcaagcttctagcttgcttgtctatgtctgcagcttgattttacaggctgctcattgtaagaaaagagaacgatttgagggctgcttttcattaaaaggaaaaccttactgaggacttccttaccctcactatctgcctaaataatttcttcttaactcctatatcacttataagaggagaaagcagacacacagggggaactcagtgtgacagcacaggcggagcctggagggatgcccaggaatgccaaagagacgcacagactggtttctctctcacagcccccagaaaaacctaaccctgccagtgagaggtgacagcgtgctggcagtcctcacagccctgctcgctctcggcgcctcctctgcctgggctcccactttggcggcacttgaggagccctttagcccaccgctgcactgtgggagccccttgctgggctggccaaggccggagccggctccctcagcttgcagggaggtgtggagggagaggcgcgggcgggaacaggggctgcgcgcggtgcttccgggccagcgcgagttccgggtgggcgtgggctcggcggacccagcactcggagcggcaggccggccccaccagcccgagcagtgaagggcttatcacctgggccagcagctgctgtgctcaatttctcgccaggctttagctgccttcccgcggggcagggctcgggacctgcagcccgccatgcctgagcctcccccacctccgtgggctcctgtgcagccggagtctccccgacaagcgccaccccctgctccgcggagcccagtcccatcgaccacccaagggctgaggagtgcaggcacacggcaccgcactggcaggcagctccacctgcagccccggtgggggatccactgggtgaagccagctgggctcctgagtctggtggggacgtggagaacctttatgtgtagctcagggattgtaaatacaccaatgggcactctgtatctagctcaaggtttgtaaacacaccaatcagcaccctgtgtctagctcagggtttgtgaatgcaccaatggacactctgtatcttgctactctggtggggacttggagaacctttgtgtggacactcggtatctagctagtttggtggggacgtggagaacctttgtgtctagctcagggattgtaaacgcaccaatcagcgccctgtcaaaacagaccattggctctaccaatcagcaggatgtgggttgggccagataagagaatataagcaggctgcccgagccagcagtggcaacgcgctcgggtccccttccacactgtggaggctttgtcctttcgctctttgcaataactcttgctactgctcactctttgggttcacactgcctttatgagctgtaacactcaccgcgaaggtctgcagcttcactcctgaagccag

SEQ ID NO: 9034 - DNA, 2300 bp, Homo sapien
gggcgcggtggctcacgcctgtaatcccagcaatttgggaggccgaagtgggtggatcacgaggtcaggagattgagaccacggtgaaaccccgtctctactaaaaatacaaaaaagattagccgggcgcggtggcgggcacctgtagtcccagctactcgggaggctgaagcaggagaatgacgtgaacccgggaggcggagcttccagtgagccgatatcgtaccactgcactccagcctgggcgacatagcagactccgtcttaaaaaaaaaaaaaaaaaagcaaaagaatacagaaaattgttaaaggggagaagggggtggtcaaaggcagaggagtcggtgtggacaagacagagatctcttggagagagggcaggactaccagttgacaaaacctgttcaggttcctggaggctcacaaccaccagttcccatcatcccagcaacagcactctttcccaccctagcctcgttcgtaatgatctgatcaatgtgtgaacaaaaatattgtgtgtacaagtctcaacacatttgataatgtgaagaggtgaaggaaagtgggtaggaaaaatctgtagggtggggagactcggggaaatgtgtcctggtccagtgcaggtaacatatatgggtatatatgcgtatatacatatttataccatatttaatatattactctattaagaaattataacaaatttccttttacattacacatccacatattaaacccccaatatgtgctaacaaggttagaatttaagtataatgataatgttctcagttttttgtggtggacactttaagagagtgtaaataataataaaaataatagagtgatcagatcacttgtgctcagggctagacccttcagccccaacggccttaacccccctcaactgcttttccaaccaaatattcctccccctgcaggatcccagggccatccaatcaaccggccaatgacggtttcagagaagcggtcctggggaggggtattatctgcaggaacacgtcctgccaactttgtagtcgagtcacctatttcggttggtagcggccgctatttctttaaaagggcagtggatttcgaaacaggagggggaggtcaggaaaaggaactcagctgcctttgataactgccctgcagccttcccttcccggagcgcgtgctcggctcgggaagcgcccgcggccgccgcatccccgagcgggcgcgtggcgccacctctttccggggcgcccaccttccccgggaatccccccgcccgacggtcccccagcgtctgcggcgcggccgccccggctttgtctccggcgtcgcgctcgggcgcccgctctccccacatttccccgtgtgcaggctgtaacccgatctcccatttcctggtggattctcttaaagaggcagcggtcgagaagcagaacaaaggctattgttttatttcctccttcggattccgcgtcctaaccggaatggcccttcatagataattactttcgttgcatctgcgcttagtgaaacgtttcaaaacccttgtgcacatcgatgtatccaagagacggagccaggggaggtgggaggagtttaataaaacctgttttgtggtgtctggggccacaatgtaacgttttttaaaggtgtcttccttaagcccggaaattggctcggccagcgggaggtctcgcggcgtggagggcgggcgcccgcaccgggggccggcctggggggctgcgccgctcgccccgctcgcagccgcggccccacgcggccccgctacccgggtttcctccgcccgcgcccccgcggccgcccctcccccgcgcagcttttatttccccgatgccgggctgtaacccgagcttttatttcctggtggctcctttaagaggcagagctcagtgctgggaattcacgtcagtttctgcactgaaactctcaagatcaatgagcaaagagctttctcagttctgcctttcagtttctctcttccaggaaggaaaacattcgagagagcgagggagagccgcgggagggcggggggcgggggcgccggctgcgggtgggaggagagaccgggaggccggccgggctgcgtcccgggtccccgcgccgcgccgcgacctgcagaccccgccgccgcgctcgggcccgtctcccacgcccccgccgccccgcgcgcccaactccgccggccgccccgccccgccccgcgcgctccagacccccggggcggctgccgggagagatgctggaagaaacttcttaaatgaccgcgtctggctggccgtgga

SEQ ID NO: 9035 - DNA, 2300 bp, Homo sapien
tatgtgtgtctgtgtgtatgtctgtgtatctctgtgtgtctatgtgtgtgcctgtgtgtgcctgcgtgtccgtatatgtatgtgtttgtctctgtgtctgtgtatctgtgtgtctgtgtatcagtgtgtgtgtgtctatcagtgtgtgtgtctgtgtatcagtgtctgtgtgtctgtttgtgtatctgtgtgtctgtgtatctgtgtgtgtctgtgtgtgtgcctgtgtgtgtctgtgtatctgtgtgtctgtgtgtctctgtgtgtggctgtgtgtgtctctgtgtgtgtgtgtacctgtatctgtgtatctgtgtgtgtgtctctgtgtgtgtctgtgtgtgtgcctgtgtgtgtctgtgtatctgtgtgtctgtctctgtgtgtggctgtgtgtgtctctgtgtgtgtgtctgtgtttctgtgtgtgtctgtgtatctgtgtgtatgtctgtgtatgtgtgtgtgtgtctgtgtgtgtctgcatgtgtgcctctgtgtgtgtatctgtatgtctgtgtatgtgtccctgtgtatgtgtctctgtgtatctgtgtgtctctttgtgtgtgtctgtgggtatgttgtggaaatccttggaaatctcctatttgtgggaactgaatccccagcactgccatgtaaatatttttccctctcatgggccactgtggccattgtccattgtttcaaagaccctacaacaggatctgagtttccctttgccaaaagacaggtcacagggaagggaacacagctgacccttgaacaatgtggggttagggatgctgacccccacgtcgtcaaaaatccgcgtataacttttgattcccaaaaaaggagtcaggctgatgtctgcccaatattctactgaacttaactaccaagagcctacagttgactgggaaaccttgctgataacatagtcagttaactcatatttcgtgtatgaattatataatgtattcttacaataaagtaagccaaagaaaagaaaatactattaagaaaatcatgaggaagaaaaatatttcctcttcgttaagtgcaagtggagtttcatgaaggttttcatccttattgtcttcacactgagtagggtgcggaggaggaagcggaggggttattcttgctgtctctgggtggcagaggcagaagaggcggaggaagtaaaagggaaggcaggagaggcagacacactcagtgtagcttgtactggaaaaaacctgtgtataagtgaacctgtgcagttcaaatccgtcttgttcaagggtcaactctctataacgtctacaaatgtcctaccctgcgccaggctgcctctgccccaatctttattccatcttctgccccatctctgactctcttctcacctttacagttttctagagtccttgttcctttcctagcacgcacccagactttatgttatgagaatccctgtccaaagccactgagagcagtctctttgcctccgtatcttcattagtaaaacatgggtatcagcagtgcccacctcacagcgttgatgtgaggatgaagcgacatgactgataatgagtttacactgcccggtatgcggtgattcctcaataaattgcaggatgtgttttttcttttcttttaatatgggggtaggggctgcccagtctcactgcagacagctaaaggaatcgcagcaccaggcgcgatggctcacgcctgtaatcccaacactttgggaggccgaggcgggtgcatcacgaggtcaggagttttgagaccaacctggcaacatggtgaaaacccatctctactaaaaatacaaaaattagccggacctggtggcgagcgcctgtagccccagctactcaggaggctgaagcaagagaatcgcttgaacccgggaggcagaggttgtagtgagccgagaccgcgccaatgcactccagcctgggcgacagagcgagactccatctaaaaaaaaaaaaaaaaaaaaaaaaaggaatcccagcaatccaaggcggaattctagaaatagtttcccgtagaaacaccgttctacactgcagtcttattctatcccactattattactcccaaagattctaaggtcccagtgctttcgcttcatcctagaggctaaatgggctcccctggactcgcctggcagaactaaccacctagaagaacgttattgtaagggggaaatgtgagtgctacataagtttcttataaatgtgcttttgaaatagagtccactcttaagtttgatatttcctaaaatttaatgtgtgaaggaagatgcttgggagacaatc

SEQ ID NO: 9036 - DNA, 2300 bp, Homo sapien
cataggcagagcagtggcatgggctgtttgattgagtatacgggtattccttgatcatatgctaaacaaaaagtgaattattcgtgagttttctgggaaaaaggtggggagttcccagaactgagggttttcccatttcagacaatatagggtaacttccagacattgccataacatttgtaaactgacatggggctggtaggagcgagtgtcttttagcacaacagtgcattatcattggcatataatgagctgtgaggacgaccggaggttgctttcatcgcatcttggttttgatagatttgggctgctgctttactacatgtcattttatcagtggtgtctttgtgacctgtaccttgcaaaccagtcctgaagaactcttgtctcatcactgtgttgtccaggctggtcttcaagtgatcctcctggcttcagagtgatcctctcacctcagcatcccaaaatgctgggcttgcaggcttgagacactgagccagaccctgtttattcttgaattgtttccagtgaatatatctcatcgtctccccccaaaaaaaggttgcaagtttttggccaggcgcggtggctcacgcctgtaatcccagcactttgggaggtggaggcgggcagatcgggaggtcaggagatcgaggccatcctggctaacacggtgaaaccccgtctctactaaaaatacaaaaaaaaaaaaaaattatccaggcttggtggcgggcgcctgtagtcccagctacttgggaggctgaggcaggagaatggcgtgaacccaggaggtggagcttgcagtgagccaagatcgcaccactgcactccagcctgggcgacagagcaagactccgtctcaaaaaaaaaaaaaaaaaggtggcaagtttttataaaaagagaaaaatcattcttagtatttctttaataccctctacattgacctcactggtgcaaaaaatattagtttgctggtgaaaattcacctcgagttactaaatatctaactttcccataactaccatctgtttgtctcttgtggatctgtttgcctaatatttaaatgacccattcttccccacttttacgaaaatagcattaattcccctttcactattcacacttccttcatcgtcacagtttgaccagcggtccagggtttatgatctcaagcatggccatatatatctatttcacttaagactctggaaagagcataaaatcagatgtaactgtttcctatttcatataatagggaattccatctctaaagttatgacatttggcctttcagtgggtttttgtggtttttactatggctgtgcttagattcctttttgaacacttttccagtggttccacttgaacacaatctttgagtcacataggagaggtgacatgatagagtgtaaagccagaaagagcacgatttggatctcagctcaactgatagggatccgtagcaagatacttcacctctctgagcctcagtttcctcatctgtgcaatgggaatcgtaacgcctgcctctcaatgttgttaagattaaatatgttggccgggcgcagtggcttacgcctgtaatcccagcactttgggaggccgaggagggcagaccacctgaggccaggagttcgagaccaacatggtgaaacccctgtctctactaaaaatacaaaaattagccaggcgtgctggtgcaagcctgtaatcccagaaactcaggaggctgagatatgagaatcgcttgaacccaggaggcggaggttgcagtgcgccaagatcgcaccactgcactccagcctgggcaacagagtgaaactctgtctcaaaaaaaaaaaaaagattaaatatgtgtacagtacctgtaccatgttaggcggtcagtaaacatttgtttaactaacaactgataaggatagtaaagaagtatcagaacacccacctagttatcccaaagggcaggaagagtgctaggtaatggatatagaattccttttagagtcaaattacacgggcaaagatcagcccctccttcaattaaaaagccaggggcagggcgtaataaggaagtggttctccttctttaagcctcttttcaggctgagtcctaaacctgaagaaagtttagagcctggggctctaaactacctgagtctttccaaacgacaagccaagaagacctgttgaaagtttcctcttaagtttcgtggagagagactcaggtatagaaatatccttactgccacctgacctgaagcagaagaaatcacagacagcttccagaccaggtaaca

SEQ ID NO: 9037 - DNA, 2300 bp, Homo sapien
ccagtgaatatatctcatcgtctccccccaaaaaaaggttgcaagtttttggccaggcgcggtggctcacgcctgtaatcccagcactttgggaggtggaggcgggcagatcgggaggtcaggagatcgaggccatcctggctaacacggtgaaaccccgtctctactaaaaatacaaaaaaaaaaaaaaattatccaggcttggtggcgggcgcctgtagtcccagctacttgggaggctgaggcaggagaatggcgtgaacccaggaggtggagcttgcagtgagccaagatcgcaccactgcactccagcctgggcgacagagcaagactccgtctcaaaaaaaaaaaaaaaaaggtggcaagtttttataaaaagagaaaaatcattcttagtatttctttaataccctctacattgacctcactggtgcaaaaaatattagtttgctggtgaaaattcacctcgagttactaaatatctaactttcccataactaccatctgtttgtctcttgtggatctgtttgcctaatatttaaatgacccattcttccccacttttacgaaaatagcattaattcccctttcactattcacacttccttcatcgtcacagtttgaccagcggtccagggtttatgatctcaagcatggccatatatatctatttcacttaagactctggaaagagcataaaatcagatgtaactgtttcctatttcatataatagggaattccatctctaaagttatgacatttggcctttcagtgggtttttgtggtttttactatggctgtgcttagattcctttttgaacacttttccagtggttccacttgaacacaatctttgagtcacataggagaggtgacatgatagagtgtaaagccagaaagagcacgatttggatctcagctcaactgatagggatccgtagcaagatacttcacctctctgagcctcagtttcctcatctgtgcaatgggaatcgtaacgcctgcctctcaatgttgttaagattaaatatgttggccgggcgcagtggcttacgcctgtaatcccagcactttgggaggccgaggagggcagaccacctgaggccaggagttcgagaccaacatggtgaaacccctgtctctactaaaaatacaaaaattagccaggcgtgctggtgcaagcctgtaatcccagaaactcaggaggctgagatatgagaatcgcttgaacccaggaggcggaggttgcagtgcgccaagatcgcaccactgcactccagcctgggcaacagagtgaaactctgtctcaaaaaaaaaaaaaagattaaatatgtgtacagtacctgtaccatgttaggcggtcagtaaacatttgtttaactaacaactgataaggatagtaaagaagtatcagaacacccacctagttatcccaaagggcaggaagagtgctaggtaatggatatagaattccttttagagtcaaattacacgggcaaagatcagcccctccttcaattaaaaagccaggggcagggcgtaataaggaagtggttctccttctttaagcctcttttcaggctgagtcctaaacctgaagaaagtttagagcctggggctctaaactacctgagtctttccaaacgacaagccaagaagacctgttgaaagtttcctcttaagtttcgtggagagagactcaggtatagaaatatccttactgccacctgacctgaagcagaagaaatcacagacagcttccagaccaggtaacaccaggaggcaccagtcttcatcctcagcctttgcaggaggacacagcctggtctttagctgtttgccaaatgaggcagtctaattcagggagctctttactgggtttattacaaagttcttatcatgtaagtctcaggacacaaaatgacattgagaatctagtttagcggggtttccaggaaagacgaagaaaggttatttaggtttctctttcatttctcttttgctacaaagggtttgggacattcagttaagaacacattactggttgaggtatgtgacgttactcagtcttctctgcttatgtatctggggaggtatgcaatgacatgacagccattccgtggccagggacaccactgcccaagctggagaccacgaggattcagggactgaagccagcatgggaattcctggtttgagatcagagtcctgagtacctcgtgggaacttgggcactcatccgcaggaggtctagacccccagagaattccttgagtctaaggcacaggtaaatggaaga

SEQ ID NO: 9038 - DNA, 2300 bp, Homo sapien
ttaaattaggaccagaaagggaagggaacattattaagagccatattaagacagagcctgaggccgggcatggtagctcatggctgtaatctcagcactttgggaggctgaggcaggtggatcacttgagcccaggagtttcgcaccagactgggcaacatagcgagaccttgtctctaaaagacaaaacaaaaaaattagccaggtgtggtggcatgtgcctgtgttcccagctacttgaggggctgaggtgagagaatcccttgagccggggaggttgaggctgtggtgagctatgatctgcactccagcctgggcaacagagcaaaactgagtctcaaaaaaaaaaaaaaaaagagagcctggggcctaggacaacagctgaactagaaaaaaaacatagctaccacttttgaaccaggttctgtgcaggaacttctcttgtgtatcttacacccttacaatatccctgcaagatgactattattatttacaatttgcctgcaggaagttcatgtttggagagatggagtaacctgccacaggtcacaaaactagtcactggcatggccacaatctgaatttgggactgttagactgagaagcccaagctaattcttgatacgctcactgcctgggacatttcacacggtagatctgagctttctcgcatctgagactaaaaggaaaatgtagtccttaacagacagcagaaggaaacagattattagcaaaaagaactgctttcctagcaggaaaccagagaaggagttatttcatgtaagctcaagcaaaggaaattgaacaaaatcagttctttatctatcctgttattcgtatggaaataaagaagaaatgcttgcatcctgttgttttagtgcttgtactgatctttttcaaacatgcctgtgatcacatcactctctactcaaaactttgaacagctctccattgcctccatcagtgtgtttcaaattcgtaaaaagtaaaataaaataacaggatgcttttttcagatgaaatcttacatggcataccaaatatagcaagaaaaaagaaagagagagagagaggagagagaagccgggacaagctaaagcagagggtagagggagaaggaaccgaggaagggaagggtcaggtcccaggcatttctcttccctgaattggcctccctcttttgccacctccccagcaagacctttaactccacagtccacagctcattttgaaatgtactgatcaacgtgagaaaatgcgaagcttcagcctgatagtcaaagaccaccataatctggacccaagtgctagttcacttattttccctccactattttcaagccctggctatttgcaaactgcatacgtatgctgtcccagttctctcaccactcttcaaacacattctgaattcacctataatctcccctctgcccgccctgttgtagccccaatatccacccacctgtctaactccttctagctttccaaaagctttcacttgcctctttctttgaagctcacctatccctgccttctaacctggctatctgcatctctgttagacctcttacttagttcattagttcattctctctctgttgttttttgttttttgagacggagtctcactctgtcgccaggctggagtgcagtggcgcaatctcagctcactacaacccccgactcctgggttcaagcgattcttctgccgcagcctcccaagtagccgggtctacaggcgtgcgccaccatgcctggctaatttttgtatctttagtagagacgggctttcactgtataggccaggctggtcttgaactcctgacctcatgatctgcccgccttggcctcccaaagttttgggattacaggcgtgagccaccgcacccggcagttcattttctttatgtggagttatctatggccatgtctctcttcccaccctagtaagactgtggcttttccctctctaccctccagcacaaacacaatagatgttcaataaatgtttcctgagttttcacccctgtctctcctaacctgcaaagggtaagtggccctgcatagaagggcacagtgtggactttgttgttacaggcccaacatgtgtagcaccagtgggtgtgacctggaagaaatccccctagatgatgatgacctaaacaccatagaattcaaaatcctcgcctactacaccagacatcatgtcttcaagagcacccctgctctcttctcaccaaagctgctgagaacaagaagtttgtcccagaggggcctggggaattgttcagcaaatg

SEQ ID NO: 9039 - DNA, 2300 bp, Homo sapien
taggttgatcctttctgtctagaagtctacaccttaaattctggaatgttttcttgtgttgtttctttgataatttatttttcattttcctattttggagctttttatttttatgctgaaccttcttgactgtagctgtatttttctcacctattatccatctctttgtgtttttgttatactttctgaggagagcttctcaaatttgtctcccaaccctcttgttgcatttttctttgaaatttttggatatcatgtttttaatttccaagggctcttttttgttctccaaatgctctgcccctctgaagacagcctattctttaggttttttgttttttttttaattggtatttatttgttttcttctgcttttgtgtctttttctccaagttcctttgttgtgtttgtcttgggcttcaaatttaaagatagaggttttctttaaatatttggtgatccttagctgtttgtatttagtatgaggcttaaaaatactgagaacattgctgtgtaatttcttacacatattttcaattagtactcctctttcagccccagccacataactcctacctttgttccattctaaaatacctggtgcttccactttctgagctaattaatttcattgttagcttcactggctgtaggcctttagctttctctgggctactgtgtcattatccctggtctatctattctccagcttccaaaatttatatcactttcctgctctcttctgttcttctgccttctttgtccttatgggtttataccttcaaaattattttctttttctttctttcttttttttttcctgagacagggtctcactctgtcacccaggctgcagtgcagtgtgaacttggctcactacagccttgacctccctggctcaaggaattctcccatctcagcctcctgagtacctggactacaggcgcatgccaccatgcctggctaatttttatattttttgtagagatggcattttgccatgttgcccaggctgatgtcgaactcctaggctcacgtgatcctcctgcctcagcctcccagattactgagattacaggtgtgtgccactgcacccggcctaaaattttttcaatcaccatattagtagagttttaggagagaatatataagtaaacttgtgcttagcctaccatctgaatgttgactcaggcaatgccttcccatctggaatatctccccacttttcttcatttattaaaaagttggcattttgcttgcctctttcctgaaactttccttgatacttccaaaatatcagctaatgtctttgtttgactgaactcatgacttaggaaccgtgaactttctataaatatttgaaggactgttatgaaaaagaaggaatgagtatattttttctttttgagtgagggagaaactgaataaagcagggtggggggtatgaacacagattttagcccactgtataaaagaactttctcactgtgcaacaatagcagaagttgcctcctcagagtctggatgactctatgtctgagatgattagaaataattcttaccttggggtgagtcagtcattttttctaattgtgttctgagaagccaggtggggtgagagtgaagctgttcttcataaatgcctcaggtatactcagaactctgggtccaccaccactgctcctccagagaagtgccatttttatctgttgtatatataagttagggtttttcaaactactgttctaagttcttttctacatttctatgaactagaatatttactgcacattgggcacttacttgctcttgattgcatattaatatctagtttattggctgttttctagtgtatgtcttaccatgatttttaagttttgtggtagagatcttgttttttttttcttttctctacctgtagaatctaactggtagtcagtaaataattaccaaaagtataacttgacccacatgagtcatttctgttgaattttctccttttccaaggtgctaaccggatagtattagaagactccaatatcttgcagcctgtgggacttactgtgtttgaaaactggctctattggattgataaacagcagcaaatgattgaaaaaattgacatgacaggtcgagagggtagaaccaaagtccaagctcgaattgcccagcttagtgacattcatgcagtaaaggagctgaaccttcaagaatacagtaagtgttaatgggataaagctaattggaggaatcatgtgttataataaattaatatgtacttttgtggatttttaaactct

SEQ ID NO: 9040 - DNA, 2300 bp, Homo sapien
ataattattagctaattttactcttgtcgtaattaactttaggtgaagaaagaggggaatgggttaataaatgttactgatgagtatactgatatgttaagtatatataccaagaggtattatccatctgtagttgcttgcactccttcccagttatactagattccaagcctattgaagtaaacccaccgaaacaatgttgtgagctaagaaaaaactacatttaaaaagctttattttggagtatttattaattcaaaatggatagtttggtttgatcattattataaactggcagtagctttgttattacaagatagaataaactgttcacaacatgatgtttttcaagggcgagtgttcctttttacaagagtcagcaaattttttaaagccggcagctaagaaatctgaaatctaaagaaaaattccacttataaaagaagtcaacaggccgggcgtggtggctcacgcttgtaatcccagcaactttgggaggccgaggcgtgggcagatcacaaggtcaggagttcgagaccagcctggccaacatggtgaaaccccgtaactactaaagataaaaaaaaattagccaggcatggtggcatgtgtctgtagtcccagctactctggaggctaaagcaggaaaattgtttgaatctgggaggtggaggttgcagtgagccgagatcgtgccactgcactccaccctgggcaacagagcaagactccatcttggaaaaaaaaaaagaagtaaacagtgtgaacatataaatatgtttactgtatttgctacttaaaataatttccctgaagtgacattgattccatgattagctagtaattcatctagtcagcactgacatattgtggtgatctttgctctaaacattagctgccagacagataaatttaatagttgggactaattggttgctgctggcaagtatgaaatttctctcacagttgtttctctttggctcttgtggtgtgcacatgcctgtcaaatgacaagtgcaaatgcatataaaggcaggacaccttcagttttcagaaaagcatgttcatacattgctaccaagtcagctatcagctgacaggctgatgagtgaatatatgtcctcaggtatttcgtgagagctggcatgtgatgtgcttttttagttccagtattcaagagtctcaaaaactagcacctcactagtttacttgaaagggcatttggccaaggattaggttctagttctagctctgtcatctaactggcttgaagacattagataagttgttcacatttcttgtagtgttttgggctcttcatctataaaaagcctatactgtaggattactgtaagattaaagtgcaaaactcaaaaatggaaaataacagcaaagtaattattctaaaatttcacagagattgttgtagcgtagtgtagtgttcattgcccagtggacacatcaaggggtgagtcgttgttcttaccatatagtatgctcccttggaccatatgaccaaatacattttcaagctttgcttttgacttcagttaaaggcttagtatttataattacctttcatgtacttctgcaacttattttgaggaagagttgattacacaagtcaaaaagtaagttcagcatattaaaaactcaaattagttaatattcaaaagtatataaaaatattttactcagaagtgaaccagattctgagaccagagctttaaacctttgctgttttcttgaatgttaattttacaaatgccagtactgcaataaactgttggtttatttccaattcctaggtttggatggaacaaatgtattggaaagactaaggaaagctgactcacttcctttttgggatatggaaaaaaatatttagtttagggtgccaaaataattgaaagcattgtagccgtgattttgtttaacccatttccttgatttgctgtatgttttctttaaatttatttagttactttgcatgaatatgactctttcccccagataataaaaaattgaaatgttaaatatttattattttgaatttagatttatgtattggactgaatggggtggaaaacctaagatagacagagctgcaatggatggaagtgaacgtactaccttagttccaaatgtggggcgggcaaacggcctaactattgattatgctaaaaggaggctttattggacagacctggacaccaacttaatagaatcttcaaatatgcttggtaagctttactactttttactcaaacagtatattctttccatgcaaatatcagtgg

SEQ ID NO: 9041 - DNA, 2300 bp, Homo sapien
ttgtataatacaattatacagaagaggaattcaaaattatctttgttttgcaaataggaccatgtgaacataccataaaggcccctccccagacattggaaggggcctgtgaaagtgaaggttaactttcttttctttttttttttttttctgagacgcaatcttgctctgttgcccaggctggagtgtaatgacgcgatatcggctcactgcaacctgcgcctcctggattcaagccattctcctgcctctgcctcctgagcagctgggatgacaggcgtgtgccaccatgcccggctaattttttttgtatttttagtagagacgggggtttcaccatgttggaccaggctggtctcgaactcctgacctcgtgatctgtccgcctcggcctcccaaagtgctgggattacaggcctgagccacccgcccccggcccagtttcctgctttgaggaagccagaatacaaaactcacttggttcttagaagcaggtcatttaaataaacggtgactagacctcaggtgaatttgggagaaagtgatttggctgtttctgctgtccatctacttacaaacctgcagcacctttggttcagcgcgcatttcttggaaggagcggagtggcttaagtcagagacctggattgggctgaggtactgctattcattacttgagtggccctgggtaagtcattaacctctcaggttctcattttgctcctctgtgcaataaagaataagtaacaaaacctgcctttccccagggtagttttgagtgtcaaatatgataacttgtgttcaagcactagtgaactccaatgtcactgaggtacttgttaacattgtggtagcagctccactttcttgcccatctgcctccaggtaagggcgtgtgacagctgggcaggatgcatctgatggctccattagggttaactgttggagcgcctctgcccagacgaaagcctggcaggtgatttcagggggcgtctgggccattactcctgaatgcccaatgcactgggagtagcagaggctgtgcacagtctgagattctagggaatcttttccttctcaagctgagaattgataatcgaagcatgccaaacattcgttattatatgcaacttgtaaaatcctaaatagtcttgtccaattgtccctttgctcttaggttttgaggcatttatcttggaattttatctgccagtttagaaatctttagctggtcgggcttaattctgggggcagtttgtatttctgggaaggcgggagaaaaatgacaatctcagttttgaattggcgttttaatatcgttcaccagatccacgctgaaagccggtgtaaacagcgttcaaaaattccgccctcccaaaaaaaggatgctgaaaccgatttccaaccccgaagacggagctcatcaccccgcaacgggatccgccgtggctccccgcgcgtgcaccgcggctgggcagtctcaggtggctgggggcgcgagaccggagccccacctggccctgccggcggcggccgcacaaagagcggggcagacggctgcccggccgagccgcagaaagtagtcccgaccacgccggctccaatgttgttcaacgccgcctcacgccctccgcggggagggccgaagcggccggtccgggaaagaatcccgctggaatgcgccaccgggaggaggctttccctcccagttcgcctctgctagcccagaacctctcccagggtctcaggcagaggctgtgcgtgcggttgccgactcccttccctggccgtacaggaggcagtaccgggagaaggggctcgttgcgcgcagggacacggtcgcggcgaccctaggaggcggtgccgaccgtatccctgcgccgctgcgcgaggcagaggctgaatgaggagctgcgcgggggaagcggggcgccgggggaggaggcggcgggatggaagcagacgctggcgtcgcgcgagcccggggccgagcggcgcggtagagagggcggcggcggcgcgcgcggaaccttgacgtgcccctttctttcttctctcgctgggaagctgggaagtatgagcgtgcagccctgccgctgcggcggccgccccggctcctcgcctcccccacttctggccacccctcgccggtgagagaagagaacgcgagaagggaagatgggggccgtcctgaggagcctcctggcctgcagcttctgtgtgctcctgagaggtgggaagagtgggggcactggaaagttggtggggttcggggggaggtggccttgttgtatgtgtcta

SEQ ID NO: 9042 - DNA, 2300 bp, Homo sapien
cctgtaatctcagctactcaggagactgaagcaggagaattgcttgaacctgggaggcagaagttgcagtgagctgagatcgtgccactgcactccagcctgggcaacagagcgagactccatctcaaaattaaaaaaaaaaaaaaaattaagaacattagctgggtgtggtgtgcgtttgtggtcccagctactcaagagactgaggcaaaagaatcacttgagcccaggtggtcaaagctgcagtgagtcgtgattgtgccattgcactccagtgtgggcaacagagcgagaccctgtctaaaaaaatgaataaataaacaatgatatttataaattaaacatatataatagaaaatatttctttaatcattattttaatcaatatcctttgttcactgtcataactgaaaaaataacatatcacttcaatgaaaacaggttcaggccgggcacagtggctcacgcctgtaatcctagcactttgggacgccgaggcgggcggattgcctgagctcaggagttcgagaccagcctgggcaacacggtgaaaccccatctctactaaaatagaaaaaaattagctgggcgtggcggcatgtgcctgtagtcccagctactcaggagtctgaggcaaaagaattgctataacccgggaggtggaggttgcagtgagccgagatcacaccactgcactccagcctgggcaacacagcgagactccgtctctaaaaacaaacaaaacacaaaacaaaacaaaaaaagaaacaggttcattgtattaaagcaccgaatacgaagtttctaataatggaaaggtctactttgtaactagcatggattaccccatgtagagagattcaaaaactgtgatagctctacaccctgaaccctgaagtgtatcagatgataaaagataaaacacacttgcagatcagtcccttgttgcatcaggaaaatcactgcaatgggaaattactctggtgtttacttttctttggtaactctttcaaacctagctttagcaacattgtaattcaagagtcatcctttggttacaagtagagttagtttcacacaatggacctttgttcacaagcattctcagtcaacctaatcctcctgtagttattggttaagactagggtgtgtagctgttggccgtacaggcctagacttaacttgcaattgcatagcgcttcaggtctgcaagctctttcaaaacagaggtgaagatactgtcaaaggttagaccatatggcaaactaagtgtcaatggtttagtaacgttgcatttgtgtgtgtgtttatggaggtggggatggggccagcagtaatttagaaacttccacaacctatgccctatgcagttcttttccattcattcagtcaacaaaaatattttagttaaatatttactgagcacctattgtgtaccaggcactatgctaagtgttagggatacagttttaatatatgttacagacaccagcattttcaccattattatcctatctacaaacaataaatcccgcagaaagccaaataccttccctgaagtttgtcttgcagataatatttaactcaagaattgccatctttaattgaggactccatcctccaattatggaaagaggattctcagaactatgcccccaataggatgcactataagcccttgaacatcaaaaaactgctctcagtggttgcctctgaggagggagactaggagactggggcacgggggtgaggggtagacttgtctctgtgtctatttttgtactgtttgacattttccccatgtgcatttattttaacttgcgcgggccgcgaggcaaggctcacctgcagaccctcgggccaccagcagggaggcacgcactccccctcgcagcgcgcccagcccggggtcagcggtgtggctgagctgggggggagcgcggggcggtggggggagccacctccctgcggggctcagcgctggggccgggagcccggagcctccgcggggagggacgcgctaatgttgccgggaagcagctccgggttgcagggcaggaacgtgcccttcccccgcggcaaacttgccgtcgctgcgacggaagcaggaacttgctaaccacaaaacccgccaggccggtgcgggagctgcggagcatccgctgcggtcctcgccgagacccccgcgcggattcgccggtccttcccgcgggcgcgacagagctgtcctcgcacctggatggcagcaggggcgccggggtcctctcgacgccaggtaaaggggtctccccaatacccac

SEQ ID NO: 9043 - DNA, 2300 bp, Homo sapien
cactgcaagctccgccttctgggttcaagcgattctcctgcctcagcctcctgagtagctggaaatacaggcgcccgccaccacgcccggctaattttttttgtatttttagtagagacaggatttcagtttgtcagccaggatggtctcaatctcctgaccccgtgatccgcccgcctcggcctcccaaagtgctgggattacaggcgtgagccaccgcacccggcctgacaggcctttttcatattgaataatgttgtcaaggttactctatgttgtagcatgtatcagtatgatttcatccttccctcattttggctgaataaatattccatgattaccacactttatttatccattcatcagttgatgcgacagactatccttttaagaatgaaatgtttattcaaaaggaagcataaaaaacaccatcacatcagtatggactggtgtatggaacacaagacaaatatacttttatgtggaaaaggggaaacaagaaccagaatgagttattctccattcctcaccccttttacctcctctctcaccttcccctcaaagaggaaatctgggaggggatgcaaggactctccaaaagggaatggtctcactgcttagtgggcccttcccagtcccatcagcctggtgtggtttatgtaaacctcaagactagttagacacaactttctagaagcctgccctgatctctcaggcagtttttagttctatcttcatattcccagagaacactgtacttagattcatttgcatttttctcattgtattgcaatggtgagcagaggaaagagcatcagatagtcctaaatagttcgaccactgaccacctgctgaccatggaggagtcacctacttacaggctgcagggttgttgtgaaaattaaataaggtaaaataggggaaattattgtgatatagtagagtggaagggacttaaaaatcatttagtcaacttgacacttcttctgagacttttttttttttttttttttttgagacggagtctcgctctgtcgcccaggctggagtgcagtggcgcgatctcggctcactgcaagctctgcctcccgggttcacaccattctcctgtctcagcctcccgagtagctgggactacaggcgcccaccatcatgcccggctaattttttgtattttttagtagagacggggtttcaccatgttagccaggatggtcttgatctcctgacatcgtgatctactcgcctcagcctcccaaagtgctgggattacaggcgtgagccaccccgcctggccagagactacattttatacatataaaatctcaaggcatttacttgaaatttcttgacgcagacaatgtaatataaaatgagttgcaaagttcggagaacgctagagccagctaactccttgatggcattgcattgctaggtctactttcttgccctagcaaaaatggcagtttcctttctggattactccctcctcaccttctgttagtttcagagtgacttgttgataactgccaaggtccccagaaagcgcctagccaaaaaggttcttcacttctctttaaagatgtgcactccctaatacatgaaacagcattttctatttcttaatttttctctcatttccagctgctgctttcaccgtcttctggtatttttttgtttggtcgtccactgctaaactcccagctcttcagaattcaaaatgagctttgcatccaagctgttgtgggttcgaatcctgggtctatctagcgtttctttctccatctgtaaaacagggttaaaaatacctattttgtaaagttgttctcacatgtgggtattgaagagcttaatagtgtgggtggtgttttaaaggtgacgcatccttacaacaggaaagggcttaccctcttccgcagttctggcttcgaggaggtcaagccctttaaggtggcatcgccctaagtcgcaggagcgggtctctccgcccctccctcgggccggggggcggggcctcctaatccggaactgaaggtcttgcgtagccggcaccgcccatctgcgtcccggaaggagcgagcttgcggagcgtgaaccagtgagtgaaagcggcgccgcccgccggccgcaggtgcggcaaagccagtgtcatctgccggttctcttagggctcccggaaagaaggagggctagccgcgtgcgttcgcgccgcgcctccttgcgtttctgttccccaaatagggcctctccttctcccgccgcccaggcccctgcgtgggctggacgcgtcagccccacac

SEQ ID NO: 9044 - DNA, 2300 bp, Homo sapien
attcaggttccttgggagaaagtaatccatttggagggaagtgattcaaattataaaggactccctagaccaagaaatcatcctctcccccaaatatcttccagactgggacaagaatgaatctttaaagtgttttatgctctagaaggtaatattcccaggctcattatagtcatatctcaaaggttaatccagggatgccatagaactgttctgcctcctagaagctcgtctccggaggcttggcattcactcttctagaaaaatctctgctgcttttatttcttttcaagaaatatttatttacctgttttggtaatttacctaacattttacaaaagccatgccagaaatctttcctgctataaattgtgattcctccttccccagataccagaggaaaggggacttcaaaacactctagctaacctctactactttatctgtaaaatgggattactgcaaaaattatatgtaaatgtatgtaaagtaccgggcacaggggaataggcaaattctaacatcggaaatgctcgaatgctgttggttcatgggcaagaaaacaaattaaaaagatgccacaccgcttccccctaaaatatgtttctgccctgccatagaggcaagaatgtcaaaggtggcaattattatatttcttataacagatatgacactctggcccttccaaggaaatagaaaaacgtagcaaagctagtagatgctgctcaccattcaaagctgccccaatccagtccccagaatgtaggtctgaactagtcttgaaagtcacaccttaaagtgaaacacccttagatctattagcttgcctatttctgaattacagctcctatcaagaacagagaacttctaaaatcggcgactctttttaggccccagatttaaccaatttgcgttagcaaccccggagcttaaccaaagcactcccagctgtcctagcgtgtgggtaacaaaaaaagcagcaaatggtcctcaattaaacatcagctgctttatctatttattgaacactcactgtattgcaaacacaataatcctcccattcttgtctcaaacgcttagagaagtctaaaaatcatggacagagaacaacaatggaaaacaccagtgcctgctgtctggccaacctctacaagattagaaaacggaccaagacaccttctgagaagaaaaagctgtttctggagacctttgcactaaagggttcaaagcaagtggacacctatcacatatcccttcagaaaaggaacctctaacacccgtttttaagaaacagactgttcttagaggtcctataatccatccactgtgtgagccaaatctcactacatcagccatgagcactagagccaaaaattaattagctcgtcttttaaacaggaggctgtagctgggagaaacggctgttttgaaaataaataagggcactggcgcccacgctggcttagcttgcagtcacacgcacttccatcaggggaatcgaggccaggacagatggtgactttttttttttcctactagcacggtgaaggctttttctgtgcgttcccgtccgcagtccctgaccctagtctgggaggcagcccgctctgcaaggggacagggcgggctggaggagggtgggaggttaggacaccgacctgaggagttcagatcgttgggtcggctctcggcctcggagctctgctcactgcccatggtgccgacagcggtggcagcagaagaacggcgggccgggcggtcaccgctccggcggcgggcgacagggcaggggccagggaccgggacggggaggcaaagcagagtctgggcgccgcagcgaggctaatgtgtggggctgacgcgtccagcccacgcaggggcctgggcggcgggagaaggagaggccctatttggggaacagaaacgcaaggaggcgcggcgcgaacgcacgcggctagccctccttctttccgggagccctaagagaaccggcagatgacactggctttgccgcacctgcggccggcgggcggcgccgctttcactcactggttcacgctccgcaagctcgctccttccgggacgcagatgggcggtgccggctacgcaagaccttcagttccggattaggaggccccgccccccggcccgagggaggggcggagagacccgctcctgcgacttagggcgatgccaccttaaagggcttgacctcctcgaagccagaactgcggaagagggtaagccctttcctgttgtaaggatgcgtcacctttaaaacaccacccacactattaagc

SEQ ID NO: 9045 - DNA, 2300 bp, Homo sapien
tgcatattgctgtctctgcaaataaagtacaacaatatgactgacttgtaaatatcttccaggacaatgctgtgattttccagttgattctgcaactttaaagatataaccaagtataattaggccgttcaaggatgaatgggtcccacagaagctagaaatagtttacttcctgcttccatttctagatgcagaagactaatattcacagaaaaattacgtagacaaattttgtttactagatctaaaacattcctgcttctcagaaaaacaaaaccaaaggagtatttaagataaagtaacagtgaacgtgttgagactaaaaagtttccatcaactagtcccatatgcaccctctacccttcacataatctctttggacactcggctccaattttgtcttatttttcttcacatctcaatctacaccttcctaatatgtccggaattggtggattcttggtttcactgacttcaagaatgaagtcgcggaccctcacagtgagtgttacagttcttaaaggcagcgtgtccggagtttgttccttctgatgttcggatgtgtttggagtttcttccttctggtgggttcgtggtgtcgctggctcaggagtgaagctgcagaccttcgcggtgagtgttacagctcttaaggcagcgcgtccagagttgttcattcctcccagtgggctcgtggtctcgctggcttcaggagtaaagctgcagacctttgcggtgagtgttacagctcataaaagcagtgtggacccaaagagtgagcagtagcaagatttattgcaaagagcgaaagaacaaagcttccacagtgtggaaggggacccgagcgggttgccaccgctggctcgggcagcctgcttttattctcttatctggccccacccacatcctgctgattggtagagccgagtggtctgttttgacagggcactgatttgtgtgtttacaatccctgagctagacacaaatgttctccaaggccccaccagagtagctagatacagagggttgattggtgcattcacgaaccttgagctagacacagggtgctgattggtgtgtttacaaaccttgagctagatacagagtgccgattggtgtatttacaatccctgagctagacataaaggttctccaagtccccaccagactcaggagcccagctggcttcacccagtggatcctgcaccagagctgcaggtggagctacctgccagtcccacgccctgtgcccacactcctcagcccttggctggttgatgggactgggcgctgtggagcagggggcggcgctcggggaggctcaggccgcacaggagcccacggagttcggggaggctcaggcatggcgggctgcaggtcctgagccctgccctgtgggaaggcagctaaggccctgtgagaaattgagcacagcagctgctggcccgggtgctaaaagcccctcactgctcgggcggtggggccagctggctgctccgagcgcagggtccgctgagcccacgcccacctggaactcgcactggcctgcaagcaccgtgcgcagccccggttcccgcccatgcctctccctccacacctctccctccacacctcccggcaagctgagggagccggctccgccttggccagccgagaaaggggctcccacagtgcagcggcgggctgaagggctcctcaagtgccgccaaagtggaagcccaggcagaggaggtgctgagagtgagtgaggggtgtgagggctgccagtgcgctgtcacctctcactaatttccccttagtttattttttgtttaaaatggagtttcgctcttgttgcccaggctggagtgcaatggcgaaatcttggctcactgtaacctccacctcctaggttcaagcaattctcgtgcctcagcctcccaagtagctgggatgacaggcacccacacctggctaatttttgtatttttagtagagaagggatttcaccaggtaggcccggttggtctcaaactcctgacctcaggtaatccacctgccttggcctcccaaagtgctgggattacaagcgtgagccaccgcccccagcctcccctcttagtttaattcctggtctaattgtagttgtcacatccaaaccagtcctccaacaatagcctgctgaggctggtcatgaaggggctccgagcactgtcagcaactggcctgaacttcaggctctcccaagatctgcatcttctcattggaagcctctcactgaaacaactgttcctcctgttaccctctatctctggaggctg

SEQ ID NO: 9046 - DNA, 2300 bp, Homo sapien
atggagctggtttgtaaaatatggtgtggttgagacagtatctcaggtgccttctaactccctgtgtgtcagcctctgtgagaaagggcacagtttggttgcagctgtactataggaggatggaattacatctgtttttatctgtgagtgatgtctttcagatgccagatgcaagccagctttgtttgccattggcatctgtagggtatttttcctcctgtctatgatgcatagttgcttttttatttaccagctttcaataaattagataattttgttctcagaccaaatttgaagagatgaggccactataatgtctccattttgtaggtgaagaaactgtggtttagagaggttatgtgatttgtccaaggttgcataagtaaatggcaaagctacatctctttatatcatgctccaccttctgtctccatgctttagcttctaatttgtaagtacaaaattaggaaacatgatctaaaggtttttaaaggctctgacatcctgacctgaaatcagctaatcaaatatttatttagaatcttaaactgtttttggaacaaggaagaatttacctactataataatatattgagtatgttatgtccaaagtactgtagaagtaagaaatataataaacttttgcaatcaaatatttaccctctaggctgggtgcggtggctcatacctgtagtcccagcactttgggaggctgagacaggtggattgcttgagcccaggagtttgagaccagcctgggcaacatggcgaaaccctgtctctacaaaaagtacaaaaattagctgggtgtggtggtgcgcgcctgtagtcccagcaacttgggaggctgaggcaggagaatcacttgagcctgagaggcaggggttgcagtgagctgagattgtgctactgcactgcagcctgggtgacagagcaagaccctgtctcaaaaaaaaaaaaaatttaccctctagaagttcagtgccagaagtagacatgtagttttatgtagtagaggatttcatataagcagagatggaccaggggagataggaatccgagagtattgaaggtcaaggtgaagtccaagcaataagcgcaaaacttcaactagtgttaattagaaagtgattgattaaaggagtttggcaagaaagggaagcactgggttcagctttaagggctctctatgtctgggttgccaacttagagttccaggttaaggggtgagatttttttaagactaggagttagtgattctctgaagaatgaagcaggaaaaagtgaaggataagcttacagggccttaagcaacttggtggtagggagatggcctccggaaggagacatgacagggccatggctgtgagcttcagcacttcacaggcctagctcagcagctgctgtgacaaacatatcagttgtttttgtccttcctcttccttaaaagatagctgaaatttatagaaactccagttttcctgcatcttctctcctccgtgagggcaattttaaaaggctgctgtttgcgccctggtactcgcgtgagctcacatgtgcacacacatacacacatatacacctacccattcatcgcaggaattctcaagccatttcagaaaatatttttttttttgtcctggtaacacaggattgctaactttgtcctcagctgccattctttgtgggatttcaataaataagcaaataaaatataggaaaactatttggaataataatacttcaagcagctttttgtagcccttttaattcaatactacaggtcatttagttctgagccctaggtgattataattcatgatatgtcttgttttgttttctttgagtttttacattttgaggtaaaatggaattatcactagcacatttttctgaagccataccaatttgtcctttttatttgtttgttcaaatgaagcagtgcatcaagtatggaattagattaatggagtaaatattatgaatcatacactctctctaatctgacactctttcttctttttttgacctcacgttttgttttctgtctttctctctccgcgtaggctttcagtccagtgtaaagctgttggagcgcgggagcaaaggtaaagaatgatgtaatgcgctggctgctccaaagcatcttttgttgtggaatggttattccagtcatctctttatgaatcaaatgtgaggggctgctttgtggacggagtcctttgcaagagcacatcaacgggaaagagaaagagacattcacttggagggctcttgctgaaaatgggtttaactctcct

SEQ ID NO: 9047 - DNA, 2300 bp, Homo sapien
tgtgtaactgaggaaaggggagaaacgtttcaagccatgtcagttaaagcaaggttactggaactttggcatgcaaaggggataccattaattctcatgaatctttcctccaggcaagatccatgctctgtaccactagtaaaaggactatcttcttcttccttcctaaaaatcccaacacctccaacaaaggtctacagttagatttttaggggtttcctggtagagcacaaataatcccaaggaagctgcagtaacacctcctggccaccagaggacagggagcagtgggagagatttgcttcccctagcaaagtcttcaagaggccagaggcacaggctcaaagttgcttctccatctgtggccttcaggctttacctactactgccagaggtgctagggtgcctcccatcttcaaatgggctttttttttccctcctataaaagatgggccagaagttcccagggccataccccgcaacactaaccttcaatgattaccaatcataaggaatgcctttagttgcaggacttaaaggcagaaaagtagtaacaggggtgtattatctttcgaacccacccaaacctgcttatcagttcttttgctagtggaaaaacgtgctttaggcagggtgcacatggatatcccacagcaaacagtgcctttagggtctagtgtcccaatccggcacattgtaaatggaatatttgaagagttagattattcctacacataaattctggctcatggagcagtccactcgcagggtgcttttccgtcattaatcacatctttgttatgtgatatccacgtgagtacttctcagtagaagcagcttcatgctcaaatgctcaaagaacattggaataaagctccgattgtcctattcagtgattccaagtcctggtttgtcaccacctcaggtctctcgttttccaaagtgcataatgtcatctcaaaacagacattttaatgaattcaaataataaaatgcacgaggtatgtggagttaaatcaacaagggttttgtacctctcaagaggcggttaacccctggtcttatttaaagatgtttctgcgctgcctcctgtagaaaacatttttaaagaaaatgtaggctgcttatccttgtatttgtaaatataagcaaagtaaagtaatgtaggaacatttatgtgggggctttcaaccataaacatatagatagctgaatgcctgacaacagtagtgtgatttttcttgaagtacctgtaacttctctcctgagagatggcagagccttgccttttgcattcgccagactttttacagagcgagtgtaattctctcaaatcagtgtttgcgttttttgacgttggtgaggcagctggaaacagctcaaggaggagggaaaggttctgcgtctgggtgagggagaaaaccctccgatacctgttggggcgcagcactggaggcggacaccccggcccgggggtcggggccgcgagcccgggggtagggggcgggcgcgcgggcgcgggaggaggaggaggaggagggagaggtgggggaggaggccgcggggccgcctcctccggcagctccggctcctcccagcggcgcccgcggaacctgcctcagagtcgccggactctggaagggaacatgacctgacccctccccgagcggccggaacgaggcgcggagccgcgctccgggctcgggcggccgcgggatgggcgagcgcgcggccccgcccggcgcccaccgccctgccctcgcctgtctcctcctttccccggggctccgctgagttcattcactgggattggtttcaagtgacgccatctctttatttttaaaccaatgacctcatccgcgcttgaagtttcctgaccagcgactctttctctttcccccaaccccccaccccacccccccgcctttccccctctttctatgtatcagtgtttggggggctttaatcagtttttaaacgattattaccacctctctctcccccccaacccccactttcacaacgcggccccccacctttacctccctaagttcttcatctctttcgacattttttttgaaggctgatgggggggagggtggaagagaaagagtgaagaaaagttgcgagcgtctcctctcttcctaagcctcccgccccaacccacccctcagagaaggagaagataatatactgaaaagaagaggaggaggagagcgacgggacgggacgcgagcgggagcgcagccgccctctcggctccgcggcggcgcctcgcaagtccgggaggcgaggggggc

SEQ ID NO: 9048 - DNA, 2300 bp, Homo sapien
agcagcattgacaaatatgcaatctttgtcaagttctcaaaggcccgaggtaggccaaaacaaaaacaacagtaaaaacaagctcactgactttattaaatgaggacacagccagttatttttaaaataactttattgagatataatccactcatttaaagtggtttaactacagttaaactacaatttagtggtttttaatatattcacaggatgtgcaaccatcaccaaaatcaattttagataattttcttttcttctttttttttttttttttttttgagtcggagtttcgctcttgttgctcaggctggagtgcaatggcacggtctcaactcactgcaacctccgcctcctgggtttaagccattctcctgcctcagcctcccacgtagctgggattacaggtatgctctcccaggcctggccaactttgtatttttagtagagatgggtttctccatgttggtcaggctggtctcgaactcctgacctcaggtgatcagcccacctcggcctcccaaagtgctgggattacaggcgtgagccaccatgcccggctgaattttagatcattttcatcacctcaaaaagaaacccagtactcattaaccgtcactctcctttccaggatccctccatccctgccattcttcaaccctagcccttggcaaccactaatggattttttggtctatttagatgtgcctgttccagacacttcattataaatggaatcatacaatatgtggcctattgtgtctggcttttttcacttcacataaagttttcaaggttcagacatattgaagtgtgtatatcccttcattttttttcattgctgaataatatttctttcctttttttttgagacagagtcttgctctgttgcccaggctggagtgccgtgatcacagctcacttcagcctccaactccagggctcaaacgatcctcccacctgggcctcccgagtggctaggactacaagcaccaccaccacacccaagtaatttttaaattttttgtaacacacccaactaatttttaattttttttgtagagactgcatcttactatatgggtcttcttccttcttctttcttcttccttcttctccttcttcttccttcatcgttcttcttccttctttcattcttcttcttcttttttttttttttaaatacagtgtctggctctgtcgcccaggctggagtgcagtggtacaatcttggcttattgcagcctctgcctcccaggcccaagtgatcctctcatgtcagcctccccagtaactgggattacaggcatgtgccaccacactcgactaatttttgtatttttttgtagagacaggttttgctatgttgcccaggctggtctcgaactcttgggctaaagcaatcctcccgcctcggcctcccaacgtgctgggattacaggcgtgacccaccacccctggccagtatttcttaatttgtatagtccacactggtttatccattcatccagtaaaggacatttgcgttgtttccactttttgactattatgaataatgctgctaggaaagaacatttatatacaagtttttgtgtagtcactcgttttaatttctcttgggtatgggagtggccaatattctgaagaactgccaaatttcttcccaaagtagctgcactattttacatacttagtttttgtttttcgtttttttttaaataaagaacctttagggtttcctcagcgtcccagaggagggcctgcttccggcaccccgccttcagggctgcctccgcagagcaccaaactcccgtccccgccattccaggccctggcacttaggagccaaaacctcaggtcaggcgcactttgggcctccagcccagccccgcctcctcagcgctagctagtaggcaaaaggaaaacagctgccccttaatgaggctatgtggacatcgtagttttttttccagtcagtagcgcagagactgtgataagaaaaatcacaattcccagaatgccgcggtgctacggcagccgaaggggccattccgtgtgcagcgctcccgcccaccctccggtctcggcggctctccagagcgtctgtaaacacccagagactgtcatggagggggaggaggaggcggcggcggcgaagggaggcgtttggggccgcctccagggtccgctctgccattcctgaactggtccctcgtccccgtgactctggcatcagggaagcgaactgttaggcgagaggaggaggcagccagaaccatatccccttcttcctcggggcg

SEQ ID NO: 9049 - DNA, 2300 bp, Homo sapien
ccaagcctccatttcttcatcggtaaaacagaaatgccagtaatagtactcatcttgttgggttgataggattaaatgacataatgtatgtaaacacctggcacatgttaaatattagttgttcttattgttgtaattattcttgactaagagaggagatgatatccaagtcaccaacctgctgactcaaagaatttcttcaatatctaacttttttgataaatgaattttcttaaaatgtcaagtgttaaaattaacagttgaatttctctgagtcttacatagaaaaactagaattaacctcactcctcctaaaataaaagtagaaaatacgatgaggatgttgatccaggaaggaccttcagtttcttgaaaattatactccagcttccttgtgccacctctttgcttacaaagttttcatttctacacattgcaagtcagcattcgtctttcaaaaaataaatattctgaattgctttggttaggattctgagttagaaacaacaagttatatgccagtgttatgagacaaatgtatagccagtttgtatttctgacttggagtaatccaaatgctatccaagtattaataaaatttgtatttatttaaaataatttgacaactcacatttaaaaaattgtcttttcttccatagtgttataaagaatccacacattgttcctagcatcgacagtcaggtgtggctctaaagtatctcccaattaaggctgttaggacttagataatggcttcccaaaagtcagatattctaacctgaggagaaattgatttcttgagttctttccaccaccctgtgatggcatttcagggtcaatctgtgaagctggaattttcattcagttgcacctaactagatttttaaggaaagaagcagtggaggatggggagagtaactattgcagtgtccatactaattcctagattcctttcaagatttaggaccgacagcaatccaatttggctctgagaatactgtttaaatccctcctcagcaattcagtccttttccctcttcctttctttagtcagcaggctcccatggcgaccggttttaaaagaaatcatcctcttcagcagttacctagcaccatggcaactaggacgtcagcaaagcaggatagaccctgcacaaaacagctccaagcaggctccctccctgcctctccagttcagccctgcctgaggcctagggatggggctaatgacatctagacttgtacaccccagaattcctatgtgtttctgtggttttccccataagcatagatatttgggcatgcagtaaactatgttacaggaatctccctcccccccaccaaaaaaaaaaaaaagaccatatttaaagagtgaggatgggtgatgggatggggacagggaggtaggtatgggatggtcttttgggtttaaggaaatttgaaaattatgtttgtgtttataaggtaacagtaagctgatagtaggggaagtcagagccctaaacatatggtgtggtttatgtttaggcacaggacctcagggaaattttaaaaaatatttttatttacttgagagtgaaatagacaaatggctttaacaagcacttgaagagggtgtaatgctgtccgtggtgctgaacgctccattgtcccagatgtgtgctaagggggatccagaggggaggttaaggaacaccttgccaggtcaggatactgactgtaagaaagaaagagaggggttgaggttaagaaagcatcatttatctcccatactgagcaactctgaatggtcaggataaatcttcagatagaaaaaaaagaaaatagagaaggaaggaggtttgggtgattgaatcttccccttttcatatggagatttttggtctgagccaatcaagacagagatttctgctgctttgctcctgaaaggaaaagtgggggaagggagggagaagatggccacattctccccttcagccacatgatccatttcccatgtgacacattccagagccttggaaaggagaagggaggggcaacaagagagtggggctgggggcgggaagatggtttaacagtctaccctgcacagcgtcatcttgtctccctaacaggaagcaggctgtgagccaaggggaaggcagaggacagaaatgaatgtgtttccaggctttcctggtggtttatggcattctccaaactcctatgcaagggctattcctgaccaagaagatctaaagagaacgtctctgaaatcaagtccggatgaaggtatgtgatagggatcccttggtattgcg

SEQ ID NO: 9050 - DNA, 2300 bp, Homo sapien
cagactaaattaccaatccatcagtcagtttctgttactcaccaaagattttttttcagtgaagaaaaatgttttatttgacaacttactattcttacactataattttcatcacatgtaaatgaactaggagtctcaaagaagtcactgttctttatcagctcttccactcccatacttaattttcattcaagccttctcattatgtgcaatgagagtattcagtttgtttaatactggttgtttgccttgacaaagtaagccagctttctgagttagtcttaatcattaaagtgaacaagatacccattcactttatctgcattttttttttcttcatgatgaaaatgccagttcaatactggcttggaaaaccgattttcaccttaccttaaccaagtcagagtacctctagataatggagcggaattttaaagttacttctcattttggtacaaatttgtgttaaaaggtattcaagctgctggatttactgagttttatcatattgaacgtgagaaaatccagaggctagtttcttgagataaaaggattttctgtgaccgatgctggacacatgcaaagctttcaaaatttggttccatctgttcacatgtccatacatattctctgcttaatttcatatgtcttgaaaatcccactttccttttagaaaatttcttgttacaagttgaagtcttcaaattcaccattcaaaaacataacagagtccaataaaattgccaaattgttaacatttatgctcttatccagctctaagataacaatgatccaggtttggctgaatctaccagttatttaaggttgttttttgagcacattaaaatgtatcattagaaatccttccataaaaatactttttaaaaagtcactttgcctgcctttttttttgttttcaaacgaatccagtcatatctgtaaaacaagtttccatcagatctcattttataagcaacatcctcttctaagccacctgaaactgactttgaagagctcttcaaaccatttcaaaaatttgtttgttggcttgtgctttcttgggttaatgcttctagagtcgtctccaagtttcaaattttgcatggctgcttttttttttttttttttttttttacttcgcttcaagagtcagtcttaaatcatgtaggttttgcttgaggtttgctcgagcaagaggaccttaggtttggtcttatttgcatttttaccataactaggcctacattctaaataagtaactaaatgccacctatgagtttcattaactgtggctgcttgccactttttagttctggttagggtggtgctattgttttcctcaggttcattagaaacatcttccgtgacagctctgacgcggcaccgatttctgagtgtccagtgttttccctaccattattttctttggtctgaagttgacacttaaactgtccagttttaaacctccgatccgtgttcccaaatgaaaacatgactttcattacgaattacacgtcaagggagcaaaccaaggcgctcggggcggcgagaaccgcgacacagcgcttcgcctggactggtaaacaaaccgccgcgcaggcgcaatggcaacaggacggtaacctgggtagccgccaatgggctttttcgtagagtgaaaagcggaaaagccaaacaaaacgctggttccaaggtgataaactggctgacttcctctatttttacttttttaaaaaattttgtttctgaagaagtagttgtgcggccttctgggcctcgcagagatcttcttcgtggaattcctcggccccagagaaatgccgctagcctgtcggctagttatattagcctaattttttgtcttgatctttttcatttgactgcagcactaatcctaatccactggggcagcaaaaaaaaaaaaaaaaaaaaaaaaaaaaaaaaaaaagggcgggtgggatctcaacgccacggaaaaccttcatactagccggccatcaccaaaccacgcgagatctgcctgaggagaagcgccaccccgggagtgcacgtttgcgcatgcgtctggctcatcatttttagcgcgcaaaagtttcaaaactttccgcctagtgagaggcggtccgatttggcccttggggagtgtccgtcgcgttgatctgatggattcacgtacacaacaccacattctatgagattttgcaggcaaaagtccacaagctcgtatggtcatcccttctttccgtttttatattggccgtgaactctgtgaggggaggtttcagcgactgaagtagtaa

SEQ ID NO: 9051 - DNA, 2300 bp, Homo sapien
ctaattttcctgttccttttcccccagtctgcagtccaataaattgacagccttaaaagtagaaaaactaaagaggatgagacctcttgcttgatcctaggtgaattcttttctgtcagttaggtaggaagtcctgacttgaaaactagttctgggcactgccccctttactgttctctgggtatcaacccctgtccttcaattttagttgaactagtggatggtgataccacaggctcaagacagctgcatttaaatatcagtgaccacaggccacatcaaggaaacatctgcaggcaacccagggcctgggaaggagccattttcagtcacttgtaagacagcaggacctgcagactacagcacaatcaaactcagacaaaaccctgaaccagtgagaaccattaggaaggaaaggaacagaaaatgaaccaacctgagtgttaggagacttgcatctagtcctgactccggtaccaaccgaatgcatgtccctggacaggaaacctctctgagtctcgatttcctccgtggtaaaaaggagagggttaaaccacagggtcccgagggtcccttccagctgtcacattctggagcgtatgagatgaggtaggcacacaaagtggacaagatgtggctaagaaaacaagctacacatcaagctcatctgtagcataggtgcttaagaaaactttgctgctgtgtaatattagaacggaaggttggtttccagtaaaatgcattaactttggctcaaaccaagatgatgggtaccgggcatgggggtggggaggcagttgaagatccactgagctttgtctcagggcagccctgctcatcgtcctactttaccttccaccacggtgctcaagcccacactgagagagaaatttccagctgcaaaagggagaagagaaacgctggaatactagtatcggacgttaggacatggttgtggtgttttaaaaatcatttcatcatctggagtttgaccccgaggggagtattttcacccttcagccctctgaaagcattcactagcatctgaatattgttctgagtttgttggagcagtgaaatctggtgagagagaagggtggaggaaggaaggagctgttgtatttggcggctggactcaggtagaggaaactgctacaatcccgggaaagaacagaaaagtagaaagggacgagttcccacacgcagccaatgtccatggccttaactgtgcttgggaaggaagatcctgggccaggggtgtaccctcgtttttcaaaactaaacgtgtctgagacagctacaaagtttattaagggacttgagagactagagttttttgttttttttttttaatcttgagttcctttcttattttcattgagggagagcttgagttcatgataagtgccgcgtctactcctggctaatttctaaaagaaagacgttcgctttggcttcttccctaggcccccagcctccccagggatggcagaaacttctgggttaaggctgagcgaaccattgcccactgcctccaccagcccccagcaaaggcacgccggcgggggggcgcccagcccccccagcaaacgctccgcggcctcccccgcagaccacgaggtgggggccgctggggagggccgagctgggggcagctcgccaccccggctcctagcgagctgccggcgaccttcgcggtcctctggtccaggtcccggcttcccgggcgaggagcgggagggaggtcggggcttaggcgccgcggcgaacccgccaacgcagcgccgggccccgaacctcaggccccgccccaggttcccggccgtttggctagtttgtttgtcttaattttaatttctccgaggccagccagagcaggtttgttggcagcagtacccctccagcagtcacgcgaccagccaatctcccggcggcgctcggggaggcggcgcgctcgggaacgaggggaggtggcggaaccgcgccggggccaccttaaggccgcgctcgccagcctcggcggggcggctcccgccgccgcaaccaatggatctcctcctctgtttaaatagactcgccgtgtcaatcattttcttcttcgtcagcctcccttccaccgccatattgggccactaaaaaaagggggctcgtcttttcggggtgtttttctccccctcccctgtccccgcttgctcacggctctgcgactccgacgccggcaaggtttggagagcggctgggttcgcgggacccgcgggcttgcacccgcccagactcggacgggctttgccaccctctcc

SEQ ID NO: 9052 - DNA, 2300 bp, Homo sapien
actccccagttctacctttccaaggcaggggaaggtgcatcctcgccaggctcctgcccgcgccttccgagtacccctggcccgcagccggtgacacggcgcgcggaacatccgtgaacgagttgggttacatctctgtccccgcgaagctgcagatcgctgaccgccccgcgcacccccgcctgcctgcacactgtcaaccgcacttaggggaaatttttggaacagaagctccgcccatcctgctcccactgcctccactaaccgactcaaaacccccacctcgggccgccgaagcaggtttcgtcacacgatctgggggactgtattttttacaagaaaacaagcatcaaaaaaaaaaaaaaattcaaactgcacgcgccggccaatggggaagaagtgggaggtgggcggaggccgcgcgcggcgcgcgaggcggggaggggccccgggcgggcgcgggggctggggccgcgggagattcggcaaacgcggcgggcgcccggttcggggcttttttttttttttttctcttcccaaaaccgactagagcgcgagactccgcctgaagctgcagcttctcggatccaccttaaatcttcagcggactcagcgtcggggtcagtgggcgcagccaatgccaatcaagtttacaaccagcagcacgggagggaaaaaaaaaatcatctgcaagttctccctacacacaaatacgcgcgcgcacacacgcacacacgtacgcacacacacacagaaagaaggagggggtgggggcgggcgctcgggagagggcgagaatgtttgtgaaatgcgcgtccgaggctccggggccgcggccggagcgcggggcaggcgcgcggggagcgcagcccggcgcgagcgccatgatggtcgccgcggttcggggcccgttttctggagggggagccgcaatgatgcaatcccccggccgcgcgccctgctccctgccttttctcaacgttcctttagaggcgcgtcgaggtttcgcgcccaacgccttgatttctttttgtactgctcgctccgatgcctgctgctcagtgtccccacgcgtgacaggccgggcgcgcgggcggccgcagaggggctgggccttacgtgtcaactcggcactttcggttctgcggggtcggcctgaggcggaccccaccccatcccaccccagtccccaggccagcccggatccgggaggtggccgctgaggttttccagcgggactgtgggccccttccccacccccagctgggcccgcaggattttttacctcccttttggctgagagggggtgggtgggcgtagggtgtggcccaggtgaaagacacagcaagttttaaaaagaaattcatactctgaacaccagacaggagatcctagaggagatttagaatcactttttctgtgcaaagagcttgagagaagagcaagtgtgggcgctgtgatgatgaagatgaaatggcgaaggcagcgtcccccggcctccgggaaagtcgctccctgaggccggggcggtgggcgcaccccggcctgagaggcctctcgccccgctcctcgcctgtgaagcccacgctcccggagtcccccaaacacgcccccaaacccacatttccccagttcttccccgtcccaggcccccgcgccgggcggccggggttgcgatgggggcacgttgccgagcgggggtgagggcagaggggacccacgcgggcggccgtggtgcggggcccgggctgcgcgccgccgtggccctccccaggcgccggcgagccgggcgggctttcgaaatgcgcggggctgcggatcattggagcccagggtaggggtgggagcgggctgcagcgccggagggtcggcgaactcgggaaggctctccccttagctccgatatccccacggccggggaggcggccggttactcaggtggagagtccgtttgcggagaggagtgggagctttcgctgctttctcagcgcagaggagaggaggagggaggaaagtttctgagaaaccgcccagcccggctgcgcggcggaggcgcggccgcccgggcgcgggaactgcgcgcgacgacggcgacagtgcggggggctgcacgttacagatgagggagcaacacttgatggccttctcgtcccgaggcaccagccagcccgaccccgcaactgccgcggcgggcgggcgcggaactgcggggcagtttggggagacgacggcgcagtggcttgggtagtggggcaaggggtggcgggcgacggcggccgcaaccccgcaaagggacgttc

SEQ ID NO: 9053 - DNA, 2300 bp, Homo sapien
gttgcggccgccgtcgcccgccaccccttgccccactacccaagccactgcgccgtcgtctccccaaactgccccgcagttccgcgcccgcccgccgcggcagttgcggggtcgggctggctggtgcctcgggacgagaaggccatcaagtgttgctccctcatctgtaacgtgcagccccccgcactgtcgccgtcgtcgcgcgcagttcccgcgcccgggcggccgcgcctccgccgcgcagccgggctgggcggtttctcagaaactttcctccctcctcctctcctctgcgctgagaaagcagcgaaagctcccactcctctccgcaaacggactctccacctgagtaaccggccgcctccccggccgtggggatatcggagctaaggggagagccttcccgagttcgccgaccctccggcgctgcagcccgctcccacccctaccctgggctccaatgatccgcagccccgcgcatttcgaaagcccgcccggctcgccggcgcctggggagggccacggcggcgcgcagcccgggccccgcaccacggccgcccgcgtgggtcccctctgccctcacccccgctcggcaacgtgcccccatcgcaaccccggccgcccggcgcgggggcctgggacggggaagaactggggaaatgtgggtttgggggcgtgtttgggggactccgggagcgtgggcttcacaggcgaggagcggggcgagaggcctctcaggccggggtgcgcccaccgccccggcctcagggagcgactttcccggaggccgggggacgctgccttcgccatttcatcttcatcatcacagcgcccacacttgctcttctctcaagctctttgcacagaaaaagtgattctaaatctcctctaggatctcctgtctggtgttcagagtatgaatttctttttaaaacttgctgtgtctttcacctgggccacaccctacgcccacccaccccctctcagccaaaagggaggtaaaaaatcctgcgggcccagctgggggtggggaaggggcccacagtcccgctggaaaacctcagcggccacctcccggatccgggctggcctggggactggggtgggatggggtggggtccgcctcaggccgaccccgcagaaccgaaagtgccgagttgacacgtaaggcccagcccctctgcggccgcccgcgcgcccggcctgtcacgcgtggggacactgagcagcaggcatcggagcgagcagtacaaaaagaaatcaaggcgttgggcgcgaaacctcgacgcgcctctaaaggaacgttgagaaaaggcagggagcagggcgcgcggccgggggattgcatcattgcggctccccctccagaaaacgggccccgaaccgcggcgaccatcatggcgctcgcgccgggctgcgctccccgcgcgcctgccccgcgctccggccgcggccccggagcctcggacgcgcatttcacaaacattctcgccctctcccgagcgcccgcccccaccccctccttctttctgtgtgtgtgtgcgtacgtgtgtgcgtgtgtgcgcgcgcgtatttgtgtgtagggagaacttgcagatgattttttttttccctcccgtgctgctggttgtaaacttgattggcattggctgcgcccactgaccccgacgctgagtccgctgaagatttaaggtggatccgagaagctgcagcttcaggcggagtctcgcgctctagtcggttttgggaagagaaaaaaaaaaaaaaaagccccgaaccgggcgcccgccgcgtttgccgaatctcccgcggccccagcccccgcgcccgcccggggcccctccccgcctcgcgcgccgcgcgcggcctccgcccacctcccacttcttccccattggccggcgcgtgcagtttgaatttttttttttttttgatgcttgttttcttgtaaaaaatacagtcccccagatcgtgtgacgaaacctgcttcggcggcccgaggtgggggttttgagtcggttagtggaggcagtgggagcaggatgggcggagcttctgttccaaaaatttcccctaagtgcggttgacagtgtgcaggcaggcgggggtgcgcggggcggtcagcgatctgcagcttcgcggggacagagatgtaacccaactcgttcacggatgttccgcgcgccgtgtcaccggctgcgggccaggggtactcggaaggcgcgggcaggagcctggcgaggatgcaccttcccctgccttggaaaggtagaactggggagtgcgggagggtggaggtg

SEQ ID NO: 9054 - DNA, 2300 bp, Homo sapien
gccttagcctcccaaagtgctgggattacaggggtgagccactgcacccggccccagttggtttttttttgttttttttttttttgctttttttttgagacaaggtctctatcatccaggctgtgttgcagtggtaccattatagctcactgcagccttgacctcctgggtgcaagtgatcctcctgcctcagcgtcctgaatagctaggactacaggtgtgagtcactatgcccggccaatttttaaattttttgtaaagatggggtctcattatgtcaaccaggctggtctcgaactcctgacttcaagcgaccctccctcctctgcctcccaaagtgctgggattataggcatgggccaccatgactggccaaagtaccaggtttttatgggcagtaaaactttagcccaaactgtcaattaactcaattttttttgcctccataaagaggcaaatacaaagaaaatgggctttcaacacagagaaaaacaaattccaagatatgggctgaggtcagtatacacgctgtctattttcctctaccttctggttcttcatcccacctctgtactatgatattgatgctctgaggaagaccctgtatcccagcaatattcctcatctataaaataaagatttaattgtgttcctctaaacccaaaacacacaggatgatgtccagggaagttagaggaacatgtgtcagctgaagaatcagtggtatgttccctcttgtctacctccccaattcgcgctggcccacatcccatttggagtgaccatgtctatggagatagaggaggatattcttccacttctaacctcaaaaggacacactggaggcatctagattgaggttacagctatcctttgaggagctgtaacaagaatatttggaagtggaccaaatctagaataatcaagtttgaaaggactatggttgtcctttctgttgctactgttgttatactgtgttgataaatacaaagtatagtcataaaggtgggggatttaatcatgttccagaatgatacggctgttaaggctttccaggtaagccagagagttgagataatccttattcaagtgagaaacgaatttggccctccttatctggaggagagggttagaaggacgatggatggatttggggacatgtagtaggactgaattcctaggctgagctccaaccacctctgaatgccccagagatatctatgttccatctggtctggtctgcagcaagtccacagaagctacattcacttttctgtgctgaattatcaaaataattgcccttcagcccatgcctcatgaccctgtagacagaatccactcatttccctatcacatgggctacaattgctacttcaaatgaaaacctgggaagccaatgccctattgtggttgaaagtgtacaattagctcctcatgcagcctgaccccactgatttttctgatgcatgtgacctggagtgtgccctttctgagaccgccaatgtcttctccacagctggagatgcccaaaactgcacgcagcacttcctgtgggtgtggccttgcattcttaggactgcagggtacccgctgcatgccaaatgatcccaggctccagccactcacagattcacaacgcttttaaaaatacagcagtggagtatgagcggctatgtcagatatgagggttttccaccccctcccttttcttttaaaatatgattttgtaatggtggcctcaagaaacactataattggtcagcctggggtgcgtttgaaggccttctctatcgcgtcattagctattctcaggaaaggcagggtatcccactgggagaatgacaacacacttgtttcaagttagggaagagcctgtggttctcttcctgcgttcaggggaaagcgaacacacaatgttcgtttcctaaatacgggatgtgctgtgctggcaggtcattttccaccatgtcacgtccttctagatgaaggcagcaggggtcatgacaggaaatggcaaattctcagaatgagacaaggctttcccagggcagccattggttctctggaactataaagcacactcatccagaaacagcctcagattttactttcctggaggcagacagaagtgaatggtaagtggggaaccctgaggcatatattcgggatgactttttctcattttctcttttcacctggaaaattatccctggtgggttggattatggaagcatggaagtaaaattaagtcctgtgaataaggagatgaggattctagactgggctctgtgaagaatcag

SEQ ID NO: 9055 - DNA, 2300 bp, Homo sapien
ccatccccgccccaattctgtgcaaaaaatgtcttccacgaaaccagtccttagtgccaaaaaggttggggaccgctgtcttagatggtctccttttctcactctttctacagcctatctccatatagagttagagtaatattttaaatgtgtagatcatgtctcttccctgctctaaacccccagtggcttccttctgcatttaggataacatccaaaaccccagaccttttacaacagggtcctgcagagtctgagctgagcccaattctctgaccacatcctaccctttttgttgttgagacactgctgtgatgcctaaatcagggcccttttttagttgtggtggtggggaggtcggcaggcacattgagttgagttcctcacaattctcaggtcaagcacactggcatcacaagtctcctctcttgctttgtgtatttattatccttttttttttttttttgagacggagtcttgcgctgtcactcaggctggagtgcaatggcatgatctcagctcactgcaacctccgcctccggggttcaagcaattctcctgccccagccccccgagtagctgggattacaggcacaggccaccatgcctggctaatttttgtgtttttagtagagactggatttcactatgttgaccaggctggtctcgaactcttgacttcaagtgatccatctgccttggcctcccaaagtgctaagatacaggtgtgagccaccgcggccggcctattgtcttatacacttaattcttttattcccaattcccagttttattctaattcttctccctctgcaggcaaccattctaaaatatttcaagtgtatcttctgttggatgtgttttagcagaatgtgatatctgtgggcctatattttaatatacttgatatattttatgcttttctcactaagcactaggtttttcagatctaatcatattgttaagggcatgtttgtagacaccatgttcacattttaactatgcattttcccagtgacggacaccagattgcccccaacttcccatcctcaggaataaaactgcaacgagcaccctgcgcagtgtgagacccaagtgacaggccacaggagggcactcgctggccatggggcatgcaacatacagctctgaatttgctgctttccagaatagccttagtagcttcacagtcttggtacttggaattctctcactctggaatgattatctcctgggatcttaaagcgttttctcctgctcaacagtgaggtcttaactcaaatatcactgtctcagagaggccttcccaatctcacagttatccccacaacccaccctccccaggttactctgtaatttttatgtgaacagggtttcactctgttgcccaggctggagtacagtagcaccatctccactcactgcagcctcaacttccggggtcaactgatccctcaacctcagccccctgaatagctgggattacaggcgcatgccaccatgcatgcctgactgatttttgcattttgcagacacagggtttcgccacgttgcccaggctggtctcgaactcctgggctcaagtgatccgcccgcctcgtcctcccacagtgctggggttacaggcgtgagcacacccagctacttttcacaatttgaaatgctctgtgatagcttatttatgatctgtcttctttttcttcacgagggcaggggtcgctgtcctattcaccagccatctagcatagccttagcaaatggtaggttctcaacattattgaataaagtaatgacataataaaaaaatagtattgtaatatcaatccgttccaaactctatggttagaaaagcggggaacataactggcgacacacgtagggaaggctctttaaaagggacctaaaggtcaactggagtccctggtgatcagccccttctgcactcggatctattccgcaagcctacgcgcccatattcactgggccccacctgcctagcggacgggtgcaatccccggcaagcccgcagggggcgcgcagagcacgtcgtccggggagaactaaaactacatttcccagcatcccgcgcgccgcagacccacttccggagacctcacacaagatggcggcacccgaggaacacgattctccgaccgaagcgtcccagccgattgtggaagaggaggaaactaaaacatttaaagacctggtgagaatggatgacgctggcttcttttatgtactctggtgctaggctcagggagaccccaggtaccttagatcccgctctgatagtgtac

SEQ ID NO: 9056 - DNA, 2300 bp, Homo sapien
aagactctgtctctaaataaataaataaataaataaagtgaaagtagatgcagactgagctctgaagaactaatcaatcaaccaatatttgcatcagcagcacgttagatggctagtgatctaacagctcttgcctttaaggaactttcagtcttacttggagagttacaattaagaagtgcacaattaaagaataactcaaaaaattaaagtggagtgatgattatatggcataagtaattaaagaaaaccaataatgatttgatacttaagatgtaataataaaataagagctaatatttcatagcctgtgctatgtgctttgtttagtgctttatatgcatgatttgtttaattcaatctgcacaagagtcctctaaggtagctactattagcatctcccttttcagaagaggaagctaaaatccagacaagtagcttgcttgagatcacacagctggtaaatcgaggaagatggaacacagacaatacgtagtatattagtccattctcacattgctataaagagctacctgagactgggtaatttataaagaaaagaggcttaattgactcacagttccacaggctgtacaggaagcatggctggggaggcctcaggaaacttgtagtcaaggcggaaggtgaaggggaagcaggcatgttcttcatggctagagcaggaggaagagagagcgaagggggaagtgctacacactttcaaacaaccagataaggccaggtgtggtgtctcacgcctgtaatcccaccactttgggaggccgagacaggcggatcacctgaggtcaggagtttgagaccagcctgggcaacatggtgaaaccccatctctactaaaaacacaaaaattagccaggtgtggtgtaaggcatctgtaatcccagctactcaggaggctgaggcaggagaatttcttgaacccgggacgcagagattgcagtgagccgagatcatgccactgcattccagcctgggcgacagagcaagactccatttcaaaaaacaaacaaacaaaaaaccaaccagatctcatgagagttcattcactatcaggagatcatgggggcgaggggaatccgcccccatgatccaatcccctcctaccaggcccctcctccaacactggggattacaatttaacatgagatttggatggggacacaaatacaaatcatattacataataaatgagttcaggccgggcacggtggctcacgcctgtaatcccagcactttgggaggccgaggtgggtggatcacgaggtcaggagatcgagaccatcctggctaacacgatgaaaccccttctctactaaaaatacaaaaaaattagccggccgtggtggtgggcgcctgtagtcccagctacttgggaggctgagacaggagaatggcatgaacccgggaggcagagcttgcagtgagccgagatcgcaccactgcactccagcctgggcaacagagagactccgtctcaaaaacaaaacaaaacaaaaacataataaatgagttcagaggtggcagatgttaatgtcagcttacgttgaggtaagccacaaattctcgtgtttttttcagagttccccatcaggtggaacaaaacttgtcctgttacctaccctcaaagacaaaccagcaaccagttcaccacccatccaccctttcagtgtcttcttgttgatctttggagaaaggcatggcctggcaggctctgcatggtgccacaggcctatctagctcctgtctctcctgcatttccttccctactggctgctttcactctttaagctcctgcccaccccagggactttgcacatgctattttttctacctcctctgctcttctgccctctttatttaggcaacttctactcatccttcagatcccaggtcaagcatatccttcttcagggaaggtttgcttgacatcgctgatggggtcaaatcctccttttagaggctatcaccacacgctgcatctgtattttataacacttgtcacagtattatatttgtctggttctttgattgatatctattactctcactagattataagccccataaggaatgagactgggccgggcgcggtggctcacgcctgtaatcccagcactttgggaggccgaggcgggcggatcacgaggtcaggagatcgagaccatcccggctaaaacggtgaaaccccgtctctactaaaactacaaaaaatagccgggcgtagtggcgggcgcctgtagtcctagctacttgggaggctgaggcaggagaatggcgtg

SEQ ID NO: 9057 - DNA, 2300 bp, Homo sapien
aggggcactcactcttaaagttgtggagtgcctccttgaaatctgtgctctggttgcctcattggcctcatctagtcctggctttgtgcaggcaggtgtctccataaagggataggaggagaccaagaggttaagaggagagtagaaaagagagtactaagaggacaaggtgggacatccaaagtcaatggcactactcaggaggctgaggcaggaggatggcttgagcccaggagttggaggctgtagtgagctatggtggcctgtgaatagccattgcactccagcctgggcaacatagtgaaacactgtctctaagaataacaacaacaacaaacaaagccaatagcaaagtgaagagcaatgactgaagacaggttcagaacaagcatccccacacatgctctctgtctcacacaccctggacctgccagacagataccatccagagaacagtgaacaaaggaaagatcaaatacactcatcacattctcattaggaggacctaatgggaatgtggtcctggggagggggtgtagagatagggtaggatccccaaaaccacatcatctttgttctttcaccatcctcagacttgacgtcttttgctcgatgtcatgaaactcaccctagacatggtgattcagactccgtgctggaagagccaccagggacaactagtcctcactatccagtgtggtagccacaagccacacacactttttgagcaatggaaatgtggctggtccacactgacaggtgctttaaatataaaagacacactgggtttttgaggatatagttggaaaccaaagaagtaaaatagccccttaatatttttaaaaatattgattacatgttgaaatgatcatatttgggatcatatttgggtaaaaaatatacagtgttattaaaattaattttcctgtttctttgtacttcttttaatgtggctagaaatttaacatgacatatgtgggccaggtgtggtggctcccacctgtaatcctagcactttggaaggccaaggctggaggatggcatgaacccaggagtttgagaccagcatgtgcaacacagcgagaccttgtctctataaataataaaaagaattacttgggaggctgaggcgggaagactgcttgagcctgggaggtaaaggcttacagtgagccatgatggtatcactgcaccccagcctgggtgacaaagtgagagtgtctcaaacaagaaacaaacaaaaaaattagccaggtgtggtaatgcacacatgtggtcctgggtgcttgggaggctgaggtggaaggatagcttgagcctgggtgattgaggctgcagtgagccgattgtgccattgtactccagcctgggtgacggcgagaccttgtctaaaaaagaaaaaacacacaaaaaataaaaaacaaatgtggcttatgtttgtggcttgaattatagttctattgtacaatggtagtctagttcaacttcttgaacagacgagaacgctggggtccggagagaagccctgacttagcggatggcacacactataaagcactgtcatttgcagtcccaccagtctctcagtacccacccccactctgccacacacacccctgggagtcttaggtgtgaaatgggtggactcacagacccctgggctgcatacctcaaagtgttccaacactcaaggcactgcctgtggttttttgggagtgaaataaaaacctaacaatggtggggtcacagtctccagtaggtcacattttaaaagcactttaggctctggagacttggggtgtggggagaagtgaagagaaagctggggagccctgggccttcccccatttcttcatatgcagaataatccagattagtttaccaagcgcgctgataaccactttaaaaacagagtccctcctgcctccccgtggcatggggtagaacctggcttgagccccgacacaggcgggcagccactccaggatcgttccacacgtaaacaaagacgagtttcggtccgattggcttgatcctggaagaggagtgggcagtggagggaggggaaaccaggcaccaaagcaaattccttcatttcataatttcatctggcgcccccgttcaatcagcctgcattgtcgaggctttaggagaggcagttaggaaaggagagatactgatctctcagccccagggcagcactaatggtgcctgtctagactctgacaggtggagctgctgagctaactacggacctggtgggggaagttttccttggctttcacgtggctttggctggg

SEQ ID NO: 9058 - DNA, 2300 bp, Homo sapien
ggtgattcagactccgtgctggaagagccaccagggacaactagtcctcactatccagtgtggtagccacaagccacacacactttttgagcaatggaaatgtggctggtccacactgacaggtgctttaaatataaaagacacactgggtttttgaggatatagttggaaaccaaagaagtaaaatagccccttaatatttttaaaaatattgattacatgttgaaatgatcatatttgggatcatatttgggtaaaaaatatacagtgttattaaaattaattttcctgtttctttgtacttcttttaatgtggctagaaatttaacatgacatatgtgggccaggtgtggtggctcccacctgtaatcctagcactttggaaggccaaggctggaggatggcatgaacccaggagtttgagaccagcatgtgcaacacagcgagaccttgtctctataaataataaaaagaattacttgggaggctgaggcgggaagactgcttgagcctgggaggtaaaggcttacagtgagccatgatggtatcactgcaccccagcctgggtgacaaagtgagagtgtctcaaacaagaaacaaacaaaaaaattagccaggtgtggtaatgcacacatgtggtcctgggtgcttgggaggctgaggtggaaggatagcttgagcctgggtgattgaggctgcagtgagccgattgtgccattgtactccagcctgggtgacggcgagaccttgtctaaaaaagaaaaaacacacaaaaaataaaaaacaaatgtggcttatgtttgtggcttgaattatagttctattgtacaatggtagtctagttcaacttcttgaacagacgagaacgctggggtccggagagaagccctgacttagcggatggcacacactataaagcactgtcatttgcagtcccaccagtctctcagtacccacccccactctgccacacacacccctgggagtcttaggtgtgaaatgggtggactcacagacccctgggctgcatacctcaaagtgttccaacactcaaggcactgcctgtggttttttgggagtgaaataaaaacctaacaatggtggggtcacagtctccagtaggtcacattttaaaagcactttaggctctggagacttggggtgtggggagaagtgaagagaaagctggggagccctgggccttcccccatttcttcatatgcagaataatccagattagtttaccaagcgcgctgataaccactttaaaaacagagtccctcctgcctccccgtggcatggggtagaacctggcttgagccccgacacaggcgggcagccactccaggatcgttccacacgtaaacaaagacgagtttcggtccgattggcttgatcctggaagaggagtgggcagtggagggaggggaaaccaggcaccaaagcaaattccttcatttcataatttcatctggcgcccccgttcaatcagcctgcattgtcgaggctttaggagaggcagttaggaaaggagagatactgatctctcagccccagggcagcactaatggtgcctgtctagactctgacaggtggagctgctgagctaactacggacctggtgggggaagttttccttggctttcacgtggctttggctggggagccctgagaaggtggctgcctcctttttctgaagcctggcttcccatacggcagtggctgggggagagtgatggagagaaaggctaagctaaggtcaaagaaagtggaggaaggctggcttgtcccgctggacttgacggcggagctgctgcaatctcgcgggctgggcccttgccccgggtggacccgagtgcctgcggggaggcgggtgtggctcccccgggaggtgacagctggcggggcccgtaaggagctggtctgctccggctcccctctcgtagccggcgccctgggaccagcgcgtgagcacgtctcggaggagtccgatgcgctgggcagggccgggtggtcacccccgcccagcttccaggggtgactgtgcctctgacgtcagacggtttttgggtcattccctggcacggggactttattttcataacagcatgaagtgccgtggaactggaataggcgtgtcctctccctcgaccctccccctccttgtccctctgctcacccctcgctcgttccctccctccggcgagggccgcctttataacaactgctcagagtgcgagggcgggatagctgtccaaggtctcccccagcactgaggagctcgcctgctgccctcttgc

SEQ ID NO: 9059 - DNA, 2300 bp, Homo sapien
ctgggtgacagagcgaggctctgttccccccatccccccaaaaaggagtaaaaattggagcaatactaaaaatgaacatgttagctatgaagattattttttgttggattacccgctatttatgtgccatccaggacgttcctctttacaggtagccaatttagagctggttatgacagacaagacccctttcataacttttcggaattagtggagccatctttacacatcttaaggaggaggccgggcacggtggctcacacctgtaatcccagcactttgggaggctgaaggagtttgagatcaacctgaggtcgggagtttgagaccagcttgaccaacatgcagaaaccccatctctactaaaaatacaaaattagctgggcatgttggcgcgtgcctgtaatctcagctactcaggaggctgaggcagaattgcttgaacccaggaggcggaggttgcggtgagccaagattgtgccattgcactccagcctgggcaaaaagagcgaaactccgtctaaaaaaaaaaaaacaaaaactcaaaaacaaatcttaaggaggaggggcagaataattctgaaccacagagcctaagaagaggacccagccgctggctcagaagggaatgctcggccttctgtagaaaaatctgctattcagagaccatcatgggtaacacggtgaaaccccgtctctactaaaaatacaaaaaaaaaattagccgggcatggtggcacatgcctgtagtaccagctactctggaggctgaggcaggagaatcacttgagcccgggaggcggagcttgcagtgagccgagatcgtgccactgcactccagcctgggcgacagagcgagactctgtctcaaaaaaaaaaaaaaagagagagaaagaaaaatctaccattcagataactcctcttatccatgagagaataggatgcttacaaatgataactgtatcagggccaaaggtagaggctgcaacgttatgattaaagtgttaacttcaagtttagatagttccatgttcactaattcctaagaaaacactagtaaaaaaatatcaggaaccctggcaggttatttgtaatatatacacgtatatatatttcaagagacagggtcttgctctgttgcccaggctggggtgcagtgacgtgatcatagctcactgcatccttgaactcctggactccagcgatattcccacctcagccttttgagtagctgggactacaggtgcgtgccaccatgcccagctaattttttaatataaagatggagtcttgctatgttgccctgtctggtctcaaacttcagagagcaaatgatcctcctgcttcagactcctgaagtgctgggattataggcatgagccaacacgtccagccctgtgaagttttttgagattaggcttcaaaatacctcttcagagtgttaggttctctggctttaaggtaaatattaatatagttaaactgggggaagggacatatgggatttcttcctggttcttcaacaggttttagaatttactacaggaggtagaggaaagttagtagctttacttaatgtagtaagctcaaagtcaaaaccctggctaaacatgcaaaattggtttcctaatccttttttagtcttctgtgtctgaggactgtgttaggagattcaataccttctccccactccaacattccttttctgcaggtccagaatggctacaacagtccctgatggttgccgcaatggcctgaaatccaagtactacagactttgtgataaggctgaagcttggggcatcgtcctagaaacggtggccacagccggggttgtgacctcggtggccttcatgctcactctcccgatcctcgtctgcaaggtgcaggactccaacaggcgaaaaatgctgcctactcagtttctcttcctcctgggtgtgttgggcatctttggcctcaccttcgccttcatcatcggactggacgggagcacagggcccacacgcttcttcctctttgggatcctcttttccatctgcttctcctgcctgctggctcatgctgtcagtctgaccaagctcgtccgggggaggaagcccctttccctgttggtgattctgggtctggccgtgggcttcagcctagtccaggatgttatcgctattgaatatattgtcctgaccatgaataggaccaacgtcaatgtcttttctgagctttccgctcctcgtcgcaatgaagactttgtcctcctgctcacctacgtcctcttcttgatggcgctgaccttcctcatg

SEQ ID NO: 9060 - DNA, 2300 bp, Homo sapien
ggtgggggccccagtggtttaatttctcctgttcctccatttcaggttttgaagagacaggggacacgctctatgccccctattccacacattttcagctgcaggtaagtgatttttttctccctcttcatcaaaggcattagcacctcaggaacactgatcctttggaaacagacgatgttacctttctcatggcccctagatggccacttgaaggaatgatgggtcttctttcctctaagcggcctcacggggttagtgggtaagaatgagtgcttggcatagagaggacttgggggtgggaggcctgggagaaagggaaggaaatgagacttctgcccagactggagacctgttgaaatggcaggaactggagtgggtttcacgatatgactgtttccttttcagaaccagcctccccaaaaggaattctccatcccacgggcccacgcttggccgagcccttacaaagactatgaagtaaagaaagagggcagctaactctgtcctgaagagtgggacaaatgcagccgggcggcagatctagcgggagctcaaagggatgtgggcgaaatcttgagtcttctgagaaaactgtacaagacactacgggaacagtttgcctccctcccagcctcaaccacaattcttccatgctggggctgatgtgggctagtaagactccagttcttagaggcgctgtagtatttttttttttttgtctcatcctttggatacttcttttaagtgggagtctcaggcaactcaagtttagacccttactctttttgtttgttttttgaaacaggatcttgctctgtcacccaggcttgagtgcagtggtgcgatcacagcccagtgcagcctcgaccacctgtgctcaagcaatcctcccatctccatctcccaaagtgctgggatgacaggcgtgagccacagctcccagcctaggcccttaatcttgctgttattttccatggactaaaggtctggtcatctgagctcacgctggctcacacagctctaggggcctgctcctctaactcacagtgggttttgtgaggctctgtggcccagagcagacctgcatatctgagcaaaaatagcaaaagcctctctcagcccactggcctgaatctacactggaagccaacttgctggcacccccgctccccaacccttcttgcctgggtaggagaggctaaagatcaccctaaatttactcatctctctagtgctgcctcacattgggcctcagcagctccccagcaccaattcacaggtcacccctctcttcttgcactgtccccaaacttgctgtcaattccgagatctaatctccccctacgctctgccaggaattctttcagacctcactagcacaagcccggttgctccttgtcaggagaatttgtagatcattctcacttcaaattcctggggctgatacttctctcatcttgcaccccaacctctgtaaatagatttaccgcatttacggctgcattctgtaagtgggcatggtctcctaatggaggagtgttcattgtataataagttattcacctgagtatgcaataaagatgtggtggccactctttcatggtggtggcagcagttaccagtaatgagcattagactctgggggatagaacacgggctgccctgagagcttcatgttggagctgaagttcaaggttcacttcctttgggtttgtacttgacccttcttcatgtgtctctcccgttccctctaaaacaagtgtgtttcccctcatttttgaggctgtcaatggtgtgagagccaggatcatcacggggcctgaggttttactccagaaaagcagaggagtggcaaccttggcttggggtttggcagcccaggaaaggcagggaggagagctcaaagccggtttcatgtttcacccaaggtctaattgtgggagaggacaaatccagatcccctgtttgacagaattagttcacaaatgtctcttggcaaaaacatgtgacacctaaccatgataattgacttaatccaagaaagagctctgtagggcagagcaataggaaatctctctttcgttatggaaaaaaaataatccctctacatagaaactgagtgacatgtaaaaatgtgtagctaagtcagggagttacttcctaagagcctgacgctctgcttttcatcaaaaggaaaaaccagcgtgaggcagaggcgagggaggtggaggtgagtggatgatgtgctgagttagggatgtttatatgccgcaaaggtttggttggtaggcttcgcg

SEQ ID NO: 9061 - DNA, 2300 bp, Homo sapien
tcacctgagggccttgtgtagcttccctgaatgtgttgcaatacacagggaggaagccgtctttcctagatttatacccactttcagatttacacccgctccctaaggccaaggtgcctctggtcagcagtagaatgaaaaagaattattctcaccaaggaaatctctgtagaaaagttgctgtgaaactggaataggtgtgtctttctgtccttccggttctttttatagatactgcaggaacctcagtgagagcctacggttcttccgcccatttggggagagattaaagaagctgaggttggctctttcttactcattggcagttacaactttgccagcactacagcctaagcttccagagtggacacggagaaggtaagttggaattggggggccatgttctcagctgtaaacctgggtcactccagccatctggtctggggataactgaagggaagtagagctaaggggtattcaattgcaattgatttttttttttcaaatgaatatgtgggatctttttcctaggctacctcagtcaagacatggactttcgtactaaactgttcaaaaaggtatttaaagaaagggaccattttgtacaattctttgatgaacacacaataggtgtttaactacaacctgctgcattggattgacttgaattaactgaaagaaggaacagtcattaaaattactgggaaattttattcccagtaatttatctgcctgtctccttcaagcagtgcatcagtgtctagaacgatccaatgatccattaatgttggcagtccttgttctggagtctgatataactgaattccatcaatcatgcaaacattctcatacacctccttttatgaaaaagattttgtattagctttcaaagccttggaaattagcatacacaaatggacatattatcaagtgaagcctgttcagcttttcccagcaggatgaagccaagatagttttgaagggtttaggttgcctttctcatttcctttactgacatcctatataaaactgctataaatttggggtaatatgtgtgatggcatttcccatccccttagactatgtttgcatatatctctgaatttcttcccccagggaagcttagcatttagataagtatcaggagtcaaacaaaatgtaactcaggctcttgacagtgtcctaggaacaattttggtaaggacatttatttcatatgcccaggtgtcttcatttcagaatgagagaaattacagtgcccagcatggaccacccaataggcattcttgtaggtattaggttggtgcgaaagcagttgcggttcttgacgttactttttttgtttgtgtgttttttgtttttcggtttttgttttcagacagcgtctcactctgtcgcccaggctggagtgcagtggtgcgatcttggctcactgcaacctctgcctcctgggttcaagcaattctcctgcctcagcctcccaagtagttgggaatataagcgcatgccatcatgcccggctaattttttatgtgtgtttttagtagagatggggtttcaccatgttggccaggctggtcttgaactcctgacttcaagtgatccacccaccttggcctcctaaagtgctaggattacaagcatgagccactgtaccctgccttgttttttgctttttgagacagagtctcactctgtcacccaggctggagtacagtggggcaatctcggctcaatgtaaactctgtctcctgggttcaagcgattctcctgcctcagcctcccgagtagctgagattacaagtgtgcaccaccacacccggctaatctttgtatttttagtagagatggggtttcaccatgttggctaggctggtcttgaactgctgacctcaagtgatcggcccgcctcagccttccaaagtgctgggataacaggagtgagccaccgcacccagccttcttgccattacttttaatagcaaaaagcacaattacttttgcaccaacctaagagatgcagagttgtcaatttgtctcatcctttttctgcagggcatcagaaaaccattctggtgaggtccacacccataagtcaccatgtacaaggactgcatcgagtccactggagactattttcttctctgtgacgccgaggggccatggggcatcattctggagtccctggccatacttggcatcgtggtcacaattctgctactcttagcatttctcttcctcatgcgaaagatccaagactgcagccagtggaatgtcctccccacccagctcctcttcct

SEQ ID NO: 9062 - DNA, 2300 bp, Homo sapien
tatgttttactttttctttctttcttttttaacagcacttatcaccttttaacatactatataatttactcattaagtttattgtttatggtttgtgtcctctgatagaatataggctgcacaatggcaggatttttgttattttttggtcactgatgtacactgagcacctaacacagtgcctgaatatgttggaccccttggttaaatgaacaattctgggctaaacaatgaaagtgatgtcttcagcctgacagagctaaagatgacagcacttaggacctagtgagtgaagtggttacataagtttcactcactcattcacataataaacatctgaggggacagtggtgggaactgaaacaggagaagtggatccactgcagccagatgcgaaggccttgaatgccatgctaaagagtttgaacctcatcctatatgcacaggtagacctacgaaagggtttttttttttttttttttttttttttttgagacagagtctcactctattacccaggctgaagtgcagtggcgcaatctcggctcattgcaacctctgcctcccaggttcaagtgattctcctgccttagcttcccgagtagctgggactacaggcacacgcccagctaatttttgtatttttagtacagatggggttttgccgtattggccaggctggtctcaaactcctgacctcaggtgatccacccgcctcagcctcctaaagtgctgggattacaggtgtgagccaccacgcccggcctggaaagggttttaaagtagaggactggcacgatccaattgtgctttggaaggatccctctgctggcagtggagggacaggggaaatggcaaggggttgagagatgtggggccaccggagcccaggaacagccaagtgtgagatgatgaaggtgggagaaaggcagatttgagaggtacctgtatgtggagggaggtaagagagaggaaggaagagaggattctccagggcttccagttaagcctctgggtagaagaagatgccgctaaccagaatagggattaaaggctgaagagtaacattaggcaggaggggcagctgtaggggtgttcatgatttagtttggggggcatatgaatattaagggccctctgtgaaatacattcatgcaacaattattatctaaatgtgtgtctgaccatgtaaaaatctccttagacttgggacagaactggagtcagagataccaatttgggaaggagaaggatctagtgacagaaacttgggagtgcccagtgggtaggtactggctataatcatggtaagaagtgacatgtggtagagatgttgtgcaaacagcaggccagaagcttgctccttagaatcctaatatctaaatggtgggtgaagaaagaggaccggtcaaaggacagtgagaaggggctgagaagcagaaggaaacccagcagagagtgagatggagaatgtcatcactcagggagtcctaaaattcactccgggaaaacccccaattctttacatttattcccaggcagactgaaatgctggtaatgcagataaaattttccctattgcttcatcgtagaatccttttactggaaaacaaacaaactgggtgggctatgggaacagatacatgagttctcctctctgctaatttaaccaaccacactgactcccatcacagaactgcacaaacaagccagaaactgaaccctacccggaatcccctggtgtatgaagggagcctagctctggctgactctgcttgtgttcacagacactttgcctcattggttcgtgcctcagcttccaatctggacatggagcacaataacagtgggcccactgctctccgaattcctgcgcgcacttgaaggtgagttaagaaatgctcataaagtgctttgagcccctaaaagaaagaaacgtgaagtctatacattatctttgtaagcctgtgaatacgtctttatctataaacgcctcatcttgaaagaagctctcctccagggcagtgttttatctcacccaatgtcagagctcagtattctgaataaagaatttggttaccatgggaactgaggaatctcaaacatacacacacccctgattccagaaacacaacaggagctgactcaaaaggtctggaagagttagaaaggggaaagatgacacaagcaatagtgaaggctagtggagggaagtggggctttcgtccaaggaagcaaaaaatcataatgtgttattttttagggagtgtctggtgcaggcatgcagggaggaagaatga

SEQ ID NO: 9063 - DNA, 2300 bp, Homo sapien
gcacgatccaattgtgctttggaaggatccctctgctggcagtggagggacaggggaaatggcaaggggttgagagatgtggggccaccggagcccaggaacagccaagtgtgagatgatgaaggtgggagaaaggcagatttgagaggtacctgtatgtggagggaggtaagagagaggaaggaagagaggattctccagggcttccagttaagcctctgggtagaagaagatgccgctaaccagaatagggattaaaggctgaagagtaacattaggcaggaggggcagctgtaggggtgttcatgatttagtttggggggcatatgaatattaagggccctctgtgaaatacattcatgcaacaattattatctaaatgtgtgtctgaccatgtaaaaatctccttagacttgggacagaactggagtcagagataccaatttgggaaggagaaggatctagtgacagaaacttgggagtgcccagtgggtaggtactggctataatcatggtaagaagtgacatgtggtagagatgttgtgcaaacagcaggccagaagcttgctccttagaatcctaatatctaaatggtgggtgaagaaagaggaccggtcaaaggacagtgagaaggggctgagaagcagaaggaaacccagcagagagtgagatggagaatgtcatcactcagggagtcctaaaattcactccgggaaaacccccaattctttacatttattcccaggcagactgaaatgctggtaatgcagataaaattttccctattgcttcatcgtagaatccttttactggaaaacaaacaaactgggtgggctatgggaacagatacatgagttctcctctctgctaatttaaccaaccacactgactcccatcacagaactgcacaaacaagccagaaactgaaccctacccggaatcccctggtgtatgaagggagcctagctctggctgactctgcttgtgttcacagacactttgcctcattggttcgtgcctcagcttccaatctggacatggagcacaataacagtgggcccactgctctccgaattcctgcgcgcacttgaaggtgagttaagaaatgctcataaagtgctttgagcccctaaaagaaagaaacgtgaagtctatacattatctttgtaagcctgtgaatacgtctttatctataaacgcctcatcttgaaagaagctctcctccagggcagtgttttatctcacccaatgtcagagctcagtattctgaataaagaatttggttaccatgggaactgaggaatctcaaacatacacacacccctgattccagaaacacaacaggagctgactcaaaaggtctggaagagttagaaaggggaaagatgacacaagcaatagtgaaggctagtggagggaagtggggctttcgtccaaggaagcaaaaaatcataatgtgttattttttagggagtgtctggtgcaggcatgcagggaggaagaatgactctgagcttgaccattcaacttcgaaactttaacatcaatggatcagcacacactggtgtacggtctgctatgcatgcagccctgtgctaggcaaaagaagtatcagaccaggaactgacagcctcactgcaacaggaagagaggcttcacacaataagcgtttcattcaaccaggctggacctgtgcttattgagttgaacatcactgagcacaaaatgcaagccagacaccataagagctgtaaggatgataaagatgtctttctaccctcgagagctctaagtgtggtcaggagagaaacacatgcaaagattatgctggctggaaggaaatgctggaatgaaggtggaaggtacatccagaatgttctgggggtgaggaatagcgaatgatgggttctgacttagaacatgaagggaaggtattaagaaagaggtgatattaagcatttattgagcatctctactttttttgtgtatgtgaccttgtttggaaatacaatatctcttcttgatgctggcaatgaatagtatgacaaccttctgtcctcacagagcttccaacaaacagaggctgtggagggttgagaggagctggggacatatgagcaaaggtctggaagtggatgttgtgtctggggtgggaggcatgttgggtggtggtgggtgggacgctctgagatcaggttgacatgggagtggtgctatgtgtggagggtggtcagtgccatcacagggcatttttactaggctttactgcctggtcaaacatttggcacccaaagttgatc

SEQ ID NO: 9064 - DNA, 2300 bp, Homo sapien
ttgggtgatttcgctaagaatctggatgtatggttttccttaagaatttggcaacactgtttcatatatcactgcatagcaacaagtggctggaactgccgtttagagatggggacctgagttcactctctgatttgcctcagtccccactatgccttatagcctaaaacagccagcttcatccatttccattacctgcctggttgctgcaggtattcaaatgtgggacctctgatcagggctaaactgttcattctacatagagctggggaaacggagataagaacaggtgaaaggtctttggttgtcaaagagttcagattagagtctaattgagggctttcgtgatatgaagatcattgtactaggtatcagaacttggcccccaggcaatacagtcctttcacaaatgaggcatcgtattgggagctctgtatacagctgcactgtttaaactacctgtccaccaggagattataatctagcagcactctccttgttttcaggggtgcagtccagttagcccatgttagcactgatataaatttgggggaagacagcaattatgctcttctcactcattctgtattctaggtacccaactccagaggatctaactggccaaaagcaatggtacagctctgggcctttgtgcatgctcttctctgttgtgtgcactcctacacatccctgaggccccagctcaggacactccactgaggtccccatcatagccccctggcagaattgactgcctctgtgctccctgcgtagcgcatttatatctattctgcacagatcttgttcttttacacagtagtcccccttatctatagtagataccttccaagccccccagtggatacctgaaacggtggacaaaactgaaccctgtatctactacgttttttcctatacatacatacctatgatatagtttaactttatcaattaggcacagtaagagatgaacaacaataataaaataacagcaattataacaatatgccagcattgctaagcttgcactttggggccattactaagtaaaataagggttacttcaataccgccacggtcgatccgatcaccaagctagctactaagtgactaagggcggctactagagataggaggctgaccttggacaaaggggcattccggtcccaggaatcaagatttcatcctgctacgcagaatggccggaaacttaaaacttaggacttctgtatttctggaattttccatttaatagttatggacaagagctgaccacaggtaactgaaatcgcggataaagggggctactatccgcagttctctagtacttgggagtttcttgcgacactcatttctgcaaccgagtgtctctcaacaaatcaaactgttcggaatgtttggaatattttaaacgaaagaatgcattcaacaggcagtgcccaactccccaagttgggattctctccttggatcagtctctcctgtttacccccctcctctcaccaccggctgcagggggacctctcactcctttccttcccagtccaaatgctgggcggtggagagccgcactcgcgacagacaccagaacgcaccttcgatagcacattcctgccccacctgcccctcagcacccgctgcagccccgacgagggtgggggtgggaggcagcaatccttcaggtcctcggcagccctgcgggcctaccttgtcccctttgcttaggacctgccaaggccacgtctctacgcttccgaacagcgagttcttgatcatgcccaacatgttgtagccgagacgctcccgacgcacgggaggacgtgaggtggcgggggcgacggagcaccacgggcagcgaccaccggcggcagggcggcagggcggcagggcggcagggcggcagggtggcagggcggcaaggcggcgggacggcgaggcggcgaggcgagaggcggggctagaggcaggggccagagggcgtggctagagggcggggcggcaattcagcccggcggtgaggcaagggggcgggacggcgaggtgaaggggcggagagagagggcggggcggcgaggcgagggggcggagagagggcgggtcagtgatgcgaagggcgggcagcagggcagcagtgcagcagtgcagcagtgcggtgaggcgagggtgcgaggcggctaagcaagggatgggcccgccgtggcgagccgctgggccgtgttccgcctcctttcgggctttccgcgggtgtctggggagggaacccggccgcgggcctcaggccgtccccctccgcagacccc

SEQ ID NO: 9065 - DNA, 2300 bp, Homo sapien
ctcctggaacttcactgtgccattcagggtgactactgctgtctggctccactcgagggaagccaggtaacctgtgttaggccgcgcttttcctggcggccttgtaaatctgttagtacatgaaaagcatgacgcacatggggattaggatgccactgcggtggagtaaatcgtgtagccaaagtcttgactgaccaagcacaccttatcatcgtttacattctgagcccgaccaaaaatggtaggtaaagtgacaaaggcggaaagaaggcagacagaaagaatcatcttcgtcatgcatttccccttctgcctcatagggtacgtgagaggcttcatgatcccaaggtacctgtcgatgctgatcacgtacaaggtcaagatccaggccgtgcagcacatgacattcatggagaagacgttacagaaaaagtgtccaaagatccacttgcccccgatgaggtcggtgacactgatgaagggcatgaccgccatggccaccgagaggttggccagcgccatggacacgatcaggtagttggagggctggcggagcttcttgacgaagcacacggagataccaccaggcagttgcccgcgatcgcagagagatgagcgtcaggacagagccgatcacaactttctcggccctttcttgatttgctccccgcggccggaggcattgcccggggttgcgtcccaggtgggcgccgggctggccgtcacctcgggggcccccgctcagcagatgcggcgtcccggagaccgcgaccggttcggcgccaccgtcggggctcaggtcgggcagcctgccccccacctccggcaggaggaaagagcagaggcgcccgtagaggtccgggtggccgctgctgttaacatccatcactgcgccgccgtgtggcgctgcccaagaagccgccccacccccctccccacccccgcggccgccacaggctccggctttcggccccggggcttcaactcgccggttcccctccgcccggcccagcttgaggcctgcaccggccgctgggcagcgccaggctcggcctcggggccccgcctgtcccagatccccggccgctgcgtgaaacgcgagagcgctgccgagcggggactccctgagggagggacctcggaccccgacggacgcccgggacgcgcgggctctcgggcgctccggcggggctcggcccgcggctccacagcccgctgcacccgcgcggctcggagcaatggaggatcaggcagcggcagaagcttccgtttcctcctttttaaatggctccaaaatatttcttgtcggtggtgtggagtagagatttattggtaaaatacttgacagaaagcaggcactcagctgagtaaatggtgacaaaattggtgagaagatttttgaacaggagtgaacgagaaaagccatgcttagaaaagtcacctggaaactgtgatttagagggatggtaggaaagagtggcagcaggaaagtggtttggatgctctttcaatggtctagaagaggtcatggggcgggggtagagggacagctaccaagacagggagcctggccgccgctgtaccagcgggatcgagccttcgggtagaggaccggagaagcgtgagcaacccggggctcggaggttggagcccaggcacctgagagaggacgttccccaccaccgctgcctaaagccactccaggcgagaatcgctttccagggccccagcggataggttagactcagaataagagaaggggtctgcggagggggacggcctgaggcccgcggccgggttccctccccagacacccgcggaaagcccgaaaggaggcggaacacggcccagcggctcgccacggcgggcccatcccttgcttagccgcctcgcaccctcgcctcaccgcactgctgcactgctgcactgctgccctgctgcccgcccttcgcatcactgacccgccctctctccgccccctcgcctcgccgccccgccctctctctccgccccttcacctcgccgtcccgcccccttgcctcaccgccgggctgaattgccgccccgccctctagccacgccctctggcccctgcctctagccccgcctctcgcctcgccgcctcgccgtcccgccgccttgccgccctgccaccctgccgccctgccgccctgccgccctgccgccctgccgccggtggtcgctgcccgtggtgctccgtcgcccccgccacctcacgtcctcccgtgcgtcgggagcgtctcggctacaacatgttgggcatgatcaagaactcgctg

SEQ ID NO: 9066 - DNA, 2300 bp, Homo sapien
ctggctattcctttccacccaaactttctcctagaaactcaagttcttgttctgcaactaaaatgaacatttttctacatccctgtcacattcacaggttatttttctcagtcttcatatttcaggaatgcgttccatttagttaaactgatatcaggcaagctactactggctcattgtgacttgtagtgttgctccttttagatgacctacatagatgtaaaatatgttttttaatcatgcctccagagaagtggcaagcagtagaaattttgggtattgtagaatgttgaaagaattaataaataaatacattactaaaccattaaattactatgaaatgtattatttgttattaagttacaaattttaaattgttaaaacattaagaaattatcgataaaagaagagtgaatacttagaaaacactaagtgccaggcactgttgtaagtgctttctacatatatatttaattctcaggagaactctataaactaggaactgttttgtccccattttgcagatgagaaaattgaggtggggagaaattaagcaactaaccctctgcctggcatctaggaaatgatagagtcaggatttgatctcgggaggcctggctcctggctccagagcctgtgctctatcagagacaatgacattttttttttccaagggaagaaaggaggtgagactgattgctggagactctcagattactcccacaggatagtcctgtctgcagtttctcacgggaattaggcagcctgcaaatgagatgtatcttggagcttttgttgtgacactcagaagttacattacctttctatttctcagctttctcttaaacaaaacaaggagagtgggactagatagcctctaggatctgttccagttctaagataacacagtattagcattcctgcactaaaatgctgatcacttgcgtgtgggaaagaagcaagtcagttcttccttctacaccactgtgcctggtcctgaggcaagccaagttcagaagtcagagagggcctgggtgtttgcattttccacagtgacctcagtgggtgtttgggcagcaaaagtattcacattccactcagtagctagagaggaacacacaggtattctctatgtaaaaggtaaggatcctgattcatttggcagctgctttgaatttttttctttaattgaaaagaaagtacattaaatttgagaaatactattctaagctgcagttcctatgttaaaatggaaaaaagttatggagggatgaaggagatttccagagggacaaggaagacaaagtgggggaaagctcagggagccaaggaaggaggaattcctgggcatcgggctctccgcaaaaatcattcaggcaaagctggggtgattacggggagcgtgcagatgccttaaaggtcaagcattgaaatctgaggagctggagatgctgcatctattggatgtatgtacacagtcggatcctccttctacacccttcaactagaagctgcagcgtagggtgctgagtagacacctgtaaagaactgggagcaataaatgagggttcgagctccaggaaacttcaacttctacctaagaagcgtaatagaaacactcttactaggtgcctactgtgtgctgtgtgttttaaacaggtcgtatcatttaattctcattgcaagcttgtgaagtaggtagtatgtctttaattaaaaaaaagcagcggcagctcagtcgccccaagggacttgcccaagatggcccagctagtaagtgattcaggcaggattcaaatccagtctgcctgatttcaaagcccacgcacattgcacaatccacacctccttaaatatctccttcgaatcattttcactgcaagcttacggggtattttctccccatttcactgacgaggcaagtgagactcagagtggtgaggtgacctgcataggtagggtgggagaaaagcctgcggagcgtgtactctggcttggcctccctcagctctgtccccagcaagcgggtcccacctttcccggtcccagccccacgcaccgccgctcggaactacacttcccggcagaacgcgggcgcgcgcacgcgcaccggggcctcagccatggcgaccgtgctgtccagggcgctcaagctgccgggtaaggagtcgcatgcttgcgaccacccagtccccgccggtgttggaataaggggaggcgaggctctgggggcgaggccggtcgggccctggcctcaacccagactcagctgcaggcgcccggtgccgaggagggtgcag

SEQ ID NO: 9067 - DNA, 2300 bp, Homo sapien
atagaatgggaaaaacatgacctcatggctagtctggaagagggggaggaacggccgggggcggatacagagggttttattaaatgtaagcccaaaatgagttgaacaggtgccattttacatgaattccctgggtatatattaagaactttctaaaattaccaattcctgggcctcacccagaactactatgaaatctcagggtgggtccaggaatcggcatattttccaaacttccaaagattgttctgaactcagttcatcagaactgagaacgactgctctaaaatgaaagtgagacctttgaggaagttacatttcagacaaatgcagtagttataatggaatacagaaagtgttgtgagaaggccgggtgcagtggctcacgcctgtaatcccagcactttgggaggccaaggtgggaggattgcttgagcccaggagttcgagaccagcctggacaacatagtgagaccctgtctctattaaaattaaaaaaaaaaaataagtgttgcaagatatagtgtgacaaggatcatgaggagggagctgtctgtcctagggagaaaagaaacattttcaaagagtggatgactttttagactaatttcgttgaaaggcaggcaattcaccaggtaaaaagagattgaaggcagtccaggcagaaggaagagcatcagcaaaggcttggaggatgaaagtccatgcagggtttagggactcacaaacagcggcagaatctctttcaacattggtgtcccaattaatttgcactttttttttttaaagatggagtctcgttctgtggcccaggttggagtgcagtggcacaatctcggctcactgcaacctccatctcccaggttcaagagattctcctgctcagcctcccaagtagttgggattacaggtgcctgccacaatgcctggctaatttttttgtatttttaagtagagacagggtgtcactatgttgaccaagctggtctcgaactcctgacctcaagtgatccacctgcctcagcctcccaaagtgctgggattgcaggcatgaaccatcgcgcccagctatttgtacaattttgaggagagaaagaacaacttgtacttctggctgactggtggcaagaacatatgcaaacgaccccttactggtttcttagattactttttcagcattttagaaactcttttttgaaatataaaatattgtcattcctttgcctgaaggttgggagaggaatggtaaatagccatggcattccagatcctggaattcatttatctccaatcctattctatctgcatctttgccacatccccagccaacattctcactcagcattccatgtgtagagggagatacttaatagtacttattcttttttttttttttttttttgagacagagtctcactctgtcacccaggctggagtgcagtggcgcagtctcggctcactgcaagctctgccttccaggttcacaccattctcctgcctcagcctcccgagtagctgggactacaggcacccgccaccaggcccggctaatttttttgtgtttttagtagagacgggatttcagcatgttagccaggatggtctcaatctcctgaccttgtgatccgcccacctaggcctcccaaagtgctgggattacaggcgtgatccaccacgcccggcaatagtacttattctaatgttctaactggaaggtggagaccacccatggaacaaggaagctatttcctgttcatggctccatgaggccccgacattgcagagaatagagtttcttcaaagggataggaaaccctactcgagggaaggtaaacttctgcagtgatggtgacctgccatatcttcgtctgtcataaatccaagcccaatccattcacaccagttacctagggaatggcaggcagtggaaactaaaccatcatttactttttaaagaaaatttcctctgcaaattgcaggtccttgcttctttgtgcttaatcccagatccccattggcaagctctctggtgtaatctcccagaacagctgggccctgattgccttgtcaattattaaatgcccgtgttccctgtaaggcagcatttaatcatgaggcactccaaagaatatgagatagaaggggaggggtaggaggagagggaggagggtaggaagacagtttgcattcttgcaacattaaaccaaagggacttggagtgcagatggcatccttcggttcttccagacaagctgcaagacgctgaccatggccaaggtaaccggcttcccctcctattg

SEQ ID NO: 9068 - DNA, 2300 bp, Homo sapien
cagtggcaggatcatggctcactgcagcctcaacttcccgggctcaagcaatcctcccacctcggtctcccaagtagctgggactacaagcgctcacaacctcgcccagctaatttttgtacttttcgtagcaataaggtttcactgtgttgcccaggctggtcttgaactcctgggctcaagttatcctcctgcctcggcctcctgacgtgctgggattaagcatccggccataatctcatttttaaaattcagatctctagtccatctagagtttattcttgtatatgatttttaaataaatataatttatatttttctaaatggctatctagtttatcccaacaacatttcttaaaaaaatcatctgtgccccagtgattacagatatcacctttgtcctatactggaagtctatacatagctgtgtttatctctagactttctgttctcttccattggcctgtttgtctagtcatgcaccagtaccacattgtttttttttggtttttttgttttttttaatatactttaagttctagcgtacatgtgcacaacgtgcgggtttgttacatatgtatacatgtgccatgttgttttaatcatagaggctttgtagtatgctttatatcaattagggctagcaccacctcagagctcttccttttcagggttttcctagctagtcttgtgtatttttttcccatataaactttaatatcaacttgtgttggtcttttaaaatactcatggttatttgtattaaatttataaattaacttataacggacatcttgatcaatttaagatgtgccaaaaataaggcatgttgttccattggggaagttattggcacttcgagatccgatgttctctcttagatacttccttaggtagtttaggtcattaaataaaataataaatatttcttgagcagctactatgcccttggcactatattaagcacgatagaagtaaaaaaccagattctgtcctcaagcagcttagaatttcacgagagaaacagactaacacaccaaaagcaaagcaggcatgctgtatgagcaaagaggaaatggggagtaaggagggctagagccacaaggtagtgagactggaatcatgtgccctgaggttgtgtaagatttaggcagggcagcaaggagaaggaagggatcccagtgaggggaaccctggcaaaagctcagaggaggactgagtgtgacaggtttcacagggcagagggccccatccagactgttagctggaatcctggatgaggccctcttccagtctccgagagttatgcctccatattaacagtccccaaacactaattatgtattcattaaaatgatgttagtgaatgtttgctgggtttccagatactagccctttagaatggtaatttctgtacattgttaccttttcagggaatggccttgagttgtgccatccaatacagtagctacttgccatgtgtggctgtggagcccttatgatatggatagtgcaactgagcaactgaatttctaattttatgtaatttgaattcactaaattttaattttaaaatgaaagtagtataaaatatttttcattaaacccaactttattgtgtggggagggctacattttaaacatagtattgtataacatatgattgctgtatcacagtatgtgtgtccaatttactttttttaatgtggctaccagaaaattttaaatgacatatgctgcccacattgcattttgctttgacagcactggtctagagtctcacaactcagtgtggtctggctggactcacgtgagagccatcccagactctgcacttgactaagtcaggatctgcacttgactaagttccccaggtgaatcttatgcacaataagataagcactgatctggacgacctcagaagacatccagccactggtaggtacccagcatgaccccccccaatccttatgggaggaggctgagggagcaacagggagacccctgactgccgttgtgacatcacagaataaaccccacgggtcacccaaccccgccctggctggtgtctggccctcaggacatcctctccaatccaccacacaccaccttacccctctgctggcaagaggggacctgattcatcctcacgctaaacactcattctacccaactgattgagacagaacagaagataaactgaaacttctctgccttcccgctgcaagagtgaatgagcgatccctctcaactgactcaaaatgtttgcctcacccaggaggtaggtacagtgattttga

SEQ ID NO: 9069 - DNA, 2300 bp, Homo sapien
tccaggtttctctttaagaaatgcaatcagaccacatactcctcagcatctgagaacacttcctctggagtccagttctcctttccaggcagctgagggaagagagactttaaaactggcagagggcatcaggggtgaaaggcaaccctgagagtaggaaaaggccagggagacaggccgattccagcaggggagactggcccatctggagcgccagcacatgcctggggatttcctggcctcacctgcagacaccctcccctccctgagggttgggatgctcagagatcacagggactctcaacccactgctgggagtggcccctctcagacaggcatttttattatcaaatgagcaatgagagaggggagaggtgaggaactctatgagaaacatgcagtcttttatcacgtcatcagttttcagtgagaaaatccagaccttcttacttttacagagatagaattcagttctcagggacttgtgaagatgcagcatcatcaaatcattgtgtgtgtgtgtgtgtgtgtgtgttgtgttttccttatcatccaccttagaaaatattctccacattcccatgttaaaatattttttcctaaaatccatccatccacatgccaacatcctaaagacagtaatataggttcattgcagaggatttggaaaatacagaattgtgaccagaacaaactaaactgcatccataattttatcatcgaatttgatcaacattttggtgaatagccaccagtctgttttctatctttttagggaatataagttccaagaggcagggatgtcattcacttctgtgactcagtgctctgaatcaggcccagtgaagactgacgtgcagcctgtattggcagaatgaatgaataaatactacacacgcatattttgaattgaaataagttgtcagggtgcagcagagaataacagaaatagaattgcttggatgtgctgacctagatccaagctgctactggtaacgtactgtatctccttgaataagtcacttcacctctctgggcctgagctgcttcttcagtaaaataatccttgtagctaagatttgttgagcgctcactatgcacactgccatgagcccctatatgtgtatttctcatcatagctctatgagttacatacctgccatctccattttatgcatgagaaaataggcatggagaagttaagtggtttgcctaaagtcacacagcaaatttgtggagagctgggcttgaactcaggcatctgggcttttactctctccagtggaatgcctgggctgtgggatgagatgacttcacaggcctctcccagctccagagttgagagagagagaggagtggtgcagggaggtagtagggatgattatgctactggccaagttcaagaaagtcaattgtagaacaaggtccagctgattattacagagagcaaagttcttaactagaggacttcctcctggaatgtggagagtccacacgggcactagcagagcataatgaaagaccaggaattctctgctgttcaatcagtgctccatcactcagaggcagggctgcaagagctcctagtgtgtccccttcgccttcagggcctccctgtacagccacccacaggacagtgcaccagggtcaggcagggaagtaaataaaaaaaggaatctgataattcctgacagtgagcagcagctgatgcttttaatgggggaggaagactgggaatctcgcttgatgatgacctaggacttcagtcagcaggacactggcccctttcctccccctcccaggctgaaaccttgtgttttgccttatgtccatggtaaccaagtctcctttttggtgaggaggaatgggcttcagtaaacagatctatttgtgtgatcctgttactcatttgaagcaatgtccctccttttttccactgtggtctgtgtgtctgagtcagagagagcctacaacagggttctttgaattgatggctcactcccagccactcttgactgactgccagcttagcagggcgtagcttaccaacaaatcttttttttttttttaaagccagactgattcatagaaactcctttaaaacacggtgaaaagaaaccgcccattacacaccccagtacaccagcagaggaaacttataacctcgggaggcaggtccttcccctcagtgcggtcacatacttccagaagagcggaccagggctgctgccagcacctgccactcagagcgcctctgtcgctgggacccttcaggtaggacagctcccaacgctgtgggg

SEQ ID NO: 9070 - DNA, 2300 bp, Homo sapien
acacacacacacacacaccaaaaaaacagaaaccagggaacttaaccataccacttgctgctctccaacatcttttcaagccctgcctgtcttcttacctctgttgtcttctatagctagtgggaggcagcttctctggggtactctgtcagactctgtcagcatgatgccttaactaggcaatttcttatgcttcctaggcctagataacatagccagcaatcctacctgctgggccagggtcaggaaacaaactgaagacactgtggaaggcttttctgagatcacctagaagccagggcaaagaatcaacagagaaaccagctgactctagtattgactgtgagtagcagaaagaacaccaaactaagagctccaactagttctgctagttagctttggttaaatcctgtctcccctctggagtcatctacaaagggagaagattattctgatcgtcgttttgtgagtgccaccagaggaacagagaactccccgctgccgccccaccttttctgatagccccaggatttcaggcctgcctcctgccttcctatgtgtggacagaaataggctgtagggagggctaaggctgggaacacaccctacagagtctaatacctgctttgcctcacaaaccatgttaaattagaaataatgcataatcaggctgttttatcctacccagaagctagcagaaagaatttggcaaaagctgttaggaggtcataggagagaaccatgttaccattgttctcagaggcctcaagagaaggtggtgtgttctagagttagttgtaactatgcaaatgtggtaggcagatttctaagcaggcccccatgccgttaaccctatgatgtcattcctatgattatgctatactgcatgtcaaaagggatttgcaggtgtaattaaggttactaatcagttgactttgcaatagggagattgtccagatgggtgtaacctaacaagctatagagctttctttagctagtggcagaaggggaagtgagagataaataaaatatgagagggatttgatgagaaagaggttctctattggtagcatggagggagttatagggaatgacctcaagagagcagtgtccagaagccaggagtgaccaagagtcaataaccagcaaaaatcaggaattgcagtccttcaaccacaaggaactgaactgaactctgctaacaacttgaataagcttggaagtggattcttcccggagcctccagactataacctagctcagccaacaccttgatttcagccctgtgagacactgagcaaagaacccagcatgagcccacccagactacagacatctgagatcataataagtaggtgttgttttagccatgatgtttgtggtaattgttaggctccctaagtgtggctgcactatcgccaggccattatgaactctgtgaccaacatgtacacctccagaagtgaactctgtgactagcacgtatacctccagatagctccctggaacaaagaggcccaaagcaacaaaagaatgaccgcaaagaagaaaaacagcaagttcctgttccagccggttaaccatccctccaaatctataacgaccaacccccagctgtaaccttctgtaactttccacttgctaccccagcctataaaaccccctcttcctcattcctcaatgctgactctcttttcggactcagccggctcacacccaagtgaataaacaagccttgttgctcacacttagcctgcttgggttgtcttctcaattaaacacgtgcttaacagttatttgttacacagaaatcaaaatgttaatataacaagtaactctgacccttctgccattctgcctttgctgggcatcttgaatctgcagctggttcaagggctggtatctcaaaagaggaaatccagttgtgatggttaatcttttgtgtcaacttgactgggctaagggaagcccaggtacctggtaaaacattatttctaggtgtggctgtgagggtgtttccaaaagagattagcatttgaatcaatgtgcttagtaaagagatcatcctcaccaatgtgggtgggcctcattcaatccattgcagacttgaatagaactaaaaggaagaggaagggcaaatttgttggctgcttgagctgggatattcatctttctcctgatcttggacatcagaactcctgattctcaagcctttgggtttggactggaggcaccagctttcctgggcctccagcttgcagatggcatatcatggaacttctcagcctccaaattcatgt

SEQ ID NO: 9071 - DNA, 2300 bp, Homo sapien
tcattggttcctgctcttcctcttatctccttagcattgacttgccatggtatatctgagcttgaccctcttctccttatcttaatgcttctgtagcaatctttctgtcttctatgatttcaataactctttgaatgaagatgaatcccaaatcttcacttttagcccctaccttttgcttttccttcatacacatacttccagtcaccttctgaacactcaacttcatcttgactcaaatatccaaaaccattgctgcaaaccaacataatcaccaacttcctccttttgcttaatggtatcaccatgtcttccgtcaccgaactcaagcttttcaggcacttttgcctcctccattttcttcatcctgcatatctaaaaatttgaaaagcctactaattcttccccctaaggtttccagtctttccttttcattcagacccttccttctagtctggattatttcagcgtcttttagcattgttccaatattttatatttgaatctactcttgtcagtactcacttcctacatataaatcagatgtcattcttcagatcaagaaacaaccttcagtgggcttcacttgccgtagtctgccagcaataatttcttgttacttgactatgtgtgtgtcccataatccagacaagctgaataacatttgtttcacctttccctaccagcttgttttcccacttgcgtcttcccttaaactgttccctttgtccaaaatactctccttcctatctcccatctcactcccttcttgaataatatccattccctctatataagtcttcaaagaccagaacaacttctttatcttccattcagaaaataattttaggcattttatgaatgcccataacactttcgttgtttctccctagtggcagctatcatgggccatcttatttcataggtatttggttatacatctcatctctcctgctacagcataagctccctgtgttcagggccatgtatttttaaatctttttatctcctgtagcactaaacagagtgccttgtatatgaaaggcattagtaaatatttgatattattataaattataattgagaaggagtcactttattttgcccatttgtatctgcagtagcacctaaggatgaatccccccagtttctctatatatatctgcacacacaatcacatgtatatactacatgtatacagttcattatttcaaatggaatctggatttttctaagtgctttgtcctttttctaagtgctttgtcctttgaagttgttttggactgttttatggttaggaaagtgtacttggaacactacatgtgttcaagtaagtgacagagggagaaactatgaaggatattgatcaaattttaggtatcagcttttcagatgctttgggtagagcttgtatccagacactttactaccaagattgagtctctaataacctgatccatgctgggactgatctgtgatccaatatttagcttcttttttaacactttcagcaccaaaagaaccttgtcacagttctggctcactaatcacacagccttgtagaccccaggtggtggtccaacaggaccactgtatttcaccacacgctacttccacatttgtggccttgggggaactgtctgtgctggtcaccaccttgtctttatatttctttcctgagttctttggcttctcaccctttctgaggctttgtctacaggatcacttctcccaaagggaggataagagttgaggtaattgagcactttacctcttatctgtatatttacaatgaaagtaagttaggatttgaatgagctggctcagagagaatgctagtctctaaactactcctttctctgtaaatataaagggattcattacctcagggggagacaacatcacttctgaccttatggccctcccttatcctctggtccctgtattcttgaagccctgttaacccttcctcctcctctcttggctctacttagcaatctatcaatcattctttctagccagtgtcagtctctgtccctctgaagaaactcttggagctcgtactgtcctttcacttcagctgctctggtaaccgataatgttttcgttccttctcccggccagccttctctgtaaatctcattatgccattggctatgaattattcccctttgggaggcatcttctgccactgtgtgctaatttaaagcatactatagagaactgaactcaaataagttacaggcagtgacaagtctctttttttaaaaaaaaagtgaagaaagtccactcttcattga

SEQ ID NO: 9072 - DNA, 2300 bp, Homo sapien
tctccgtcggtgctgttccccgctgcggccgggaggaggcgccacggactcgggctaagcttcttcccccttccgtcccccttccatccaccttaccaccccacttccccagcacatgacgtgggaagctgcctccgccagagtcttagcaagaggagtgagggggtgcaggggcttgggggtggggtggggtggggggtgtggagaaagaggacacgcgcgctcacacccgcccctgggagcagaagcagtatcttccccagcttcgtgggtttctcctccccccggagtcagggtgtgcgaggtagggggtgtgtgtgtgtctgtgtgtgtgtgcgcggcacgtttttgagtgtgagacccaaatccagaccaggcaacctgcgttccccgcgcctccccccgtccccggtgattaatacccatttttctgacgctcccctcctcccctcctgctctccctctccggctgccgcgcggttgacttgcacagcctgcccccgcccgcttcccttcccccggctccgatcctcaccaactggaatctgggctcctgcctctccaccccccacctctttttgagaaaggaaggttccccccaccccctttcaaaaaccacttcctccggcttcttcacctctaggaaatctcggggcttcgctctatcgagagtgctcgtcaagggtgattcttgatcaccaccatccagtagtgctggcgtccgaatgcatatccttttgccttgcaaagaagagtcatgaacttcaaaacccccgagacggatcattaatcctgctttgcaggaaaggaaaaccctccattcccagccaccggccacccctctccgcagactgcaaccgcggaggcgctcggagccggtacgtaaagatgggctttggagtctctcctttgaatgtaggggtttgggggtgtcaggcagataaagggtcgaagccgtgaaatcgtgaacgaatctggcatgaggtaaagctctgaaatccagcagaacccggcacttgctaatttggacgtggcttttttaaaggttttttttttttgtgggggagggggtgctgtgactgggtagggctgtctctggtcttttggggggtttcatcccttcacctagcagaggggcagggcagcggcgccccgggccggacccacgcgccgagcccatccgtccaatcgacacgttgcaggtgaagccccgtgcgctgcacctcagcgcggcggcagcgtgagtgtgcgcgggggtgagtgtgcgcgggggtgagtgtgagtgcgcgcggggcgcgtgcgcgtcgggggcgtgtgtgcgcgcgtcagtgtgccccttccaagaaatgcccagtgtgcaccccgtgcacaatcagaacccattcagcacaagcccggggtgggaggcggcgctgctgctggaggcgatggggagagcgagcgagacaagtcagcagcaatgcagatggggctgggggccgcactcgctggcgagttaagtgggaattgtgtttctgcgtgtgtgtgagtgtgtgttgctgtatggtgccgcttctcccccccttcctccttccttcccacttccctccttcgctcgctccctccctctctcctcttccattcaggttggctttcccacctctcatccgtgcctgtcccaggaatggtatagccagaccttttctgaattatttatagaccggtaccagctgttttcaattcctctcgtgtgcactctgtgggaaatgcggggtttcctcccccctttccttaaaacgaattgatatctttttcggaatgcatttttctcaccctccgggggacacgcgaatcaagccctgaccgcctctttttcccccttaggaaggggacgctttgggaatgaccatgctccaccgagggacggagccggcccccagcttctccacacagagcctcctccactaacgctccaaaaaccaaaaaccgtaattgccagaagaagcgttaaaaatctattccagccactaacctcacatgcacacggaataattactctggattctgcattgtgagctgctctccataccctgaattacctttgaattaaatctttttttttttgaatttgcatctcttcaagacacaagattaaaacaaaatttacgctaaattggattttaaattatcttccgttcatttatccttcgtctttcttatgtggatatgcaagcgagaagaagggactggacattcccaacatgctcactcccttaatctgtccgtctagaggtttggcttctacaaaccaaggtagggca

SEQ ID NO: 9073 - DNA, 2300 bp, Homo sapien
aaaagagaaacataatgggctctagtattccaatccaatttctcttattattatggagtgtaacatttaatatcaatatttctaattttctgagcatctacttataattgagcactgatgtactatgaaaattataataaataaattataattgagcatctataatttattgagtatatgctaaggactgtgctaatgatgttacaacatttagcgattaaacaatgcaaatttaattgtgttatatcccgacttaaaaccttttaaatgattcctcattgctgtcccaatgaggtccaacttttaggcaaaaaattaattaaatcatttatcatgatagagatgacctcttctaggaaggcttttctaattctctaggtctggattaggtgatatttcttttttttttcttcgagatggagtctcactctgttgcccaggctggagtgcagtggcgtgatcttggctcactgcaacctctgcctcccgggttcaagtgattctcctgcttcagcctcccgagtagctaggactacaggcgcgtgccaccacgactagctaatttttttttttttgtatttttagtagaggcggggtttcaccatgttacccaggatggtctcgatctcctgacctcatggtctgcccgcctcggcctcccaaagtgctgggattacaggcgtgagccactgcacccggccctaggtgatatttctaaaggccaccttatattttaagtaaattgaatggttccagttataaaaataagtattaacaaccctattctaatttcttattagttacaaaaatttcttgttcagttttctgtcttcttcactagagtacagatttcttgaggacaggcacctaacagatctacaacacagtgattgctaaataaatactgaaccaatacattcatataatgagaagttacataaaaaaacaataaccacacggtaccatctaatattattttcaggctattcttgccttgcaaaacatatgtacttttattctttttttttttttttttttttgataaggggtcttgctctgtagcccaggctggagtgcagtggtgagatcttcgctcactgcaatctcggcctcccaggtcccagttcaagcaactctcctgcctcagcctcctgagtagttgggattacaggcacgcaccaccatgcctagctaatttttgtaattttagtagagacggggtttcactatgttggccaggctggtcttgatctcctgacctcaggtgatccaccccccctcagacttccaaagtgctgggattacaggcctgagccacggcacctggccaaaacatatgtacatttattctatcatttagtgcttccaacctagttcaactatagtcatgattgccattatacaggtgagaaaactgagtaacacacttattccgaggaaccggcaaggaagctgcagtagttgaacttgaacccagatctcttaaccagtaaggcagtgacttgtccactacctcctgtggaattcattaaaggccgactcccagcatgaaattgaataaatgggatgaatacaacttctggtgagagagtatgataaaaagtgcttgctctgttaccaagcaactgaaagaaagtatgtttttttcattccttcattattaatacaattcaaagtacattctgtgaatttaaaacataaatgatgaataaatcaacatactcctggcttttatgaaaatctttccctctgctctttaaactctcacctacctccttccttctttcttttctaagcctcatagagggcgctcacaaagtgctacttattgattgaggaagatccactcaaaaaacacacctcacactgcaactgagagacgcagcgccaccacctcgggcttccttctcttttccacgcaggaggcggggccaatgtccctcattcaaataaaaaaccagaatttgcatggggaatggctagtccttgagcttattggctgatagcacagtgggcggggtacatagcacgaccccccggagccccgcccatattaatttgcataacggccccggcgcgtgcaagggagaagcgggtttgtttttgaatctgcggaggcggcggcggtggcagcggcggcgcggcgactgaagcgcgcgaaaagctgaggcggcaacgtcggggacggctgcgcgggacggctctgtaggaaggaacttggttccccctccctcagcttccgccccaaaaggtatatgtgaatcccaggggctgttaaaaccacattttcttaaattact

SEQ ID NO: 9074 - DNA, 2300 bp, Homo sapien
ctcttggtagactatgtttagactaagaaaaaagtagtcaggatttacattggaaaagtatttggcaagagaagggaggcttgaagaagatatcatccatttgacagtgtgttccataatttaaatctttgtggatcagacttcctaaaaacactttgcttccagaatgtaagaaagtgttcattaggcagctctgaatattttggctatgtgtaccatctttccccaccccccaattaaacatagattccagtgctacagtaatatcaattctgttccagcctttctcaatttaccaaatcttgcttttgtttttaattataattttttttgagacaggatctggctctgttgactaggctggatggagtgcagtggttcaagttcactgtagccttgaacttctgggctcaagtgatcttcctgcatcagcctcttgagtagctggaactacaggttcatattaccacacctgctaatgttttaaaaattttttttgtagagacagacagagatctcgctttgttggccacgcaggtctcaaactcctggcttcaagagagccttccgccttggcctcccagagtgttgggattataggtgtgaagcactgtgcttggcctaaatcttgcttttaatgaatagtctttgcttgagaatcacagttgtatttttaaagaattaatatggcttggatcaagtttaactttttttttctgatatactgaagttgttacatacattattcattttgcctcatggaaaatacataaggaccttttaaagataagtaatttaaaaaacttttattatggaaaatttcaaatatatactgaaatagaatgagataataaattctgtgtgcccattgctcagcttgaaccattgtcaagtcatagggccaatctccttttagctatatccctattactcccctatacccttaaaactttttagtaaatacctatatttagtgatagatagaacaagatacacaggttagctagattttaggaaggtagactgaggaagagagaaagaaaatgtggattctattgctgatgtgaacaggttctctctgtgcttttgtccttcccttctctttgattgatatgtttctgccaacccacatttgttggagctctttcaaatttgtcttgctaatatatctattagactgagttttactcttttttaaaattcccttctttccatcagggtgcctataattctttgtttttatttgcttttcactcacatcaaaaagttgggaggtctttgtcagggcatgaaatgtaatttgccctgggactaaacactcacctggggatgttaatgtttgtgaccatctgtactactgaagagaagaaattatttttatatctatggtaaattactcaataagctttttgccatcttctagagattctgttatcaaggttcaaaaatttaattgtaggctttaactgttctgctagatttgagcactttggggcttttagattctgtggagaaaatctttagccttctataaattgaaattaacttaatcaatcaagtcattttcaggatttaaacaattttctagaaattataaaattgaaattcttttcatgataaaactataaaaggtaaaaaaaaaaaaaaggccttgagcaaggtttaactttttttttttttttctggactgaaatggaggctttctttcaagcgaattccctgatgtttgctctgtgtgatttggctccatctctgtaactgctaatatgtggcatggatttcaagttgtttgggatctggatgtgcccaaagtctgtattgcaagacgggattcacaggcattatgttacaaaactggcttgctgccttctgttttctttttctgtgtcctgtgtagctgcattgtttgttgcagtatatgcattagctgttgtctatgttcagtttcctgcaggctgacaaagtgggaggggctttgtttgttacatagctgagttttcactgtgtgagttcttgagtgcacattgcagccatcttaattacacttttgtgcaactgagactgtgcagctgtctcaaaatggctgctaacctagtctttgtagctgcttaggcagcaagtatgtcagtgaggagacttgtcacatgcatcaggaccagaggtaagaaccaattactcttttatcttaaacattctcatttttttcttttttaaaaaggaatttaactgagtttacttagaggggtgaacttagagcttggtttttaaaaagttgaaatgtttggtagaacctttaagcc

SEQ ID NO: 9075 - DNA, 2300 bp, Homo sapien
taaaaatgtctttaattttcatgaatatttactttgtaatccacacatttgttttataataaagctttgaaaggatatctcatataaccttttgtaacttgctgcgaaaggcagttaaggagaaaaggatgtagtaattgtacttataccacttaatataggttgtccagaatcagacatttagatttcattagatgaattaaactaagtcagttcagtgcagtagacagcacaacacttcataatactatccctagtaatcctttgggtccagaatactattaatttttggaatcggaaatctgtaacaatagtggtagatgggtatgaagattttttttttacttgtctggatttaaggttttgctagatttatatattttatatgtatggtctatggaatttttaaaaagaaatttacatttgaattttgcattgtatagaaaaatatgttcttacgtatattgtccatgtttgacttattcctcaggtaggaaattaatttatattaatgtatatttcttgaaatgttcatggatatttattaaagcaaatagcataaaagatgtaaatcttatccatttatgtgtgtggtatatttaatgcgtgttacgtggatttagggttttatgtaaactgtgttctagattacttatttcaaacaaagaaccacacttaagtattgcagatacagtttttgtttaactatgtttttctgaccttattgtctgtctcctgttgctgggcaggaatcagaatgctggctgctgattggctgagtttgtgagcagctcttgaacagccatttaaattcttgagctttttgagcaggcagattgtaggctaagacataacagcttccctttgttgtttcattgctatgatctcttgctagaaagaagtgggtggagggggatgaagcagagaagagagtaatgttttcatttaaagaagaagctcgttgggctttccttaaaaatattttaaaaataatttaccaaaaatttgaaaaaaaaatttccaagccagagagacttatttgcaggtaacatacccttctctggttatttaaatataaatttctatagaaaaaggttttattagtgatattattttcccagagttcttgaatatacagagacttaaaaaacattattttgactctcatcctcatgaaaaaaatactttcaggagaaactagttcatcatgttttgcagttacttttagacatggcagacatcttctgccgtaaaataccaatgcttttttctgtgaaaatgaattacagtcatgtgaaagctttctgatttgagttgccacctaaaatactaacatttattttatagaatagttttatgaatggcatcttagttctaggcgacagtactaaaatgatccttggaagtgttttgcactggtattacagccatggaaacttgtttgcaggtaacacacccttctctaatgtgtatctttctcaaatatgcttcgctaatgcaaaatacatttctaaaagcagactgctgattggtttgtacagatatggctgaactagtttgaactaattgttcgtgttacttccttattgctttgtctgttttttattatatttagaacccataagatctggtaaatggctgtagtgtgctcccttgtgggtatggatggtagttattctataattctttttagagtgctttattattactgaagttaatgacaattttattgataaaatcaacttttcttgaattatatatttttattaaatattatttggtggtggcaatttaatattaactgtgaggtttacatgttggattttctaatttatataaaaaataccaaagaggaatttgtcttagactctttagtttattcctaaaaacattatcctgaatatttagtttattcctaaaaacgttatcctgaatatatagatggtgatggttataccatttattgagttcttactacattccaagtgcttaatgtatagaatctcatttagttctcatggcaacctttgtgacaggtgttggtattagtccctttttaaggtaaccaaaactaagaaattgatgttaggtaatttgcccagtctcacacagtaggtttcctgggagagttggaattcaaatctgtgaatctgtctacagtctacagagttcatgttcttaattgggttattaaaagtgatgaatttttttaaaggaatgcttacttttaatgtaagagttcatgttcttaattgggttattaaaagttatgaattttttaaaaggaatacttttaatgc

SEQ ID NO: 9076 - DNA, 2300 bp, Homo sapien
agaatacacacacacacacacacacacacacacacacacacacacacacaacctttgtatttattttgaaatttttttgtagtggcattactgagataaaaccacatatctactattcacccacttaaagtacaattcagttatttttagtatattcacagagctgtataatcatcaccataatcaatgttagaacattttcataaccctgtaaagaaatcctgtaccctttagcagctactcctcattttctccagaatcttccaaccctaggtagtcactgatttactttctgtctctagatttgcctactctggacatttcatataaattgaatcattcagtatgtggccttttgtgactggcttctctcactcagcatatttttaaggtttatgcatgtagtagcatgttcagtacttcattcccctttgtggttgaatgatattctgttgtaggggtatggcacattttatttatccattcatcagttatggaacatttaggttgtttccagttttgggccattatgagtagtgcctctatagagcatttgtgtacaagtttttgtgtggacatatgttttcatttctcttgggaaatgaatggaatggaatcactgggtcatatgacaactctgtacttcacatattgtggaactgcctgttttccaaagcagctgcacctatttgcaatcccactatcattgtatgaaagttccagttttttcacatccttgccaacactcattattctcgttgattgtagccgtcctgtcgtgtgtgcagtgttatttcattgtggttttgacttgcgtttccctgatgtctcatgatgtttattgcttatggacttttggcttaggggtctctttctggaaatgtctgttcaagtcctttgaccatttttaaattgggtgatttattattgaattatagcagttcttagatattctagatataaaagtctgtattctatataaatatatattctgtattctagatatgaaattctagattcgagataaaagtcttatcaggcatatgatttgcaaatattttctcccattgttgtgaattttctttcttgatggtaatcttttgttaatatgtttatagttctgccaatctaagtatgcttggttgcaaatgtaatctttccttacatgtttcttaattcttcctcctttttcctttatctctatacctgttatttccctactgttgttcttacacttttatttttctttctcattttcttcaggtacttttttttttttttttttttttttactttatctaccttttttttgcttaaacatctccatactctgtgaattccatattggaaaaaaaaacttgtcccttttccccctaatactttctagttgattttctagtagactatggccatttttgattttgtattacacagatgcagtaaatatgataattagtatacaacaagcagtaggttttctatgtcttaaacattacatgaaatgtgctgcttgcatctcttctaagatcaatttgtattaagtctacaattaggtggcttctgtttcagttattaaactctctttctcttttttcttaaagattcagaatggacagtttagaagaacctcagaaaaaagtctttaaggctcgaaaaacgatgagagtgagtgatcgtcagcaacttgaagcagtgtacaaggtcaaagaagaactgttgaaaactgatgtcaagctgttaaatggcaaccatgaaaatggagatttggacccaacctcacctttggaaaacatggattacattaaagacaaggaagaggtgaatggcattgaagagatttgttttgatcctgaaggaagtaaagcagaatggaaggaaacaccctgtatcctaagtgttaatgtaaaaaacaagcaggatgatgatttaaattgtgaacctttgtctccccataatataactccagaaccagtctctaaactgcctgctgaaccagtttctggtgatccagcccctggtgatctggatgccggagatccagcctccggagtactggcctctggtgattccacctctggtgatcccacctctagcgagccctcctctagtgatgctgcctctggtgatgcaacctctggtgatgccccttctggtgatgtgtcccctggtgatgccacctctggtgatgccactgctgatgatctctcctctggtgatcccacctctagtgatcccatcccaggtgaaccggtccctgttgaacccatttctggtgattgtgccgctgatgatatagcctc

SEQ ID NO: 9077 - DNA, 2300 bp, Homo sapien
agcatcccagttactctgtctctctggaaactctggggactaggaagctcaggagttactaacaatgagtattaaaatcagaaagatatggaaaaatatagaaagaaaaatgtattttaatgagtttgtgatctgtttacaagaaagcaaacaaatttttatttcactgaaactgaggttgagagatgaggtcttaaaacacttaaaatgagcaaagggtagtaaatggagagttaattttcaaataatttattttaaagttcaaaaatagttttagtaattctgtgtactgtgttagcttattgtttatcttacagtgaaaaaaatacttctagcgccttaataggtattcatcaatgatccttgtccttgcctattttcacctaaaatatcttttaaatttttttaaccttgacttttgctattagggctgttgtgattaaaatcctgatgattggagaagaaatgtcttatcagaatctttatatagcataatatactttatgattgtttatttaatattagttgcagaacgtgatgaaacatagcatgctttattgaagccactgagaagcaagttgcaatgacgtaagggggaaaatagaagtcaaacatcttaatgaatttttttttgtagctcccttattcctcatttaatgagtaggttagttgaagagacattgattgattgaccaaaagaacgttttggtacctcttggattttatttaatataattgtatagacatttttagcaatatcttttggcagcactcttcagttgttacattttatatgactcatgcaaattaacccttctgggccagtcgaggtggctcacgcctgtaatcccagcactttgggaagctgaggtgggaggatcacctgaggtcaggagtttgagaccagtctgcccaacatggtgaaatcctgtctctactaaaaataaaaaaaatttaggcccagtgcagtggcttatgcctgtaatctcagcactttgggaggctgaggggggtggatcacgaggtcaagagatgaagatcatcctggccaacatggtgaaaccctgtctctactaaaaatacaaaaattagctgggcctggtggcaggtgcctgtagtcccagctacctgggaggctgaggcaggagaattgcttgaacctgggaagtggaggttgcagtgagccgagattgcgctactgtacactagcctggcgacagagtgagactctatctcaaaaacaaacaaacaaattagccggatgtagtggcgggtgcctgtaatcccagctactcaggaggctaaggcaggagaatcacttgaacccgggaggcggaggttgcagtgagacgagatcgccccactgcactccagcctgggcgacaagagcgaaactcagtctcaaaaaaaaaaaagaaaagaaaattaacccttctgaatgttttcctcatctatatgatgacaaaaaatacagtttacagtgtgagattatattgtggccatgtgataactatattaagcacctagctcagttgttggcactgttatcaaagtaggtatatatttaaagtttttattatatttgggatagcctttccattccttatttatgaactctctataccataagcattaaagtaacttaaggattcaacctgttttgaattttccagtagtttggaatttttttgataattgtcacaggcactattttagttttaattattgaatgtaaaggaatcaaaatgctctacagcagttgttttcacattttattaatgttactggtgacagaaaattattaagtaatttttttaaattacttaaaatctatattaagattaaatcctgtgttgagtttgttctgaattgcagaacagttgaatgtggacgtggtcattcattcgatcagttcctgctccccttttcccctccccaaattttacattttgggactctgatttcataaaaggttggttttgtaactggatagtgactaaaaatgtaaattagtgagctgttatgaattctagtagaagtaagattttcttttctatatttgttaacagcagaagtagaaagtaatgaaaaggacaacaaacctgaggaagaagagcaagtaatacatgaagatgatgaaagaccttctgagaaaagtatgcatgtataaacaaacttgaactggattgaaaaataataattcactgtttctatatttacaaccgtgtaatattcttttttgcccatgaaataattgtaaaattttgcaatttcacaactataccattttgttgatggct

SEQ ID NO: 9078 - DNA, 2300 bp, Homo sapien
taagagttagttggacagtcctctcatcgtgtaactttcctactcaagaaatttcaagaaattaaaatcagattgttagagctgaatagctgaatgacattagtcccaggttatcagaagaaggaaataaggaagagagaggcaaaataagaactgtcaaattcattagaggcaagcaggaaactaaaatgcaggtcttctgactcccagtccatgctcttacctccggtttcaggtgacccgtttctttgaccccaccttacttattccatactaggctagaatagatgtgtaatagcatgcatagggctggtggggtgatttgaggcagtatgtggacaaacattttttgcacattagtagaaatgtatttgttttaatgtatttctttgggaaaaaacaaaaacattaagtccatagtttctgagacattatgatatatgacaagggtaagttaagtttgaaaagtgagttaatttgaagaaagatattaagtagtgcatatgttaatagcttgatttagccattgacaatgtatacatatatcagaatatcattttgtatgccaaaatatatacaatgtttccttgtcagatatcaaaatatcctttcttttgtataacataaatatatataatttttacttgtcagttaaaaaataacaaaaatattaactaaatgatagttcagatagtactcagatatggcaaaaatgataaaagtggtaaaaaatcatggtagaaatttgagaccatctcagtccattctgactactatgacaaaacacctcagactaggtaatttataagctatagaaatgttattgctcacagttctggaggctgggaagcccaagatgaagggactggaagactcagtgtctaatgagggtctgtttctcgtagacagtgccttctctctgtgacctcacatagtggaaggggctagctagctccctcgggactgttttgtaagggccttaaaacccttcagcaggatgcaccgaaggaacttaccactctggccccttctaaccctaccactgaggtccttttctgtttaacactgacagttgttccattactgttactgatgacagtatatcctctctttttattacagctgtgcctgatattctatcctttccatactcatcccagtataaaccacaaaataggtcttcagaaaagactgtggcttcactgattttcctgtgttgcctccaacatttataaaaaagcattgaccaagagtgtcaatgccctagtttcaaaaccatctttacttttctaaatgtagatgtttttccatttataaaaattatgtagacttagccgggtgtggtggcccacacctgtaatcccagcactttagaggctaaggtgggtgaatcacttgaggtcaggagtttgagaccagcctggccaacacggtgaaacccggtctctactaaaaatacaaaaattagccaggtgtggtggtgcacacctgtaaccccagctactcaggaggctgaggcacaagaattgcttgaacccaggaggcaaggttgcagtgagctgagatcatgccaccacactgcagcctgggtgacagagtcagactgtgtgtcaaaaaaaaaaaaaaagtagacttatacaaaatttgaaaaatacaggaaagtagaaaagaagaaaaaaaggcatttatattcttactaatgaaccctgctaatcccctccctaattaaaaattctcctgcaaaatcctagcaagtcgggatctacatctgtttatcattctggaagcttgcaatgttctggatttaacatatttttgttatttcaaatcacaaaataaattttcaatggagaatccaggggtggagttcttttggcacctctataaggggcagttgggtgactaccacagaggtgagccaaagctgggggaggctactgcagatcaaggatagtaataactgatacactttgcaaaatgcattgtgtatgtaaagctctttgtcaataatgatggttcactgttccatgtatacatatgctgatgtgtatatttgtctttcctgtagggtttttggagtctctggatgatttttacattcttagcagtggattgatattgctgcagaccacaaacagtgtgtttaataaaaccctgctaaagcaggtaatacccgagactctcctgtcctggcaaagagtccgtgtggccaatatgatggcagatagtggcaagaggtgggcagacatcttttcaaaatacaactctggtaagtgaccctgcagaataactgttaggca

SEQ ID NO: 9079 - DNA, 2300 bp, Homo sapien
gagaagtcctgatccaattaatttgtttatatgtataatttgctccccactactggaatgcaagctctgcaagggcagggactttgttttgtctactgctctgtgcttggaacatgggagtcaacgaatatttgatgacaaataatagatgaatgaatgcctcaaggttcacattaggcatttatatgcatcttacttcatcagaacacttggctccttggatcagaagggttagtaaggtgaaggagggtggtatagggcaatatgactcaaatatttggggtggcaccacttccttgaacatcctaatgtggttctcttcccatcataacacaaccaaaattttcatttttggttcattttaattttctaacttgaaggaaaatgtgcaacttttacaatgtcctcgatgtcttcattttaatttttcttcatttaaattttctaacgaaggaaaatgtgcaacttttacaatgtcctcgatgtcttcgttttaatttttcttcattttaattttctaacttgaaggaaaatgtgcaacttttacaatgtcctcgatgtcttcattcattaaatgccattaaacataattgtgactttaattttaattaaataaaaatgagttggagtctccctgtgtggcacaggcttgtcttgaacttttgggctccggtgatcctcccaccttggcctcccaaagtgttgggattacaggcatgagccatggtgcctggaccacaaaattgtgacttgtgtttcacaatttgcacagagatttgatgaacttttaggttctttatcttttctaacaattacattttccccgttatgaaaggtactgcttattctctcttctcatctctccttgacacctaggttaagcttagaagaaaggccaagaggaagagtggggtgctgaggttcccatctgagaggtggcttgttccctccttccccctctcccactgcaccttaaacatagctctaacacagtagaatggcaagttctgtgtacttgtttatctatatggcttagttcttttttaaaaaaattattattgttattattattatttttttttgagacgaatctcgctctgtcgcccaggctggagtagagtggcgcgatctcggctcactgcaagctccgcctcccgggtttacgccattctcctgcgtcagcctcccaagtagctggactacaggcgcccgccaccgtgtccgactaattttttgtatttttagtagagacggggtttcaccgtgttagccaggatggcctcgatatcctgacctcgtgatctgcccgcctcggcctcccaaagtgctgggattacaggcgtgagccacggcgcccggctggcttagttctttttgtctgtggtgaggcatgctcttagctgtctttatatcactggtatctggagtataagatgggcccagccaatgctgagtgaatgaatgaaatgccttttgcctacttcacaatgtcacctagggcacccggtgccaacttcacaatatcacccaaggcataacttttgactacttcacaatgtcacttttaactgaccccacacagaaatggggactccacagaaacgtaggagtgtgtctagtgtcagccccgtctgaatcactctcctgtggtggctccagccaacgaagaggaagcaaaaaggataaaaaatctgagctacagcgcatggatttaggttaaacagcctgggaatgaggggtacgctaatcgctgaggaaaacgcacctgtggaggcctctccagaaacagcagaggatccgagctgcgtgtaggcagggcgcgcatgtcaccctggcccgggcgcctggtccgctgctggagataaatggtcgaccccggagggagaggctagtaggggtgttgatgtgaactgattcgcccaagccttgggccgcaaaactgcgaaagaaagcggcaggcagcctctgcatttcccagaagtgcagctggggaactttcccagaccggcccaggggttgctagagggtcagacgtaaaggatccgcctttcctaggcggggtgggccccaggccaccacgtgaagcgtcctcgcccctcagagcccggagcaggccgggctcaagaaagaggaaagttgaggacgccccacctcggagaggcggcgcccctgagtaggccaggagcctctcttgcaacttctgccaccgcgggccaccgcggccgcctgatcccgcagaggaaggtcgcggccgtggagcgatgacccgcggcggtccgggcgggcgcccggggctgcca

SEQ ID NO: 9080 - DNA, 2300 bp, Homo sapien
gtctcagggatgcttccttgactttctagaaaaggttatgttaatttgcaatatgctctcatagcactctgaatttttttcattgctgaatttagttattcatatatttgtttatcccataaaaatatacaactactacatacccttaaaaattaaaattaatgccaggcgcggtggctcacacctgtaatcccagcactttgagaggctgaggtgggcggatcacaaggtcaggagatcgagaccatccaggctaacatggtgaaaccccatctctactaaaaatacaaaaacaaaattagccaggcgtggtggcgggcgcctgtagtcccagctacttgggaggctaaggcaggagaatggcgtgaacccaggaggtggagcttgcagtgagccgagattgcgccactgcactccagcctgggcgacagagcaagactccatctcaaaaaaaaaattaaataaaaattaaaaaaatattaaaattaaaaaataaaaatagaaaataaacataattatttaatgtttgccttctcccattagaatgcatgttccatgaggacattaatgtatctatgttgttcatggctatatcttcagtgccttgccaatgctcaacacatagtcaaatcttaataagtagttgctgcttaacctacagaatgggagaaaacttttgcaatctatccatctggcaaagggctaatattcagaatctacaaagaacttaatcaaatttacaagaagaaaacaaataaccccatcaagaagtgggcaaaggatatgaacagacaattctcaaaagaagacatttacgcagccaagaaacatgaaaaaaagctcatcatcactggtcattagagaaacgcaaatcaaaatcacaatgagataccatctcatgccagttagaatggcaatcattaaaaaagtcaggaaacaacagatgctggagaggatgtggagaaatagaaacgcttctaccctgttggtgggagtgtaaattagtccaactattgtgaaagacagtgtggcaattcctcaaggatctaaaaccagaaataccatttgacccagcaatcctatcactgggtatatacccaaaggattataaatcactctactataaagacacatgcacacatatgtttattgcagcactgttcacaatagtaaagacttggaaccaacccaaatgcccatcaataatagactggataaagaaaatgtggcacatatacaccatagaatactatgcagccataaaaaggatgagtgcatgtcctttgcagggacatggatgaagctggaaaccatcattctcagcaaactaacacaagaacagaaaaccaaataccgcatgttctcacttgtaagtgggagttgaacaatgagaacacatggacacagggaggggaaaatcatacaccagggcctgttggggggtggggggctaggggagggatagcattaggagaaatgcctaacgtagatggcgggttgatgggtgcagcaaaccaccatggcatgtgcatacctacgtaacaaacctgcacgttctgcacatgtatcccagaacttaaagtatatatatatatacactttatatatatatatatatatatatatatatatacactttatatatatatatatatatatatatatatacactttatatatatatatatatatatatatatacactttatatatatatatatatatactttatatatatatataaagttaaggatttcgtttcaatgtgcagctaaaacttaagcactaatagtcaattgtagctgtgttttcctaaagccctttgacctttattttccacttcacaaagtttgttacatatatgatgtattgccctctttctcttttccctcttcccagtgatgcatcacaaattattgcatttttattgggtgaggcccagctaatctctctgtttatagctctgacctttctgggtgcaaacacaaagtgaactttggtttatctcctgccataacgtagctgctaattactggcaagcaggctgtgttccacggcccatgtgaccagttgggcatgaccagagagaagcgtggggaagagtgggctgagggactccactagaggctgtccatctggattccctgcctccctaggagcccaacagagcaaagcaagtgggcacaaggagtatggttctaacgtgattggggtcatgaagacgttgctgttggacttggctttgtggtcactgctcttccagcccgggtggctgtcctttagttcccaggtgagtcaga

SEQ ID NO: 9081 - DNA, 2300 bp, Homo sapien
gagttggcaggcaggcagtgggggtcacgccggcatgaaaggccagatcacctgcaggtcgccaagttgccgggaatcccccgctccgagcagtgtcatgcccatcacaaataaccctatcgcagccgggaggtaagccctggcttccgagtaaaggccctgttcagagcagcctgggggtctagaagggaaacgggtggcgggttaggttctaataagttcagtgagaatgtaagagagacagctgtgggattaccaagcgcgtggtcctacccggtactcccggggtgtagtgagggtcttggagaaaggtggggctggtgctaccagttaagcgcactttccagtaggcgagggtagggggcggaagacctggtgatcagcctgcgtccaggccgtaggggtcgccccggcctccggtaaagctccgtataacagcctcgctctactcctggctctgtccttcctaacttctcattaggcttggcaccccaggatgcggtgtgatccatgccgcgttaactaatctgccccttctctaccttttcttttttcctttcttttcgagaccaagtctagctctgccaccgaggctggagtgcagtggcacgatctcgcctccgcctcccgggttcaagcgattcacctgcctcagcttccggagtagctgggattacaggcctgcgccaccacgcctggctaatttttgtattttttttttttttggtagatacggggtttcaccatgttggccaggctggtcttgaactcctggcctcaagtgattcacccgcctccgcctcccaaagtgctggcatttcaggcgtgagccaccacgcttggtcttgctctagctattctaaacatgaagaagtcatatagcttccttggtgcggtgggctgaagtcactctaagggagtttcccagccccaggggttaaagaactggagtcaagattggaacccagctggcgaaggattccgcaccgctagatcttgacatttgcctcttcttctgccaggaaggctcccctgttcctttttgctgacgtgtcatttctaagtactttctcctactccataaagacttcaagtgagtacacaatactggtgttagtttaatttctaagacagtgagacactcggagaagttcaattttctttaatgcaagtgaaaaattgagttacttaaaagaaatagagtctggcatactttcgtgccctcgatatttgttgcatgaccaaatgagtgattttgggtttcacataaattaaggatgaaagttagggccccgatggaggatagaaatactgtagatatttgtatgacaattaaaactcttccttaagtatttaacttatatggaattgtttaaatatttcatggttttggggtttttttttatttttgtagtggtctcaattctttgattagaatagaacttatattttcccttgtagcatagttatttttttgtttgtgttttgttctttataaaatataacctaattatctaaacccaagaaatatttatttttgtctgtgactctgagtcctatggtatagtaagtacccagtcctgacagtaatcatatcttccaaaccaaaactgggtcacacggttcaataactgaacagaatatctcaaactgaaaacgatcaagattttctgaagtttactattaatagtaaaattgcttactaaaaatgttaaagaacttgatttaaaactctgtaatgcctcacttaaaatgtgaatgaggggggcggggtgggggtggctataatgccagcactttgggaaggctgaggcagtaggattgctggaggccaggagtttgagaccagcatggccaacatagtgagaccccatctctacataaaataagaattataaaatgtaaagtgaatggaatgcattgaaatttgatcctgtagcaaagtcatcccttttgaattttgaacatttgtttaatgcctcttttccaagcatattttgaatattcagagataaatgagcaagttactgccatcaagaaactcctatttttctaggagagaaaggggaaagacgtgtagttgtacacatatggtttgctctaatagagtggtataaatcaaatgctattggtatacaaaaggacaaattttgtcagccaagtgtatgggtatcttcaaagagcacaggtgccatctgttctgagctaatgacccattgaagaaggccacaccaaatttgggggaaaagcagcataaacaaatgccagagtattttccaggcaggttgtatttggagaat

SEQ ID NO: 9082 - DNA, 2300 bp, Homo sapien
attactgcctagaacaatgatgaacccatactggggactcaataaatgtcttcagagctattgtcatggtttaggcggtctttccggagccagtctgcctcagcctaaatcctggctttaccactgagcagtgacctttgataagttatttgactcctctacctgtatcaaagtgttttgaaaattaaatacgttagtaagcatccaataactcttagatataccaaataaatgggcatacaaatctctgatgcagtttttaacgagatgttcctggaatgagttctgtaaactagcttaaatttttgcctgtatcttggggaattttcaagagtttttaaaagtattactattttagacacgattttttttcttttattccaataagcaagagatttctaatttgaaaatgttctagtcttgatttcttagaaagcttaactataagtaagtcaaccgattttaccattacaataattttttttttttttttttgagacggagtctcgctctgtcgcccaggctggagtgcagtggcgcgatctcggctcactgcaagctccgtctcccgggttcacgccattctcctgcctcagcctcccgagtagctgggactacaggcgcccgccaccacgcccggctaatttttatgtatttttagtagagatggggtttcaccatgttagtcaggatggtctcgatctcctgacctcgtaatccgccctcctcggcctcccagagcgctgggattacaggcgtgagccaccgcgcccggccccattacaataattcttatctcttcaagatctgatagacttttcctcttccctctgagtcaaatattaaaatcatgagtgaagttcgaccattcaggactttttccagccattcaagacagtgttccaactcttttatctttaacaaaaagtaaaagaaaaataaataccttttgggttatgaagatgggcatggattgaaacaaatgtaaactataggcatttataaatataacaaaattttaccataaagtcttcctgctgtaaaggcttatcttcaagaccagggacaaagaagccccacttactaaaattcattgctcagaatcctaattaactacctgggaaagacttatgactcatcctctaaataacagctgctttttaacacagtaaaacctttagagaagacagggtcctgacacctttgaagagcggtgacaccttacagaaactttcgtttttgttcagggattctcttgagaaaggaagggattcagaacctcctgaggggatttgcagtagaaatcattattccaagtcatgattgtggcatccattgttttacaagaactttgaatttttaagtggaaaatgtgagatgagaacctgagatttgaatgacataagacattgacaatatttcaactaaataaccacaggaagttacttggttgaaaagcacacaggctcttgcagggcaggaaaacctgcaaattgcgcagaagcagctgaaaggggaatggcgggggtcggggggaggtgggggtggagtgtaggtgggggacgggaagctgcactttcttttttcaattgaaagaattttaattatctgcagggccgtaaaagagaaaaaagtcctctccccctactatgtcttcagaagacccacgtgtgaaaaattttaaattttaagtaattgctttgaaatctcggatgtaaagcttttcaggtttttatagagtttcatagtaagtcaggaattccgtttgaaaaaacagaaggagggagggacagaacaaggaacgtgcataggatctggcctacttttatttaagcgctgagaaaaggcaatataaattcttttagctcatactgttttaactttaaaacgtatcaccatgaacctttctccaaacatcagaaaaaattttcccaaaagagcaaacaacaaaaaaatcaggctggtttcgctgactgcttcctggacttaacaactatagcatgtctccagaggtggggcctagagctccgcccacttttttgatgttttcaaacaggtccgcatcgagagactataagccctggtctgcgactggcaatcacagtgggcagcccgattttctgctgagtaggcgctgtgatttcagaatgtctgggcgaggtaaaggtggcaaggggctgggtaagggaggcgccaagcgccaccggaaggtgctgcgggacaatatccaaggcattacaaagccggcgattcgccgtctcgcccgacgtgggggcgtcaagcgcatttctggtctcatc

SEQ ID NO: 9083 - DNA, 2300 bp, Homo sapien
catgcccatcttcataacccaaaaggtatttatttttcttttactttttgttaaagataaaagagttggaacactgtcttgaatggctggaaaaagtcctgaatggtcgaacttcactcatgattttaatatttgactcagagggaagaggaaaagtctatcagatcttgaagagataagaattattgtaatggggccgggcgcggtggctcacgcctgtaatcccagcgctctgggaggccgaggagggcggattacgaggtcaggagatcgagaccatcctgactaacatggtgaaaccccatctctactaaaaatacataaaaattagccgggcgtggtggcgggcgcctgtagtcccagctactcgggaggctgaggcaggagaatggcgtgaacccgggagacggagcttgcagtgagccgagatcgcgccactgcactccagcctgggcgacagagcgagactccgtctcaaaaaaaaaaaaaaaaaattattgtaatggtaaaatcggttgacttacttatagttaagctttctaagaaatcaagactagaacattttcaaattagaaatctcttgcttattggaataaaagaaaaaaaatcgtgtctaaaatagtaatacttttaaaaactcttgaaaattccccaagatacaggcaaaaatttaagctagtttacagaactcattccaggaacatctcgttaaaaactgcatcagagatttgtatgcccatttatttggtatatctaagagttattggatgcttactaacgtatttaattttcaaaacactttgatacaggtagaggagtcaaataacttatcaaaggtcactgctcagtggtaaagccaggatttaggctgaggcagactggctccggaaagaccgcctaaaccatgacaatagctctgaagacatttattgagtccccagtatgggttcatcattgttctaggcagtaatgacatatacataaatatttgaaaatgttatttcaatgaagtcaaatctttattcggatagtgagaaggtaaatttgctttactttaaatgtaaatgaatccacataaaatgtttattttaaaaagcaagcgttcaacattacatcacgtatcggtgttaactgtgttactgaaaatgttcaggtaaaaatgaaatgacctcgatgaattaggagaaagtaatttttaattaaaacaaaacacttgaaacactctttttgtttcaaaaagcatgggtccacaattcaggtatataagaataagctgccattctgactttagtctctggactcatttacaaagagacccgggggacctccacgtcttcgcagaggacccgatccgctgatctgtggcgccctggcttgcggggagcaagccaaggccaagactttggcctctccaataaaacctagtggctctttgcaggcccatagcctcaaagacaaaagatattttggctaggcgagcttgttcctcccgtcagcacaggaagcattcacgtctggtcatcactctagcttcagactcaaaagtgaacgattggctggctgtgagccgcaggaccctgcggggagaccagggtggtctctacactgttgggtagctagctggaggcaaggcgcttgtataagaaacagtccacggaccctgtcctgggcaggcagaattccgcggacaggctgttgtttcgcctaagcagcacgggctgcggagacagaaacctacctgagtagtacggtgtattatatgagaacatccacttagcatagcaacgtctacggacaacccctgtagctcttcttctggattgttttctgtttccaaccatgttttcttatttcctacgagtttatgtgcttggaagcgagcgtggtcgtggaaaacccgtaaccgctaaattcatctgggtccccaaagactgagccggctggcctcgttatttatgtgagcggctatgtaaatgaggattcggagattgctctattgattggagagagctggaggaggcggtctctcttccagagcgctagttgggagcggagcctgcctgtcattggtcaccagagccaatggaaaggggctgccgcgcggccgtaaagagtttgtagaggcagttcgggtgcggtacgttgcattccggtaccggacgccgagagcggtttgtctccgtctctggagttgtaggcgagaggtgatcatgtccggtcgcgggaaacagggcggcaaagtgcgagcaaaggccaaatcccgctcctcccgcgcgggcctgcagttcccggtgggccga

SEQ ID NO: 9084 - DNA, 2300 bp, Homo sapien
gaaggagtatgaggtatatgcatttgtcaaaacttactgaatttgtaaatttcgtaaattttacctcaaaataaagatgggaaaaaatcaaatgctataatttctgtaaaggaggtaatatgtctcccattttacagatgaaggcacaggttaccttgcttagtcaaactaagctaatacacaacagaaattcaacataggcaagctaatgagcccaacctccaccactggatatatactatttgttagttgacatatattatttttcttttttttgtttattttttgtttttgagaccgagtctcactctgttgcccaagctggagtgcagtggcaccatcttggctcactgcaacctctgcctcccaggttcaagcaattctcctccctcagcctcctgagtagctgggactacaggcacacgccaccacaactggctaatttttgtagttttattagagatggagtttcaccatattggccaggctggtctcaaactcctgagcttgtgatcgacctgcgtcagcctcccaaaatgctcggattacaggtgtgagctaccacgcccagcctgacatgtatttttctatcacatgttaaatagggtagttctggtgctagatacttgtaacagttggctttctctagacaacagctgtttcgaatcatccaaaaagaattacctgataagaggagaaaaaaaacagctgggttctgacgtttttagaagtaaagatttctttcagttctttgacaatgtggaagtattgacgtaaggttatttttctgggggtttttggtgatatttatgttagttggaaagcatgtccaagttacgaaacagctgacttgtcatttttagtgtttagttagtagatgacttttttatcatactactgaatggttctctgtttcagaatgctcagcatgtggaagtggagagtattcctttgccagatatgccacatgctccttccaacattttgatccaggacattccacttcctggtgcccagccaccctctatcctaaagaaaacctcagcctatgggtaaggaagcagtgtcacaatcagagagcatttagtaaaggcacaagttgactgtccagtgccaaaattaatgcagagggaaataaaagacaatatggatgtaaacagtgtgacatttgattaaatgtaaaataagaaatcccttgaaaattgtttagaagagaaaataaatatctcattactgttaagtgattactgtgggggtttttttgtttttgtttttttttttaacagacctccaactcgggcagtttctatccttcctcttcttggacatggtgttccacgtttgccccctggcagaaaacctcctggccctccccctggtccacctcctcctcaagtcgtgcagatgtatggccgtaaagtgggttttgccctagatcttccccctcgtaggcgagatgaagacatgttatatagtcctgaacttggtgagaagtgactgttcttttgcttttataactatcattttttatgttggccctgtttaacatattgttcaccaccctcagaacttagaaagtaaatgagagggtatcatgtacataactaatatacatacagttggataaatcataggatcttctcaagtaaaagcatcatacataagtatagaaatgtttatcgtgttttaaattaggcttttcctggagatgtcactcttgctgctaatcctttaagacttgtatatctggttcccttttagctttattgtcatcagactagagcgtcattgtatacattcactgactgtgtatgtgtatacaaacatgattgttgctaaaggaggaaatgggttttcaaattagaactctttttaaaaaaatcttaaattaccaaaaagaagtgtttaaaattattggcagaggaaaattttgttagactgtatgagtagctatatatacaagaattttttttttttttttttggtaagaattaagttgttacagtctgagttgaatagcataattttctgtatttctgggtaccatgtagtggagggtccaatcatactacttctccatgttcccttcccacttttcagcccagcgaggtcatgatgatgatgtttctagcaccagtgaagatgatggctatcctgaggacatggatcaagataagcatgatgacagtactgatgacagtgacaccgacaaatcagatggagaaagtgacggggatgaatttgtgcaccgtgataatggtgagagagacaacaatgaagaaaagaagtcaggtatgtgc

SEQ ID NO: 9085 - DNA, 2300 bp, Homo sapien
tatttcttcctttttctagtccctaccaatctctgaaaaaaaattcctttaattagaaattctgtgagactgttctttccttagttttgactttaatgtccaagaaagatggcatcacctttcttgaccatgaaaatttagatctctatcattcttcagaaatgtgatgagtgtgaagaccactttgaatatcctcaagtcatcagtttagcttttttcttatggatcacagcactgactttgtcaactgataaaaacaactagaaaatgctttaacgatatggcacaaaccatgaacatcagaattcattagtccttcttctataacctccctttattaacatgtaattgtaaaagaagaataagaagggaatgggggtaatggatctaggctcaaaacacatacctcacctttgcctctctccatggtttttcttggcatgtatgctgtacattctcaatacttctaagacactaaaaactcattaatttaagcatatttaattcagattcagttctagttcagatataatgcttgactctcaagagttcaaaacacaactaaaaatgcaaatatttgaaattagtgctatactgagagctccccaaaacttaaatattaagacacatatttttcttactaagacctgactcccaatatatatttcttaaggtaattaaagggaatacttatttttgtttgaggaaaaaatattttgtaagctaaaacttttattaacacagtaccctattacatgacttcttcctcttattccaaaataatggggcttaattttttgaagcgcagtctttccagtaataaaggcggacaaatttgcttccttttgcaagtagacactttttaaaggtaagaaagggaagattttgtcagcccagtttattacagttaatgtctctttcaccaagtgtccaactgccccgaaagccagatgtttcagaaagccagatgtttcacagctgttctggtggcaattacttcaagacagcggtatcaaaggctctgatttttagcttcctcatctaaaaaatggggacatcaattactttataacaaagctctgatgatacaatgagattacaaataaaatatcctgtgatgtttgactcactacttaactaaaatctttataatggatccatattcctggcctagctaccatacaccctgtcaagtggtttccttctaagaaaaactggggatgggggggttaggggggtgggagagcagcagggagtaggaggtagggaaggaggaaaacaagcaaaatcagtacatatacaagctctcccatctttgattgcctgcgttttttgtgctttcctttctcaagtttcctcaggctcatgttctgaatctcctcccccacaaatgaaacacaacggatacgaattacagagaattttacggaagacactggagcttaagtctgcagattagttttttgtctacaagcggaggcgactggaaaatcaagccaaataagcgttggataactctaaacagccaaagaagcttcaatgggatagggtccaggttcaccaaaggaggcaacaccagcaactgacgaaaccatagcgacggctgaccgaccatgactcgaggtacaagacgtcaaacctaaggctactaatcaacgtgcgtaagaagcggccccaaccgacccgggcgatgccaaccgcgcaaccactggtcgccgcgccaccccaggcccaggaatagcccagtccgcaacagggagacctcaaccagggagaggaggagcggggcaaaggggctgggtgtcccccaagccgctgcgcgggacgtggaagggacgaaagaggtgaggaagagtagtaaatcaattcaatacactcacacttctgctgtgctcccaggactacgagaagcgggtagggggcgactcccggcctctttcacttcgtaaaggccttcaactgggtctctcggtcaacccctcagctaccgccatcttgaaacctcgcgcccctccgcactcctcacgtcatttcccattcctctgtcccgccttctcttagcgccgcttgaccctggaaccatagagaatacccaagaattccaggaccagagtctcttccggttccatacaatactcaattggttggttgtcggctaagagcccgcctcattgcgctcatctagtacaataggaattagaagaagatagctgctaactgagtggctgacggtcctgtctctcgagttggaggcatcttgacttagttgctgggagcctggtacgttgagccgtccgaga

SEQ ID NO: 9086 - DNA, 2300 bp, Homo sapien
ctagacacaaactctaggccttcgaatgagacagaaatactaccatatttttgaccatcagagtaaatctggttttctgtaaactagaagagactgaaaaatggtttgtaacaatgtgcttcaattaggacaggaagctgatctgtaaacgtctactgattacacaatgtaaaccggatggatttgaaaatggtaaaaatcaaaactaaaaacatcaaggtcctgtttcagtcactgcaatcaaccctgaccaactgtgataattaaatatcgctcaagtgaatgttcaaacactgaaacatttagaagacaagaaagcaaaacacagctacacatattgcatttaggatgcagaatagaaggtcactactcaaagcatttgtcatttaaaagaaagtcataatttattataagctttcagaaaaaagaatataatttcattttcaacactagcaaaaaggaggcagctgcctttgctacatgacgcattaggtgggccatttcactaattacctgattttagaaaacgccaaaggctatggaagcctattaatggttccgctgaatctctgcagatgtgtttgttttctaaatcctttgccaaccaataattcccatgaggactcttttagtctatactgacaaaattattaatatgctgttgatgccagactgtgtttgttatagttgattctcccatccaagtacaagaaatgtattgaaataaaaactgctcagcatatcttaaaaatagtagctacatataaaattttagctacatgaaagactttaatatttccaacatacactgttttctctttctcttcttgcattgtttttcaaaacgagttgcaaaactatgatcactaatgtgttaggaaagaaaaaaaactagttgcaaaacattacaacttagctcaccttcgcagttcaagattattttcttttttatgtactacctggtttatcagctttaacctacaatatctcgtcattgctttctgacactcaaattcagtctaaaatcaaatcaagaatttcctaacacaaaggtaagtttaggtataggaccgatcttataccttcaagggcagtttaaagattctgctaaaaattagtatgtatctccatcaatattttgaaatatttataactggtggtaagaatagccttcctacatgggatagtcaggttaagattagaaataaccaagcgtatcctctaagatagttttttaaatgtttaaacttacctttaagggaaataagtgggggctgactcacggaaagaggggatagaaggtagggaaagggcgaaggctagagttaagtgaagaatcccgtacgtagagtgacatcatagaggacttttggctggtgaaaagaccagtcgggaatatagccaatatatatcaaccttgccactcatataacttaaaaccgactgcatatgtatccccgtatttcttcttcaaaacactactaacaaataataaatcaccgcccatataagcaatctgcgactctaatacgggtgctaatttatttgttcaggtggtctacaaacgttctgttctgcctgtctattaaatttccacacgtactaggcgctcacatgggataacctgatgcttacaaagcggattaaactcagtggcaaatgttatctgggtattcgtttacacacggagacacccctaaaggatcgcacctgcttgggtcataagaaacagaaaaatgcaaaaactaaggtaattccaaaagacagaaaacgcagaacgcttctttatctgcagaatgtaccgttctcggacggctcaacgtaccaggctcccagcaactaagtcaagatgcctccaactcgagagacaggaccgtcagccactcagttagcagctatcttcttctaattcctattgtactagatgagcgcaatgaggcgggctcttagccgacaaccaaccaattgagtattgtatggaaccggaagagactctggtcctggaattcttgggtattctctatggttccagggtcaagcggcgctaagagaaggcgggacagaggaatgggaaatgacgtgaggagtgcggaggggcgcgaggtttcaagatggcggtagctgaggggttgaccgagagacccagttgaaggcctttacgaagtgaaagaggccgggagtcgccccctacccgcttctcgtagtcctgggagcacagcagaagtgtgagtgtattgaattgatttactactcttcctcacctctttcgtcccttccacgtcccgcgcagcggcttgggg

SEQ ID NO: 9087 - DNA, 2300 bp, Homo sapien
caagtgagagctacatgcagataagtttggagatattattgctttcactctcatttcccaccactgtcaatccagcagtgaaacttgtcaaatcagccttcctgattccctaaaaccaccctgactccaagatctacactaagaaaatgtgcctccttcctaaggttcagttctgactattgacttgacgttaatactggctttagtagtcaagaaagatttaagaagttcaagttttcaacctgagaaactgattgcagaaaaaagaagttcaagttgattagggggctcagtatgaagtcaatattgcttctagtttttctctgataattattttgcattgttactgtttatccttaattttggcaactccacttaggctgctatgtggtaggagagaaaggagtggatgagtaggcaataaatgttaagaagggtagaaataggagagaaacaaacaccttaggaacaagtgggttaaatggtactcttcaacaatagcctcttcggaaacaaaatgcaactgttttaagacagggtaaaagacagacatattttgtccacatactgtaggcaatggggttggtaacttatgctttattgtccatacctactaatcaagtttacataatgtacccttcctgaaatccaaatctccaaatattacaccataattaaaaggattttttaatggttcattattatctacagaatgaaatacaatttcctagcatgacatctaaggctatctacaaactattttcaattttccatgacttaccttcccttaactgctcccacttacaccctgtatcaccagcaggttggtttttgttccctgaaaatgttctacaatttttggttcagctcctttgctctcagtgttccctctatctgtattatttcctctataccaccatcctccccaaacatctattaaaatcctacttaacatccatacctagttcagatacactggccacacatccgtacgtggtggggccctggatacatcaagggcaagatgatccactgggacaaaagtagaaaagtgaccccacttagcccttctttagaatcacagggcagcatctttagattttaaagtttcctgtctgcctgtctggcattttgattctgtatcctgtacccacccattctcctctcccctccaccaggagatactgttgttaatatatgaatagctaccgtttcataagattttgccacatatcagccactatgccaattactttataaacactatcccatttaatccataaattattaactaatactcatattacaccaatgggaaaactcaggctaagtgactttcttaggattacatgactagtaagtggtacttggagtacacaaaaccaggactgtctgagtgtaaagcctgctgtctttcactaagttacactggggctgagtgatttccctgccactcaggtgtctttgctgtggaggaattaacgggtctgaagactgaagctgggaagaagcagcagggaagactgatctgagctttcagggaaaagagtgaagttggactttaaggtttttatattgtcaagacaatttacaaacacaggaagagaaagaatgacaaagaggagaactcctagctggaaagaagagaaaaaaaaattggatgcaagtaactgcatttatatatcttgagaatttaaataatcagcaacagttagaggtgcaaatgcaacagaagctaaaagaaacttagtatctggaatagttgacaagataaaaccccaaaatctgagagctgcaatcaaagagccatcttctctactaaattgaattagctcagttatatagcgcttctcaacaataaaaagtccattaaagaacagaaatttaaaaataagttttacacactattagtcttccagtttatataacttaatactgtatactaagtttttattaataggaaatgaaggaattctgagggccaagccatgtagaaatagcctataaaccagacaggcagagggacccagcagagactagcaaagtctgtaagtcatcacattccatcagaaatatccagatgaaaccagatgaaaaagcactttaacaatactcctaaacaactgctaggaccacggaactcagaaacacagcaaggtaagcaacgtggatatttctattagtattgatataatactctgtttctcagtagtaggaggaatttgaattagcccgtcagtcttgaatcctaaccataaataaaataaagtaaaaaaacagctttgttataagaggatccc

SEQ ID NO: 9088 - DNA, 2300 bp, Homo sapien
ctccctctctctctctctttctatcccccttcctgctccctgccccattcccttttctgttctccctcttttagactgagtggtataaaatgttacaaagttttctgctgccctccagtggtcttatcctggaagtggcagtcacgataggaaaaatagcaaaacctttatagaagataataataaaatgacacactcttttagagtgttttaagatcgtgggcttcaggagacagaaaagcacctgtgattactaaaaagttattaaacttcacagggcctcaacaaccacatttataaaggaaaggttaaaatatctcttcatggtcgtcccatgggttgagataacatgcaaaaaggtcttgaagtacagtacttgctcaataaaagaaaagtttcaccttatttaagcctgacaactttctataaggttaaggaaactgaggctaagcacaaattacttattttttaaagttacctcagccagcattgtgggtagaactcaaactataattcaaattttcatattctaagtctagttctcttcatgacatctcaatattccaaagtaacagttgctaataaggaaccttaagaattgttaaagtcttaaagggatattttcacacactgctagtggttgccattaaatctgaaaaatatgcattccatggatcagtagtcacatctctagaactgcatcttaaaaattgtgagaaacacacaaaaatttatgtagttgaaaacaagctaaatataagatatttattaaataaactttggtgcaaataataataattggttttatttgttggaaaatttctaggtgccagatgctattctaaggagtatgaatgtatcaacactaaaatgaagttggtactattattatctccattcaacacatgaggaaacagagagacagagaggttaagtagcttgtccaagatcacacatttaggaagaaggagcaccaggaattgaactgagatgtcttattcaagagtccatgttctagtcacttatcaatcttcttctgagactgtccatggatccacccatgctgtcccattgtgtggcagcacctatgtaatggaatatagtgaacctttgtttaaaaaatgtttcaataggtattaaattatatagggacatgcttacattaaaatattaaggggaataaacagtatgcaaaactgcatactatattatttcagttctagaaacctgtgtgtgtgtatgtctaagggtgtataaatcaaaatccagacctaattagtggctgtctccaagtgacgggttatgtgtcatttttttctcctttgtgctttctaaatattctgaatatttgttaatgagacagaactgctgtgatcatcagaaaatttagattaaaaaaattcagggtgccaaaaaattctagaatacttaagaacagcacttagtttaccttaaaagttaaaaattgaatccagaagtaaatatttgcaagaaaaacaattatcaaggattgctaacttttagtttcttaaataatgaatccagaagtataaatacaaaatatttgcaagaaaatataattatatcaagggttgggaggagaagaaggatgtttagactagaaagggtagtacctacctaaaagagagtgcttaatagaactgtgctggattaagtttgcacagtggaccctattttaacttatgtcagctctacataagcagtctcctgacagtcgtcattaggattcactggagactggaactgtgcggacagagggcctgtcttcagaagagaaaatgggggaagagctttgaacccagaggtacaatctctggattggagagtttcaaaggtgccagggaaaagcagtacaaagagccttctttttgacaataactctaaaacacactttgctctgtgaacgcccgtcctgggcagggcctatcagcagggccagatgagcctatagacacccagggtggcgcgttcccagccgccctgcgcatgccaatcttatcagttttgatggaagcctggggctccagataatgctacttggccccaaacgctggacagagcatgctttttcctgtttggctgggaaagggaaggctgaactgctgagtctgacacttaacaggacttcggcattcccctgaatacagactagatcagagattttatttttttaattgaaaagtaacttgggttctctttagaaacccttatttggtgtgcgcatctggctatttcacagagatttcagttttgcaaagaagtcggagttgatttcttcc

SEQ ID NO: 9089 - DNA, 2300 bp, Homo sapien
taagtttagggaatccagtggaagcagtgatttaaggtgaacaaaaggtgaaccttaagttgaaatgagaagtgtaggattttcaagtttagtttctgggagtgtaaaaataaaaaaacaattgtgatgtcagaggttgaaagattatagttgtcatttgaacttggggataaaggagacatctatgacttggctggaaaagacagagctaatgtacattgcaaagcacatatttatagcaggaaaatgggaagatttctctttaattctggagatggagtggggatggggagagtagactactcattttaagggtgaaacattggaattcaacttgtttgatgttatattaattggtggttaattactaagctaagtacgtataaaacttttatctatggctagcttgtccccccaaagtcatgcaatatagtgaactggctttcgcactttaaattattcattgatcatgtaatgattcagatgattcatcttccaagatggacactgaaactaacactcatagtaggttgtggtttaaagagtggaacaaccgccagtctcattagtggaaattgtgatggttgaatttatcaaggatgaacatacacggtcttctttctgagattttctttaagattttcgcacagataatctatttcttaggttttggagagaaaacttgaattttattgatccctcagaactcaatctttcagatttcaaaggagctatttcttttaatggggactctgttaatatttataaaagctcttcacaggatggagggtgggagggaaactccatcccaacaagacaaaaagaatgaagcatgaggctccacctagttcatcactgctccttgaaatacatcagtattgaaagacacatccaccccacccccaacccagccctattgctgttccagctcaagagtcagaggtcccgaagctgtagctcttctacaatctgctgctctgtgacttcaagtctgttgtctgcaaagaaaactattgggttcccaagcaagagaggcacatctggtaggacagattttgtgattgcaaaagaagggggaaaaaaagaaagaaagaaaagacctctctatacaagataaccagaggcatcaaactgaaatcctcctgtggaaaataagctagtacttctgggcctgatggtgtagtgaaaacctgtgcttgaggatacattacagtgaaagagcaaagtgaatagtaagtagctattacttacctccttagggaggtgtgttgtttgtctgtacatcccccacagcacctagcacagtaccttgcatctcacctgccactcactaaaaagtctatcaagttagttaattatcgagacaacgccctcagaaatgagagaacagtaccctcttatccttgctgcactttccagcactgatacgctgcctaaaagaggactagggcacaggtttgaattaatgtcacaaaactggatgggcaagttacaacggtgttgattaaggaaacagaactcatggtgcaccggatatctccatcctgatgaacccttggaaaaatgccaaagatgcatatccccaggcaaatgcctgattagtctgggattgatagattggtctaggattcagccctactgggaagatgtctaaattataatcagtgtagaaagcgaagttctcctagaagaagaggcaaaggttaaaaagaagaaaagaaaagaaagtgaagtcctttctcccccaaaacctctcatcaatcaatcagggtaacaaacagaacactagggctctgtctgtggaccaaacccaaaagccctgcggtcagggccaggagggtagatcatgtgtttgtggcaacttcctctgtgggcttttgcccaggtctgtccccaagcatacgatggccaaaacttctgcaccagagcagcatcctgtgtaacacagtcaggtccagcagttagggaaaactgcccactcagagtagataatatctggaaggaatgactgtttgggaaaagttccaatgctagttcagtgccaacccttccccaccttctccagctctctcccactggttcctcccctctcaactgctctggttcttataaaaacctcacagccttccactaacatcccgtaggagcctctctccctactgctgctacacaagaccctgagactgacctgcaggacgaaaccatgaagagcctgatccttcttgccatcctggccgccttagcggtagtaactttgtgttatggtgagaaacttttctcccatttctctgtgtttactt

SEQ ID NO: 9090 - DNA, 2300 bp, Homo sapien
tagccaaaaattacttgtcaagattaatgtcaaaaagagtatttcctaggttttcttctaggacttttatggtttgaggtcttaaatctttaattcatcttgagttaactttttatatggtgaaagatgagggtgcagtttcattcttctgcatatggctagccagctatcacagcaccatttattgagtagggaatcctttccccattgattggttttgttaactttgtcgaagatcagatggttgtaggtatatgactttatttctgggttctctattctgttccattggtctatgtgtttgcttttgtaccagtaccatgctattttggttactgtagccttgtagtatagtttgaagttgggtaatgtgacgcctctgtttttgttctttttgattaggattgctttagctagtcagactcttttttggttccatataaattttagaatagtttcttttctaattctgtgaagaatgacgttggtagttagataggaatagcactgaatctgttaatttctttgggcagtatggccattttgaagatactgattcttcctacccatgagcatggagtgttttttcatttgtgtcacctctgatttctttcaaaagtgttttgtatttctccttgtagagatattttacctccttggttatctgtattcctaggcatttcattttatttgtagctattgtaaatgaaattgtgttcttgattttactctcagcctggacattattgctgtatagaaatgccactaatttttgtacacttatttttttcctgataccttactgaaatcattcatcagttccagtagccttttggcagagtcttcagagctttctaggcatacaatcatattgtcaacaaggagaaatagtttgactttttcttttcctgtttagatgccttttatgtcttcctcttgcctaattgccctggctagggcttcctaatttcttttgtaatattttcacatgaaaattctcctaagcttaaaactacatatcccaatgcctgtggaaatctcatcttggacttcctcagacacttgtgagcaaaatcaaacttcatctcattcttctgcttaagacttttcagtggttcccatcacctacagaataaaattgatgctcccgcgcttagtgtatcatataaagcctgctgtgagctggtcccaacatgcctttctgtccacatgtatcacttccttccttttcatcattctcaattactagtaattctgtcacacattatatttgcatatctgtgctttggttcttttttttttttttttttttttttgagacggagtctcgctctgtcgcccaggctggagtgcagtggtgctatttcggctcactgcaagctctgcctcccgggttcaggccatcctcctgcctcagcctcccgagtagctgggactacaggcgcccgccaccacacctggctaattttttgtatttttagtagagatggggtttcaccatgttagccaggatggtctcaatctcctgacctcgtgatccacctgcctcagcctcccaaagttctgggattacaggtatgagccaccacgcccggcctgtgctttagttctttacatgaaactccctttctaccttgtgttgcctggcaaaatcttacttacccagaactctgctccggcatcctccgcaggaagaacactttcattgaaccctagcattgtccctaatacccttaatatgtattgtcatagcaccctatgaatttttctatatcactttccatcttatatttaaataatctttttacttgcccatctctcccactgataatctaagctggcagaggctggatcagatcataattatctttctattcttagcgctaggatcaatgcctggcatagcatatttacattttttatttaaataaactgacctgactttcttctggttggatatgttctgagtccctattactaaccttggtcttttatctcagaagttgaaggctcccctggagccagctgcaaagttcccaaagccctaacaaccccacagccaatcagctacagagtaggctgccctgagtcggcctccccaacacaaagtccagggttggagcaggagcaggagagggacaatggaagctgccccgtccaggttcatgttcctcttatttctcctcacgtgtgagctggctgcagaagttgctgcagaagttgagaaatcctcaggtaaaagaaaaatgtagttgggtggctatagtgtgaaagtgttattaggagaaggaaagggagca

SEQ ID NO: 9091 - DNA, 2300 bp, Homo sapien
tgatttctttcttgtcagttttgttcagtgaatagaagatactacaatggtacagagaaattcaggcaggtcagagaaattactagaatacattagattattatttcatagaatttaatgagattgaattaggaaaacaatcaggaaagtgactgatgatcagagaagtccatgagggtaaggaggctgctaacagcagccccactaacatcttttatattcatgacttgttgactaacgggctgtcattctgtctcccagaaatagatcagaatgactgaaaaagccccagagccacatgtggaggaggatgatgatgatgagctggacagcaagctcaattataagcctccaccacagaagtccctgaaagagctgcaggaaatggacaaagatgatgagagtctaattaagtacaagaaaacgctgctgggagatggtcctgtggtgacaggtatgtgtgtacagagaacagggtgggtggaagatcgctgagagggaagaagacattttggctgctcaggagcagcagcaaagggaagaggaccaactgcttccaggaaaaagtgagcgaggcacaatttatatatgctgattaaagttatgaactgtataattaagtcttcttaagagataagatgcaagtcagcagtgagataggcacacataacacacagaggggatttagaaagaattccaggctaccacttagaattgtatttctctctctccattttctctctttctcagtccttacctaaccgttcatctcttccacatacaccgcggcagaacaagacatggcccagagatataaatggacagtgcccaattagcagagtacctgacccatagccattcaggaaatgttggatgtcaataattagatggacctacaagtgcctaaagcagaaataactttgctgtaatttacaaggccatcaagaccaagcatagcaaacctgccacatccatttctatttctactccagatagaaagatcacttttattttcatactctctgtctcccacttgaaatgcacacacccactatacacatgtctcttcttggtacttacattccctttcgatcctgcagatccgaaagcccccaatgtcgttgtcacccggctcaccctggtttgtgagagtgccccgggaccaatcaccatggaccttactggtatgtagacacatctgtactgttcaaagggggcctaagatatcacaaagaaaacttggtctctgtctcctgttccaacagaagaaaactggtgaatcagagagatatatatgctaggaccagttaacaaatcattgctcttagagtgcacagtatttaccatgtttcatgaaaagcccaatctttatctctatttaattgaagagagtgcaggcatacacatttgatatatttacagatttttgtctccacatgatagtaagagaattgttatttatgcaataaagactgctgatggaaatattaagaaacaaattgtgtgcttctgaagttataaggtttatacagtctaaacatcaaagtattgatcttctatccactacaaaacttactggaaggtgagaagcaatccggaattatactagaaattccactgctatagattgaattgttttagcttgaaactctgattcttgttaaataaacaacgtctcctactaaaggcgtacaaattaagatgttattttctttcaccttattgtaactaagggtcaagcctttccctgagacttagggcttgaggaggagagagactgggaagggggttattgtggaggaaatgggcatcagaggggatatgagaggagaagcacggagccaggagattggggccttcaaaggcaagtttttagtggaaaaaaaaaatagttaccaaatgaaaaaattggactcttgtgagacagacaaagcacaagtctagaacagttggcttagttagcagcagagtagttcccctctcacaggacacagccagtctttaccttatatgggcttttttgtcagagggaggaaatcagaggctgagaaggcacacttcctgttcaactgaaatcattagagcaggcacacacacacattcagctaccccgacatgctgacatctctccaggagagaaactcacgctctctcaccagaactcagagtcttcctaatattaccaggtacagctgccagtttgcaagataaggtctgaattagcgctaaagaaatctgttctcttcagcaggacctggtagtattgcaaggaaaacttggtctctgtcccctttcccagc

SEQ ID NO: 9092 - DNA, 2300 bp, Homo sapien
cttccactttacattccaacaatcttgagctgcttgcttataataccctgcatatcccacatcattttgggaggccagggccgtgttgctgctcatgtttctcctctacctcgagtgccttctctttcactcccaacccttcgctcatcaactactcaaaacctactctccctcttaactgagcgcagtggtcacttcctccaaaaagccttccttgatgtccttacatgtactctcaaaacacaccatgtattttttcttttcctatgctgacaaaaaaaaaattaaatttgtctgcttctgtcttccccattacatcttttagctacttgaggtctaggactgtgtcttgtttatttctgtacctttccgtggctccttgcatatgaccaggaattaagtatattttgataattggagtccttttagaactttctaaaattatgaatgctctctcatcccccaataaatacattaatctataatacaaatctgtaaaatatgtattgattttacagatttttctgggaaggggtgctcccataccctccgatatacactgggctctggagggaaaaaaaaagccaggtttgcctagtgaggtgttccctaataacatgagaaatgagtggtggaatagagaccatgcatttaccatttttcatttttaaatatttcttgttacaattaatgtattctgcctgtgttattttaattgtctcctaggtacaacataagttccacagggcagcagagatgtcgcctgcggtctattgctgcacaagggaactagaacagtacttgaaagaaaagaggtgctcgataaatgttatggaatgaataaatgtatcccctcttgagggtgcagagctatagaatgtgtaagttactgccttctgtgtaaattagggtttgctttgtttttacaataaagttatgtacattgtttcaagggctgtattctgtctatgctattttaaaatttatagaataaagtggtattaggcttttagtatttttgctcattttaattatatactattttccttttcatatttttctaggctaatctcttctcacgtgaaatgactcccttgattattccgatttcattgactctaagtagaaggcaaaccctgtggtatcaatttacaaagggaaatgaagaagatgcagtacatttaggtgaaaacaaaataaacgtcagtttctccaaatttgtgtgcttagtcagatctaaatatattgatgtagtgtaaatactgaatattgaaatattaacctaaataagcatttattattggtaacagctacgggaatatacagcatgaatgtgacttggctgcttaaaaactgttcctcagatggtttaaacatggcctccgagacttgttcccatttaaattacttcataaaccatttcctcaaatatggtacaaagtctattttggcacttgttaagttgtcacaaattctgagttggaagactatgaattaatgaagttttacttccttttgtaatttctttcctaggtttcatcaaagacagtactttcgcttgcttgtttgtttcatttgaagaaaaatcagccaaaactattaaaaacaatatttgactgtttgtagtgcaatacaaagctacgtcttgaaattataaccaacaaaactccaaaaatctgtttaaggacacatttttaaatttaggaccgtagtatatgcagttaacaatcatcatttcttagcactctacattcactgccagcaaactttcaacgtatctggttgataatgaagctggcggggacccagtgggaacagaagtgagtggtacaaagtaaagccgatgtgaatttattgctactggtttcaggctccttacctccataggcttatgcactgcaatgacctgattatcagaaataccctcacaattattcataatacccatagctataggctccacactcttgcgtgtacattcatgcatctccacgtcacacgggctgtcatgctcgcacatgtgccattaattgacaagaatgctgctcaagttggctgatcaagagataggcagtgcaaaggaacaggatttgagacagcccagggtttcctcttcaagtaggtctaaaacatttttttttctcattgacttccttcctgttctaactgccagtactcagaagtcagagttgagagacagaggcaccccggacagagacgtgaagcactgaatgtaagttcaaatacctcgggctggggaggcttcaggtgggcacagagcaaagtcggaaacctctaga

SEQ ID NO: 9093 - DNA, 2300 bp, Homo sapien
taaagcctgtctttggtttttcttctctcaaatattttgaaatattccatatttctgtcatatatagtatccaggatttttagctgtacttagcaagaggcatgagaggaaatgtgtctactttacttggtccaaaacaagaaggaacatagatttttaagactgtagagtaatttaagaattttctaattctaaacccctgagaaccatattagagtggctttaggagaatttttcaaactatacacctagactttctccacactcctaatctctccctcttctctctcctggatttcctttggaggaagaagacttatggcacaaccacccccatattcaaaaattgagaatctgagaattgcaagattatctttctcaagtgtactgggatggaaaaaaattgagaaccccaacactctaaatcattcattttacatatgaggaaactgagactcagagaggtgacatatagcagataagtggtaaacccaagcttgcatatgggtctagaacagtacttttcaaacattaatatgcaaacacatcaccttggaccttgttaaaaagcagattctgattcggtaagtatggagcagggctgaaatcctgcatttttaacaagtgcacagatggtgttgctgctgctgcactttgagtaacaacattctagaacattcactcagcttttggcactttccactgtccttaaaatttgtattctttcatcaagaaaatggagaatatgtaaaagtttgacagataagcatctgaacattaacgtgcctggtatgtaatagtaaaggaagatgtgaatggtaatggagatacagaggagggagcagagggactcatccagagaccaaacactttcctggctttgcaaggtaatcattgctttcaaaactcagaggaattttggtaaagaccagtggagagcatatgaatgactctcaagctgtctagttgctcatgtaatctgcttagggctgcaggttaagaacctctccctgtctagaaaggataaattgaccttctttctctgtaatgttatggagtgtaattttctaataggtaacaactggggaaagaacattgaaattcactggcaaggcatggaagtgaccagcaaacagacatcttggtctctgtctgctttgatgtagtgcagcacaaagacaattgaatatgcaaggtacttccagatttgggccctgttcctggctccactattaattttatttgcagtcttgaataggtcacttaatctttctatgataaatttatcaaaagagcttactgataactaccatatgggttgagatctatttaaaatacaaaaagtattaatctattaataattaatactagtggatcaataaaataggaagactgagtcaaggagtctcagtaaattggattgtaccctagaccctacaccctgaaacatttaggtacggaagatccagcaatcgattctcaaataagtgtcctcagttaacaattcctagctgtcatttgggccctttctgtgtcagatatcagttttgactctgaggttccatctctctgaggaaattcgcacaataccagttagggagacatactgtgtgtttcccaatgtcactgcccgcatgttcaatgtccctgtatagcaggaggcactgtggctccctctcttctctccagttatctagagccccataagaattatgtcactgtgtatatgtgtgtgtgtgattgcgcacataggtgtgtgtttgtcagagaaagggaagaaatgggggtattgaaatctaaaggtaagaataaaaaaaagacagaagatattgaatcacaaactgaaatttacccttggatatcaacactttttgtgtttttgtgaatacaatacctatttattgactggaatgaacccaagtcagttttgaaagggcctctaattattggaaaactcctaagcctgtcccagcatcaacccatgttctcctaacttctttgcacctgggttgctgttctgagcttatgacggtgagattaggcagcatgagggtattacagagagataagtcaggatgcaaagatccttttgtcttttgcaaagaaggcagctgggcagctgataggaacaacattcagctccgtgagtacttctgaacttctggtgaatttgagcaggataattgaagggctttggggggttgatcaggttccaaaagaaaaattgcagaagaaaacatgttggacctgtgggcctgggctgtggctggggatgaaaatgggaaagaacatgaaggaga

SEQ ID NO: 9094 - DNA, 2300 bp, Homo sapien
gtgcagtggcacaatctcagctcactgcaaactccacctcctgggttcacaccattctcctgcctcagcctcccaagtagctgggactacaggtgcccgccaccacacctggctaatcttttgtatttttagtagagatggggtttcaccgtgttagccaggatggtcttgatctcctgacctcgtgatccgcccgcctcggcctcccaaagtgctgggattacaggcgtgagccaccgtgcctggcctgttcaatttctaaattaatttattaactcatttgacaaatataatatatatggcatgattactgtacaccatgcactgttgtaggttctgagactggaaggacagcctcatgaagctagtccagtaggggataaaggaaggaatcacagcatgagcaggtggtccagggtcctggccaatctcaccatccctggtactggcaagggtaataatttagtaataatcagaatttaaataagagaaaaatcttggaggcgaggataataattgcaacccaattgtcaaggaaataagaaaacagtatggactggaagttatagaatatgaggtttcaggaatatgcagtgtggccagtaaagagagtcattgttagcacgagccaaagactgtcagggaggtttgcagttaacagtattagcataggctggtgtgatgggtcatgcctgtaaacctagcacttcgggaggctgaggcgggagggtcacttgagcccaggagtttgaggctgtagtgagctatgattgcaattgcaccactgcactacagcctggctgatggagcaagaacttgtctctcttaaaaaaaaagaaaaaagaatattagcataaatctgcaatgggtgaaataaggaatcttatggagacaaagcccccacacactagtttttatagaggagactgtctcagggtaagaggcaaaagcaatttggagttctctggggcttttcaggatcttccttccaagagcaagttttgttaactcttacgaaagaaaggaagaaagaaaataacgtcatccaaaatgacacattaattgcttaaatttatctttttcaataattttctttgatttgtatttgaagaatggcaatgtgcatttctgtagccaaattaaagtctgagaacaccatattggataggtccgtggtgtggatagaagaaggcattgaagatttgtgaaaagtgggggctgaagaaccttatgtctcgacgtagagttgaagcacaaacgtattacttaattatccttcattaacttctgtatgtgcgtgtgtattaagatgtgttgaatatattcatgggtgttggtattcctgcttcagaggtcctcctgtccagacaactacactgtcatctcccagaactaagagagaagtttctggttcatgtgaggattaaacaaaataatcctatcttaaactataaggacatgaaggactataaaaaaacagaggccataaaaaatgctcaataaacatttagagtcaggttattttacagctggatggaagaatatgtaaagcttaaagaaattgcagatgctgtaaaagactatagatatcactgagtccattttcctctcttcgtaactgacagaactggtagtcacagagaagtacagcatcataataaattcacgtagaatgcttgtggcaaatctattttatttatttatttttaaattttaatttgttatacctaatgtgaagctttaatttaatttatttatttaaaaattgttttcagtggcagatccatgggaacagcatagctacctagatttctgagttttaaaatctatcaattgtccgtttacacaactgatagattgtgtaagtaatgtagcagaaggtaagtttccattccattccattaagtgcctgcattgatttatactctgttttcttaaagatcccttttaaagatgataacttctccccttttgtgtcaacacaaaatactgagctttcttgttgaagtacttttcttctccagcctgaaataaagatctaataaccaatggtccccatgacttgaaagatcttcttttttttatctttcactgtctaaggaggctgaaagggaaacatcagccgcccggggggagttaaaatgagtgacaacactactctgcctgctccagcttcaaaccagggtcctaccaccccacgcaaaggccctcccaagttcaagcagaggcagactcgccaattcaagagtaaacctccaaagaaaggtgtgaaagggtaagaccaaaatgaaaagaaaaac

SEQ ID NO: 9095 - DNA, 2300 bp, Homo sapien
atttggaacatcagaaacttggcaacagtttacttattacaacaatttacatatttatttttgttttctatcttgtcaaatgtaacttttcacattttcatgtgagaaataaaatgttgaagaactcctgtcagttttgtgtcttcctttaagtgatttttctaaacataaaattaggttgacaataaccagctgtatctttattaggttataaatggaaaaaatagcccacacaatttctctttcttatgtgaaattcctatgcctctggggccatttgggagttactaaaaaatgtgacttgtcatttttttaaaatcacatttgatggctactttcatgaaacattaatcagacagataattacttgcattttatatccatgtatatgaacagttttgcatgaaacaaaattattgtttatactagctgcagacacttgcgtgttcaatgtttcaaagaaatacttgccagcacctcttctcatttataatttaaatagttaatatatctccacatattatgtttctgtgatgaagccctgaaccttaaaaacatagggccttttcttaatgaatgcatctaaagtgacaaataaggaaatctttttatctttagccaaaaatatgggactggacaaattgcagatgtttaagcttctggtttttgctaataatgattacttagacactttgtcattattgaggatgaagtaaacaatagctaatgttaatgttgatttttccttccttcagaggaagctctggcactttgaaaatcagcaaatacaaaaccttattaggtacaggatgatagcttaaatacctaaggaagaaaacaattacatgataatgtctttgtagaaatactttttcaggcggattttcactttttaatttctctctcaagaagctctttgtaaaaatttatagatggaaaaatctggcaggaacatttaacacatttagataacatatttgtgtttaaaacatctttactgccttgaaaatggaatgaattatgcagactggtgtgattaagattaacacgggtaaaagtgctgtgctgtatttaggtttaagccattgattgcaaatgttcggaatgagggggtctgcagtccgtgtaaaagatgtgaggcttaatgtgattggctgtgctacagtataaccatggtgggcagattaacgatagtgaaaatctcagggaatttacaccgggtcagtttgtcaggtcatatctcaaagtggaatgcagtggacaccatgcttttagagtgattaagatgttgaggaggcaatgcacatgatgaaaaagggagtgaaggtcaaaaaaacataaacgagagtgtacattccgggaagaacaagtggacaggctgggcctcatgttcctagaaaaaagaagcctaggatggagcaaagggtcctactagatgctaggatccttgaacggttctgagtgaaagaaaaagttgacttgttttgagttatttcatagagagaaatgaggacaaatgagtagaagccgcagggagacagtttagagctcaatattagaaagatagttcctcctaattggagaaatgaagcagctttcagaagtaatgagcccacctttcatacctggaagtggtaagtcaggcatggaatatggaatgattgttatgtcctaaggaaagattcttgctagaagaatggctagaagatttcttcagatgacccccactccagcccccaccaccaccaaagctctttccaaatttacgtttccatgatcctaagaacctagatgtcactcctaaagcaccaaactaaataagatgtgcttactttgtacataatgttatttcccaagctttaagacagcactataaacaaatttacttgaagtcatcatagaaaaggaataacttggagcatggcatttatcgtttttgtaccagggcattgtgtccagcaaaatatagaaatgtaatctatgtattatatattgattcctagaacatgtgtatctgtatctgtcacaggaattcatcatgtgatcaagtgtgaattgagaaaaaatttaactttgagatgcaaaattgaattgtgttgcattggagttgactaatatgaatgtatgttattcaacccaaagagacatgaagaggcccaaaagtgactctctccattgccccactgcatgtgtttgtacactgaatgcttacagatagatggtaaatgtgtgtattcacttttactttcagttactatcaagaatcaataccttcataagaaaatttcttgaggaagtac

SEQ ID NO: 9096 - DNA, 2300 bp, Homo sapien
ggagtgcaatggcacgatcttggcttgttacaaccaccgcctctggggttcaagtgattctcttgcctcagcctctggagtagctgggattacaggctccttccacaacgcctggctaatttttatatttttagtagagatggggtttcaccacgttggccaggctggtctcgaacttctgacctcaggtgatccgcccatctcagcctcccaaagtgttgggattacagatgcgtgccaccacgcctggctaattttttgtatttttagtagagacgctgtctctacccatgttgcccaggctggtcaataactcttattaaataagagtggcaaagtgggaattccaactcaagtctctgtaaatagtatatttacagatatagggtcacagatttttttttttttattaaatcttgccctgagtataagatttaatgggggaaacaaggtaacatgtgaaacctgaacaccttaatgccacacgattccatgtaattggaattctgtaagattctatataatgaatctgggtaattattatcccatcccagacttcaaagatcttctgcatgctaagacaccaaagtctctctcttttccaggcctctttcttaaatgtcgcagccccatacattcaatttcttactggatggtctatcctaaatccagtatgtaaaaaagctcaaacatatcctatcacaacttcttctttatcttaattcattcaattcagtaggtattctttaactacctactatatgccaggctgtaggtatacacactgtatggatgatgctgggaatacagaagtcacacatggtacattcctggcttctgggagctcacagattaatggagaggactaaggggcagaaatgagtacaacacaaacacaatgataagatcacagggtcctgtgagatacagagggaggcatctaatccagatgtatgtggtgtggagggaggggtacattagtgatcaggaaactcataaaccatacaatgtttgagctttctcaaagaaccagcagggcagctcctgctcagctaggcaactcctctttttgccatagatctagctgttccattcagccattcactcgtggctgcagtgaccttccaggtcagtctggactctggaaattgcctccatggttacctcccttcccattgatgacattctacagatcgttcagtttgccctaggcccctgtctgttctatataacactggttttctggaagccgtttggtatcttggtaagaatacccagatttataagggaaaaacaataacataagtgcctcctgcttctttgctcagatgtttcagtttttgggagatcatttagcctctctgaagctcacctcctcatctgtgaaaggctagtaattataatactagttcttacatgaagagagggtgtaaaaatcaaatcagatgagggatatgaaagcaggtccagcacagctcgcatattaattgtctttgttagggtctgagcataatggagtatgactccaatgcaaatcctataaatgctgatcctgtaaggaggacgagaagcttttggaactttctcaaatatatgaatagaatttcaattgaattccttgtttgtttttcctagcatctctcagttcccaatccagtctggatttcattccagccatttactagccttgcgttaccttctccttcagtttcctcttgggtatcatggagataattaaagatacttcaaagagatattgcgaggatcatttgaaataaggaatagaaaacaccacgtagtgatgctttcttaggcaaggttttgaccgaggaaagccgcccttcggtgggagcctggaggcttggaaataaccagtgaaaaagggaagcccgtcttgggtgcagcacgttaaagacccaagctcgcaagcctgggaggcagcgcggcgggaggagcctgcccctgcccccagtagggggcgccgaagcgccgcactgcagcatcctggccgctgagcgcagcggccttggccgggctcagctcgcgtcctgccgcagtccctccgccgctagtcggagcgagcgcgagtgaggagacccccgccgggccactggcacttgcttctgcggcgagtcccacccacgaccgcagcccagcaactcgcaaacgcaacctgaagcctgggctgcgcagtgtgggagggcttcgcgatcttgggggacccattccgaacttgcagaggaccgtagctctcctggcctggagagtgtgaacaggtgagtgtcacgcacgtgtccagg

SEQ ID NO: 9097 - DNA, 2300 bp, Homo sapien
ttgttgcccttggcctatatatatcttatgttctagagattagatcactttacagccacttctgagggcgagtgggaataaaatgctgcttcaggagcgtcaaaataaaaagaaaacatattaaaccaaagttcctataagtgcaatcccaaggattaaatgttcagatagcccgtaagtctaacccagagggagggaggagcagttaacattttctcaaaagaaagaaaatgtccaaaccaatgatgagtggacatgagggacctgaagagagcatgtgatgggaatgtgaaaacaaaagaagcttctaaaagaagacaccaaggataatattctcacaaaaattcagaccatcattctatattttcatgcatatgaattttggtacatatttcatgcatatgaaatttggtacatatatacatatatgtaccatgcatatacatatgcgtacatatacatatacgtatgcatacacatatgtatctatgtacacacatacacatatgtgtacacacatatgtacatgcacacacatatgtgtacacatatgtacatgcacacacatgtgtgtacacatatgtacatgtacacatatgtgtacatgtacacatgtgtatatatacatattcacacttatgtaaacatattcaatctaaagcttccttaagacacatacaaacaacaaccaaatgattagtgtttggccattgctcatgcagcaaaagctgagtaaacacagctctggatccttttctcaggccaccactccctagctgtgtgactgacaaagtctatgcctgaacacctacattcatgaccagggtggcctttcctgtctcctgttgcccaagcatgtctcaggtataaataagttccaatactgacagggcacagcaagggtaatttacatgacaataagaaatgatttctatctgaacagtgcataccagagttgatttcgacagacttatctttaaaaaaatacacataacaaaaaaggagacaagtagtagattggggacccacagcttgaaagtcgttgcttgtgattctaaaacatcccagtaaaattattcacagataattgtttaaaaatataactgtacataccgttgacacttggacaacacagagaatcacgtagttgaaaatccacatataactttgaactcatcaaaaccttaactactaatagcctactcttgaccggaaaccttactgataacataataaacagttgattaacacacattttgtgttgtatgtattgtatactgtattcttacaataaagtacgctagagaacagaaaatattattaagaaaaccataaagaggagaaaatacatttatattcattgagtggaagtgaattatcataaaagtctttaacgtcatccttttcaggctgagcaggcagaggaggaggaagagggtttggtcttgctgtctcaaggctggcaaaggtggaagaaaatctgcatataactggacccaacagttcaaacccgtgttgttcaagggtcatacatgtaaaatactgtgatttttcccccttctatattcagcttcaggtgacccgacacactttggtatcaaaagagaatctgaaatgtacaagaactgcggatttcaaatggaaaaggtgcataattgtgctatttgttcctgggtgagtgtgggacggagacggtgagagtgttgaaatgggatggagataatggaagcagtggggaaggagagaaaatacccttcctatcacacacactcacacactcacactacacactatttctacagtcacaactacccaactgttattgatcctttataactgcaattgagtacagatgtaggaagattgagagggaactgggatctggcgcctggattgctcaagagaggtcagggaaacccctcagaactcctgagacccagagattgagggaggggttgaggcggagtctgcaatgggggctgtccagcagtagcaagcagcgggccgatcctggtggagggttgggaggctgctgtcattttatgggtcggcagccagagtgagagtgtccctgctgccagaggactacggcgggctgggcgcggggtccccgcctctcgctcaccacacagaccccgcgcctcctctggcagccgcggtggtggcggcggcagagcctcgcccactccaatccccaccctctccatccttagtcattaaagaacagcagcgcctggcacgttcttggaggaccccgggcgcagaggaggaaagggagcaggcgcagggggactggaaag

SEQ ID NO: 9098 - DNA, 2300 bp, Homo sapien
cccagcactttgggaggcagaggcaggcagatcacaaggtcaggagatcgagaccatcctggccaacatggtgaaaccctgtctctactaaaaatacaaaaaaattagctgggcatggtggcatgcgcctgtagtctcagctactcaggaggctgaggcaggagaattttttgaacccgggaggcagaggttgcagtgagccgagattgcaccaccactgcactccagcctggtgacagagcgagactccatctcaaaaaaaaaaaaaaaaaaaaagattaaaggaaaaggtaacgagtttttaaaagatatgctctctgggactgagaaataagggaagagcctcagaattgtgactgaggaacaattctgtagtgtgcatttttaaaaaagaaaagcctaggctcagcctaactaatcattcatctatgcccccaaacaacttcacacttggttctatagattcaagttccacatgagtcagaatccctaaaggacataatcctattagcaaaggcagttataaaggaagtgagaagtggaaattgacctctgtgtttcattagcagtcttcctcagagcagaagtgggacaatacaatgcctggaggactggacaattcattgcaagtgaaaaagggctcctgacacctattgtgaattttgcttgcctaagaagaactcatctctttcctccttcaactcttctgcctaaccttgtcaagttgctgcaggaaagaaacatgcttctttttagttggacacaagtttaggagatctgtgataaatcatggcaagaatgattttgacatacttcttggtcctgggcagagtcacaatgatgatattctagaaacaaggttcaaatctttccacacaaagatgtgtacctgtcaaagcagtgaaatggctgacaggactttttcaagcacctctaaaggacaggagctggagaacagacttaggagagtggggcagaaaatgaaaaatccaagtaacaagcaggaagaaacctacaacagtgggtagtcgtctgacaggcgcatataggtggatggaggatgctgttatgtgaacctagcagcaaggtacaatatgtccaaataagcaatgtcagggggtctgagagcaggtaacagggaccccagcttaaaaccttgagttcaggcacagcactctgcatactgggggacctagagggaaagacaacatccaaaagacagggtcacaagcagaagaccaggagacattcaggaatggagaatgagacagcagatgactattagaattgaggaacaggcagggttttttggtctcaagagagcaatgccagtgactcaattactagaaataagtatgaaaaggacagacaacacagcttcctttacgaatggatttatttattattaagataaaatgtctaagataaaaaatttatctaatgttttattaatcttccaatcccctcctatcaattcttttcttaaaaaattatattatcagccaggcacggtggctcacacctgtaatcccaatactttgggaggccaaagtgggtggattgctggagcccaggagtttgagaccaacttgagcaacatggcaaaactccatctctgcaaaaaatgcaaaaataagccaggtagtcccagttacttgggagtcgaggcaggaggatcacttgagccagggaagatgaggcttcagtgagctgtgttcgcactactgcactccagcctgggtgacagagtgagacccccgcctcaaaaaaaaaaaaaaatgatactatctgtttagctttatctttttaaattttgactaaattttcaagcagccatttttctgtctgaattgttccagatagtttccagagaaaggaagacaggttgttggctaaataccaaactgcatctcatcattagaaggaagcacaccaaatttcatttttctccacctttattaagtgcagatttttgtttctcatccaggaagttctgtattatcagggcaatgctaacttcagtataaatgacacagaaactattaatagattatgactatgatgaaactgaagtagaaaacagaagtgttctgaaaagagaagtaaaaaaatggaagggggaaaaggcaaagtattctgccttccaagttagatagctatctttatgaaaggacatatttcaaaggcaatataaagtctttatggtgctcttacctacctatatttgaattgggggatgcttcacctgcttattagtgaaagaagaaagaatacacttagtaaattaaattttttttaaa

SEQ ID NO: 9099 - DNA, 2300 bp, Homo sapien
tcatcactttggagatttcaaggattttaggagctatatgtctggaaatgggatgaagaccaaatatatattttataatatcacaggcctttttaaagcccgttctgtgttactgtttcttactagacgtaaatggagccaaacaaggcatacttattaaatttacaaatgttaaaagtgatcactagtatttatctgaaattgtgtcctaaaacaaacacgataaaatttaataagaataaaacaaaaatcaagatttaaatacatagaagtatagactatgaaaggtggaagatacggtttaatttagttgatgtgaaatagacttgggtgttctgtttgaatctaggtagtgtgtgcttgcatcaaaggggtggctgatcagcagctggagaactggaactcagttcttggcccactgtatttgaatattgtattctcagtgcacaatttagagaggagaatgaaaatcaaaacacattcaaagcaaggtgaatagtgtgattatggcagctcactgctatttgaaaaacacttaaaagagaatttttgaagaaatgtattagatctgttggttacttaatagttgcccctactatttcaaggcttgcagtgtctataaagaatgagattcatattgtgttgttcctaggggcagaaccaagaccagtagtatcagggaagttgatttgatgttcataaatgatacaggctatagtgttaagcagacctggttgttaattctggcgtcagcattggctttggcaaaaagaaggaaacttctgggtttcattttcctaatgtgtttaataggtataataaggcccatctcattttaaggactaggaataatgtgtgtaagttgctcagttcctggcataggtaaatattcaacaaataatcatggttatatgtaatgataaaaatagaaatttacaacattggaaatgttcaagtggatagtggtctggtggaaatattggagagagtattcccacttaaaataggggactggacttagccgttatatcgattccaacttttagaatggtttgaatgtccaccttggcatgttacgtcgtttctccctgactgtgcttttatttgcttcacaaagcaagcaagtccaatctcttttaaccaagtttaatttataggctttcgtggacttctggaagtcaactgacttcgaagttaggacagcatggggggattgggggagtagctatgacaatgaggagttttaagagtgagaaaacacaatgtctatgagaacatggacttctcttttagaggctccatgagctactcagagaggaggttatgagggttggttaaggtacgagaggcacaaagtgaaagaagcctccactacttcaaaccacatcagggcttttggcaagagctacatgaaaaataggctcacaggcagcctggcgaggcgggtctgggcttgcaggctggcgctaaggaccggcagttgggagactctcagggacccgatggagggccttgggcaccaccagtttaccgcatgggttggagagacaaaaaaagaggagagcgacaaaagggggaaaataggtccgatgatcagaggaggaagacgaaggctggctggtcattagatgcgtcttgtttgccgccaaagggcaggggttacgagctgtgcagccagactgggtgttgcaacccgagcgctccctccgcccggggcgtccatcctcgccgggggcgaagctctccacacgctctttgccccttcctgcgcctcctggctgctagtcagtcctgttagggcacttctggaaacctgctgtcgactcgctgccttggtccgactttgatcgcggccttgataacttggcgcagcgccccgtctcctttcctccggtccctctcccgcccacccggcctcaccggccacttcgcctcaagcgctggagtcgaccagaactctgcggctcggctgccggcaagacccggatagcggatttcgctcctggctgcggggcgcgcactcgcccgcccgcccgctcgctcgttcctcgcgcgggcactgggcatgcgcggcgcgcggttggcactggctgcgagcgggcgggcggctccagacttcacaggcagcagctagcgaggcggtctcgcccggcgcgaggccggcgctgtgctcgcctcggagatcgctgctctttagctgggtgcagaaggcggctccgcggctcgcggacgactggctgggcgcgaatcagattggggggctttctcccggtcccctcccacctcgtctgggctcgcgg

SEQ ID NO: 9100 - DNA, 2300 bp, Homo sapien
gccaccacaccttgcctcttttctttgtatataacctctaaaacaatttctaatcacagatttacaactttctttggaagatttatgcatttttaagttacctgaacatctagtacgatgctgtattgaagaggcagtagcaatcatctgtctcgtacctaatctaatacagaatgctttctgtatttcaccattaggtgtggggtttcagatattctatgaggttaaaaaagtcccttctatttctagtgtctcagaattcttataagtgaaagaatgctgaattctatcaaaaacttcttacacatcttttgatatgattttctttaatcttttaatattgttaattatatcaattacattaacctgtcttctaatattaaattgaccttgaagcctacccaattggtcataatacacaatactcttagaactcagaatccaaatgagcaggaaataatacattctttagagccaagtatgtaccataacttaccaattatattcttatctacacacaatgagcaataaatgaacatgtatcagtatctgaccagttgtgtcattttgagtgggtcttttatttacctccatcagtaatgcaacaatctatttaatcagtaaacagtcatgctgagtattcactaaatgccattcacttttctggcactagagtacaaatgacaaagccataaccattgccattaaggagttcataaatgtgtgagtggtgcgtatgtgtgagacaaaagggagaggatggcacaaaggaggagtcgaacaagataaaatgaaaaacatatatagtaagtgctttaccgtaagtgaatgaacgagagtactaaggaaaaagaatggagacgtatttcaagttctcacgttgtttgactcgaatcttgtagacggtgtttgctgcaaaaagatgaagaaaacattcacagacatttatgttgattacatatttattgctatgtgcccagacgttttgaccttggggataaagtagcaaagaaaacacaaaaatctctgttgtattgggtttacattctatcaataaagatacaacttgcccagagaaaagccctctcctggttaggaaacagtatcaacaattaacagctctggtggtttcacagagccacagtgggctgcctgctgcagacaatatcagagtttgtttatatttaaatattattttaatatttctatttttgtccatgtattataatgcacatctatgtaatttgcaaatcatcactcatatatacatcatatcaaaaggtgtaaaagtttttgatagaattcagcattcattcgcttataaaatgagtgaaggctcactttacggatgagagtatttcatcaaaaaaattggggatctacgactctagagttctccgaagtccaccaaggaaaaagtaacttgaatttaatcgcatttaaaactatatagtatccactcctaaaacattagcaacataggaaaacttacacagcggaagaaatgactggggattttttttttttttttaatacatggtctcgctctgttgcccaggctggagtgcggtggcgcgagcaccgcttactgcggtgtcgacctctcgggctcgagttatcctcccacctcagccttccaagtaggtgggaccacaggcaccaccactccaagcccgtatatggtttttaaataagacaaattgcaaaaaacgttgccagacagcgttcgctggtttgggccgtcactgggtatggctcgtgtccgtctagatattcagaggccgagcacagtcctcagtagggctgctcggcaggtacacagctgacgctggtccttggacttatgggagtgggaacaactttcaactcggccgcggaccaggaaggcgttctgacccgctagagctcggggacagggaccccatcccggtgcctagagcgtctcccttagtcggcgtgggccagcgccagttacctcacgagcactgaactagcgcctgcgcccttctatacttctcgctctttcttcaagtcacttctacccggcgagcccgccctcccgccaatcgtcatttccggcgggtgctctgcgtcatttacgtcgtcacttcctgccgatgccggtgtggacgctgtgaatcgtggctggcccggttctccgcttctccccatcccctactttcctccctccctccctttccctccctcgtcgactgttgcttgctggtcgcagactccctgacccctccctcacccctccctaacctcggtgccaccggattgcccttcttttcctgttg

SEQ ID NO: 9101 - DNA, 2300 bp, Homo sapien
gtggtctatagctctttctttgaggggacttgccttagggatacttcagaagtttcataaggcaataaatgtaaaaggaatcttcacaaaatgaaatataggaacatttctctgtgaaagaaactcattttttgcatactatccctgctgtctctcctaatgttgccaaattaacatacttttaaactgcagagattaatttgagattaatacattcaacaggtccattttagaaaaagtccttgagaaattcttgactgatacattgctaaaacattgctttaagaggctgccctaattctgatttttcaactaatttaggatatcacaatttaaaaacaaacaaacaaacatttatgtaatgaatggtatggaatctggtttggagttgtgtttacttctaaaaatagaatttcatgtattgcctttgtatcttctagagatgtgaatgatctccagccagagaccaccagtaacacacctacaagtggacaaagttgtgtttattgacattgtaacaagggagaatgcttgccatgggcacctaatgtgaggtgtctcagtaagaggatgttagaaactacataggatttgggcctgtcgtaggtgatttggggaaagttcaaggaaggatctggactggatgatggtaggaactggtgatagtagtgcatcttaattcttatctaaaacataggaatggagtgaagctagaactgattggtaaagaagtcataatagctaggataggggctatttgaacaatattcatggttttctattatcagacatgattatgattatgtttttgttgattcattgtggtcacaatggccttggctgatgctgtgctgtgaaattgtatacgtttaaccagggaaaaccatggtccagttgtgagtttcaggccagctccaggctttcagggcctgcttttctctttttcaaggttaatataaaaaagaaaagtgctatagtatgtatgagtaagatctacacacatccgaaacattcaacagtggctgtgtgtggacaaggctgaaagctcaatgtagaggagtatacaaatattactattcctatttaaaacagctcagtaattactgtgtgaacttgacaataacattaacagcttccattttttaagtatctactgtatgccatgttatgtactaggtgccttgcatacattcaacagctttgcaaggtgaacatattttgatcatctccactttacaggtaagtagacagactattatttccagaactgccaagttacatttattaaatggaagagctggtatattaatgggttcagctcattttgagctcactgtatttcccctataccaggatgcctttctattcagaactttgatgtctaaagttacagcaatggagataaaatacattattggcaggattgttcagagactcaaatgctatcatacatctatatatgatgtatgaaagcacctagcacaataactggctcatggtagacaaatcataactaactgtactgttttcatagcagaggtgcctctaaacgtgagtacagataagttaactatattgagattgtggagtgactcgacgattttaacctcttggtcacagagaaatcaggctgaagcattttacctttatagaatcatagtattttgaagaaccaagaaattgtcaaggtcttcttttacagatgagaaaaatgaagctcggaaaagcagttaatttgcccagggtcacacatttaattattgcccgagcttggctaagaaaccaggtcttctgactcctaagcccttgccttcttcaggccacatagctgcttcttttcatgatgtgtagattagaaaagtcagtgtgccccggggcccttgattgcaccttggtttccctaacaaggatatgggatccctgctgacatttcagaccttaagttgcagagctctgcacttggatcttcttccttcttgttatataatcttacagttaaaagtttctaggaatatttttattacgtgcaattggcaacttcagtattttttaaagggtgttggtagcattatttccgggagctacttagcgctccggttcggtacctcgtggagaagacgggggaggggagcagcgagatttccttgcggagcaatattcctagggtacagacctcgtagcccgggcccgcgactccgccccgggagcgggcaggggcggggcgagcgctccagctggcgggaaggaggaagggccgggcgcggcgcagaggcgggcgcctaccagccggcagctccgga

SEQ ID NO: 9102 - DNA, 2300 bp, Homo sapien
acaacttttacctgttaccgccctagttcacaccccaactgtcattcttatttctaaatggaaactttccttccacaagcttaatggcaactttttacctttttggcctttgtgtttactagattgtaaaatcctggaggacagctctttgacgttatttatcttagttttagattttagcatcaaaccaagtacattgcattcatttaataaatgtttattcaattaaaccaactgctaatattctacccaatacagtgtcatatatatatccgtatgtatatatataatattgcctgatacacacaaacacacacacacatatatatatgtatgtaacaggcaataattgttcgtgatttagtgatagtaggaactcagtatttattcattgatcaattaatagtttgaacacattctatatttagagcattagatgagtcaagtgctactttcttttttaaaaaaatgttagaaccagctggacgcagtggctcacgcctgtaatcccaacactttgggaggctgaggcaggtggatcacgaggtcaggagatcaagaccatcctggctaacacagagaaaccccgtctctactaaaaatacaaaaaattagccaggcgtgatggcaggtgcctgtgatcccagctacttgggatgctgaggcaggataacggtgtgaactcgggaggcggagcttgcagtgagctgagatcgcgccactgcactccagcctgggctacacaggcagactccgtctcaaaaaaaaaaaaaaaaaaatgttagaaccattcaactagcattctgtagaccaaattatctaaacagtagctctcctcttcctttttctgccatgttatccataagatttggcctgtatcaccttataataaatgaagagagtcttaaattcttataataccaaactcctttggagagaattcagaatagatttatgtcatctcaaattctatcctattccagttaatgttacagacagattctagtatactttacaaagataggtgaataagtagagttttgaaaagatacagacataaaagtgaagaacagatgccttctgatgctagattttccaaaactcctactgttatgcttatatagaaatcattctcagaccttccttggattaatttctgttcctagagcaaactggtagttatttctttctttaatagaacatgaacttgtccatcacatcctagaaagttagtcctagggatatcctttaaagcctaaaggagtaaattaagagcaaaaaaaggaagtagaccttgcaacaggtggtgagtgtctgagatatagcactaggagagaaataatatagattgaaaacagaaatccttaaacatttctcatataaacccatgaaagatagatccataaatattgtggggactatggggactaggaagcttggaagtatccctaatctagatagtgatggtaggctaaatatctacggcttccgtaaacgttcctctaaacctccctgtaaaaaacacactaagctgattgtgtaatgagctgatccagtacaattgcctccaatttcattctggaccctgaacaggaggggacatcgtgacaaagcaaattgtctggtatcatgaatttggaacaccgtaagtgatctttactgagggttacattctgtcattgtcagccttttaaggaggccttgccaccagcgcaggggaggtgaagtctaagggaaggtaatattgtcaatgcctgctaattagttctaccctggagattttaactttctgcgaagtttttaaaaacaacttccaaaactctgctgatcctgaaatgttcgagaattcagagttcctagacaatggctactgtcccccttcccactgattaggggagttggcatttcaggaaccagagtttctaagggcgccaaatagaagggctcaaagggaatcagcaggcgatggttactgtgggcgggtaaatcaggtgatttagaggaggggtttggcgaggttggggtcgggctttaaacgtgggagggctaattaacaggagattaactggagaggggcggtgcctgcgtccggcccgcgcggccacagtccctgcattgcgcgcgacccggcggcgggacaggcttgctgcttcctcctcctcggcctcaccgtgcgtactgggaggggagaaggggaccgcatgcaaagggtggcaggcagggagggccagggtgggtggcagatggaagacttgggggggtctctgccagctggaagtgcttggctccacttagcagct

SEQ ID NO: 9103 - DNA, 2300 bp, Homo sapien
tcaatactagaacaagcagacacattaaatgttaccaaaaatattatattgcactgagagctaatctaacatactgtgctttcaagactagagacttatggaggttgattaatttgctatctaggggattttttaaaaaccttgcgcatgtagtttctgtttgcctaaatccaagctgtatatttttagcctaagaaaacaaaaataggggggccaggcatggtggctcatgcctgtaatcctagcagtttgggaggctgaggcgggtggatcacctgaggtcaggagtttaagaccagcctgacaaatatggtgaaaccccgtctttactaaaaatacaaaaattagccaggtgtggtggcgggcacctgtaatcccagctactcgggaggctgaggcaggagaatggcttgaacccaggaggcagaggttgcagtgagccaagattgcaccactgcactgcagcctgggcgacagagtgagactccatctcaaaaaaagaaaagaaaaggaaacaaaaataggggttacttaggtagctttgatttctttatctgcaaaatgggaattttaatacctcaccacataactggaaaaagaaagaagatgacagatataaggggtgcctacttgtgccagccacagagtaggcattcacttaatgtcaattgaattagaattaagcagaattaaagagttgagagcagaattaatcaagcctcttgaaagagagagtatagtgtagtaaccgtatggggtgttcgtgtcccagcttggcagcttaacaactctaattccctttttcttcttttgtgaaatgggtatagttatgacaattgtaatagattaacaaaggtgatgaaagtagtgtacataatgtacatagtatagttgaacacatagcaagctctaataaagctaagtatatatgtatgtggtttttaatcacattcaccagcaacacaaagatggctatatgaccaataaagatacatataaatgtatagattactggtaagatggatagaaagattgcagctgataggtgtcaggctaataaggacacaatgcaggggttgagctttaaaggcaggaatgaacatcatctagaagagacagtactacatgccaagcaggataaatagcctctaagcttgggtctgagaaaagttgtgtgtgttctgtggaagagagagaagtagatagcagggctgataaaagaacaagaggaggttacaaagaataatggcagaggactggaaatgtacattttaagctttaccctaagttcctacctgttttgacttcagtatcaccagtgtgtcttggccttcctcttcagcacattcccaattatacttccaattccagacacagataactacattcctctactcaacggcttttagttgaatgtaactttggaatgtgaaatgactcaaggatcatgtaaagctaattctccttccctattacacccatgaaagtaccatatatggtaattccttaccttgcatttgcaagcctgttttttgatgtttccattatcctgcttctccttctttacctgtcttcgaattgatgatgatggtgatcatgatgacaattgtgataaggatattataaatttattgagggtttttcttgggccagtccatattttatctccattacattagacaataacccattaagttagaagctattactatttcaatttttttttttggagggggagacagagtctcactctgtcacccaggctagagtgcagtggtgccatcttggctcactgcaagctctgcctcctgggttcatgctattctcctgcttcagcctcccaagcagccgggactacaggcgcctgccaccacacccggctaattttttgtatttttagtagagacggggtttcactgtgtcagccaggatggacttgatctctcgacctcgtgatccacccgcctcggcctcccaaagtgctgggactacaggcgtgagccaccacaccaggcctactgtttcgattttaagaatgaagaaatttagtctcagagactgaatccctcaagcaaggttaacagctaaatcgtgggactggaattcaagtcctaaagcctacagttttgaatactactgaaatgacaagttgtaagttgggtctccaaagcaggatacataagaactgaggccttcctaagttcagtgctgctgctaggtacatagcttgatgtttccaaagagatcagtctatgacctctggtcttttgctttcaacctacttatagttaatctcagtg

SEQ ID NO: 9104 - DNA, 2300 bp, Homo sapien
aatgttgacagtagggtgttaaagtctcccattattattgtgtgggagtctaagtctctttgtaggtcactgatgacttgctttatgaatctgggtgctcctgtattgggtgcatatatatttaggatagttagctcttcttgttgaattgatccctttaccattatgtagtggccttctttgtctcttttgatctttgttggtttaaagtctgttttatctgagactaggattgcaatccctgccttttttcttttccattcgcttggtagctcttcctccatccctttattttgagcctatgtgtgtctctgcatgtgagatgcacctgaatacagcacactgatgtgtcttgactctttatccaatttgccggtctgtgtcttttaattggagcatttagcccatttacatttaaagttaatattgttatgtgtgaattttttcctgtcattatgatgttagctggttattttgctcgttagttgatgcagtttcttcctagcattgacagtctttacaatttggcatgtttttgcagtggctggtaccggttcttcctttccatatttagtgcttccttcaggagctctttcagggcaggcctggtggtgacaaaatctctcagcatttgcttgtctgtaaagtattttatttctctttcacttatgaagcttagtttggctggatatgaaattctgggttgaaaattcttttctttaagaatgttgaatattggtccccactctcttctggcttgtagagtttctgccgagagatcagctattagtctgatgggcttccctttgtgggtaacccgacctttctctctggctgctcttaacattttttccttcatttcaactttggtgaatctcacaattatgtgtcttggggttgctctcgaggagtatctttgtggcattctctgtatttcctgaatttgaatgttggcctgccttgctagattggggaagttctcctggataatatcctgcagagtgttttccaccttggttccattctccccatcactttcaggtacaccaatcagatgtagatttggtcttttcacatagtcccatatttcttggaggctttgttcatttctttttattcttttttctctaaacttctcttctcgcttcgtttcattcatttcatcttccatcactgataccctttcttccagttgatcgcatcagctactgaggcttctgcattcttcacatagctctcgtgccttggttttcagctccatcaggtcctttaagtacttctctgcattggttattctagttatccattcatctaatttttttttcaaagcttttaacttctttgccattggttcgaatttcctcctgtagctcggagtagtttgatcatctgaagccttcttctctcaactcatcaaagtcattctctgtcccgctttgttccgttgctggtgaggagctgcattccttttgaggaggagaggcgctctgatttttagagtttctagtttttctgctctgtttttttcccatctttgtggttttatctacctttggtctttgatgatggtgacatacagatgggtttttggtatggatgtcctttctgtttgttagttttccttctaacagacaggaccctcagctgcaggtctgttggagtttgctggaggtccactccagaccctgtttgcctgggtatcagcagcagtggctgtagaacagtgtgtattggtgaaccgcaaatgctgctgcctgatcgttcctctggaggttttgtctcagaggagtacccggccgtgtgaggtgtcagtccgcccctactgggggggtgcctcccagttaggctattcggggatcagggacccacttgaggaggcagtctgcccgttctcagatctcaagctgtgtgctgggagaaccactactctcttcaaagctgtcagacagggacttttaagtctgcagaggttactgcggtctttttgtttgtctgtgccctgcccgcagaagtggagcctacagaggcaggcaggcctccttgagctgtggtgggctccacccagttccagcttcccagccgctttgtttacctaatcaaacaactaactcagcaatggtgggcgcccctcccccagcctcgctgctgccttgcagtttgatctcggactgctgtgctagcaatgagcgagactccgtgggcatgggaccctccgagccaggtgcgagatataatctcctggtgtgccttgttttaagcccattggaaaagcacagtattagagtgggagagacctgatt

SEQ ID NO: 9105 - DNA, 2300 bp, Homo sapien
ggtggtgggggtcagcattagtgaatggagaacaagttcacagtttgggtcttgggccattagaggaagggaggaagggaggaaggagagtgtgtgtgtgatcccctgaaccaggcttgtgtggcggacttgcggagcagcgacttcagagagttcatgaatggaagtcacagacagaccagcgactgcagccacctccaggcatttcttaaaggggagggttgtgtgctttttccagggtattctggtagcagtttgattctcttgcttttattttaatttccataattggtagcttcagaaatggctttggaaggcaatttgctttaaatgtagccacctattccaaaatgccctggttattttaggaaccctacccttttcctccggagctctctcgcaggagttcttcttttggactggtccaggaggtagggtccttcctcagtcgactcctgcagaggtcacattttgtgtgcgggtttgtccccagcgtttgtgagtagcatatgcatgtggttgtgctgactgcactcgcaggcttgtaaattttcaccctgggaaattagcaacaaagcccgatctgtctcgtggctgctttgcactttccgagggcggctgtacttgactgagctgcagaacaggcacacgagagcgagcgagggagccagcgagagagggagggagagaaggaaagaagaggggaggggtgggggcgagaggtaaatagtcttaaatcggaagggagctgcttctctgtggtcttgacaagcgctgcctgggctccgccggctcactaataactgagtgaccttttctttggctgtattatgtctggctgggaagggattgcattttgcagctgagagccggagcttccttcagctcggctcctcgcacgctgctggggtaagttgtcttgaaccaggacggagagagacagcctcggactgcagttgcctaaaaggaggacacctgtggctcagatgcggtcaacaccattgcttggcgtatccttgaggacctcattattttaaacttaaaaaaaaatagacattccctcccccgtcttttttttttttttcaaacaatgcttctttttgacctttcccaaggagaagcgctacaaagcagccactgtgcttactgaacggcctccccctgtatcgcttaattgagaaggtaagtgcagcaactgtgtacacacgcgtcggcttatttgtggtgtgtgtgtctgcgggtgcgcgcgtgcgtgtgcggatgtgggtatttttttcttccccaacctctgctaatgaggcataaactggagctgcaacccagctccgcactgcaactttcactcgggctgcagctctactgagacggttttgtttaaatcatgtgaggcttcattatttttatgatgagacatgaaatagatgcaggcggaagatgttgatggaaggagggagagcggctgcggcgcggaacgtctcaagtacgactcgagtggataatagtcaaagttcaccatgaactgcagtatttccacacccctgactcccggggagagaggggcagggagagtttggaattaggaagtgtttgctcccagcccataggaaaagaattcagtcctgggtgggtttccggacccctcccccttacttgctggaattcatgaacccccacttcttaaagagttgatattacaatcttttggtccttgttgacgcttctgcctctctccacgcagccataataacaaaatgttgttcctttgccgtggaaaagtggctgtgtttgggcatgggggcggggggggggggcaggcgggtaggggcagaagtggctagaagagggaaggtccctggaccaaggtgcctatatcctaatagattgagattcaaactgatgcagcacattttttacggggactactcagattgctgttatgaaatacaagtcagatttatgatctttttcatattgaacatgatatgctatgctaacgctgcatgtgacagtttaatcaaatccatttgttaccaggaagctaaaaggggccgctgggattttaggattacgggcagagttagggaagcatgtggctttgtcattcgccatcattttgcacactgcgaggggctccgtgtgtgcgccctgtcttgtctggccgtcctcatcccttcccccaccccctgccgccactccgacccgctcccaaagtggcttcacaatagtcggtcctcggcggtgtaggctgcgcaccaggtccacacttaagcgaaatcaaggagacccccttctacttctac

SEQ ID NO: 9106 - DNA, 2300 bp, Homo sapien
gtcataatgaaaagaagagcattttatgacccatctaattatcattacattttaggggaaaatgaatggcatggagctgaatgttaactattccattttattcctttacacatgtggtttggcatattattcgctaagttcctctctctctctctgtctctctctctcctctgtctctccttctctctctctctctcctccttgcttggcagtattacttgcttataagtgtgggggaaatggtaaaattgagaggaaaaggaagattggggaaaaaggaagaggatgggatgcacttagagatctgggtgtttgtcccttaagaaaaaggtgacaaagtggttaatgtctttgcaggttggtgttgatatcaggaatcttactgccacagtccaaatagagtactaattaccgcgaatgatgtcaccgtaggcagaggaataatcccatcatttaattagttgaatgatttaaacaaagatttgcatagatgcactaatcagttgccatgaattacagagcagcagttgccagcgaggggtaacagatcatacagttggagggaaaaaaaatctcatctccttgaacataattaatttaattgtcctcattagctgtaccatttgttttgattttatttctccctttccccacacatacttctccctccctccctccctcttttcttcttctcagtgcattggctgagacagagcgcacgagacacacacacatgcatgcacacatatgcacacacacacactcacacatactggggtgttttcagagtggctgtagcagagaggtggggtagaacagtggggagctgtgcggatgggtgaagtgcatgtatgcctgcctagacgggccagaaaagccaaacttaagaaatctgcctatgtacagaacaagtcaactaaggggttctcattaatctaccgtctgtgaatatcgttatttttcaggttagttctgagttttgttgccttttaaagggagaggaaagcaaaccacaggctattttattatgagccttcaaaagggagggggtaaaaactagttatcaatgttgtgcctttattctttatgaagaaaaacaaaatttagcttaaatactcatggggggggtgctttgattttttttttaaaactagagctagattaaaactgatggtgaagagaagaaaaaaagttttttgtagttcaacaattgaatatttcttggctcttaaacatttcagtgagtgtctttcaaatgtggaccatttttaagcttgacctctgacaaagctttgtaaaatctggtgagggtactttaagagcagcccaaacagagggtgactttgaagtttgaaaacttagaaaaataataaggtattttaaagctaccagtggcctttatagatgccaaggaaagttaagaggagaggaggttagagagaatgggacctattagaaaaaaaaaaaaaatctgtcaaggccttaaaacaagcctgtgaagacaaagcagtaatggtgcagaaactatggttctttgaccaagttagtcctgaaaacatgtttctcagtgctgttggctgtttttcattggagcgtgtgagttttaaatagtaaggaattcaagtaattgcaggaagtgtgtttcggggtggtggtggtgggggtcagcattagtgaatggagaacaagttcacagtttgggtcttgggccattagaggaagggaggaagggaggaaggagagtgtgtgtgtgatcccctgaaccaggcttgtgtggcggacttgcggagcagcgacttcagagagttcatgaatggaagtcacagacagaccagcgactgcagccacctccaggcatttcttaaaggggagggttgtgtgctttttccagggtattctggtagcagtttgattctcttgcttttattttaatttccataattggtagcttcagaaatggctttggaaggcaatttgctttaaatgtagccacctattccaaaatgccctggttattttaggaaccctacccttttcctccggagctctctcgcaggagttcttcttttggactggtccaggaggtagggtccttcctcagtcgactcctgcagaggtcacattttgtgtgcgggtttgtccccagcgtttgtgagtagcatatgcatgtggttgtgctgactgcactcgcaggcttgtaaattttcaccctgggaaattagcaacaaagcccgatctgtctcgtggctgctttgcactttccgagggcggctgtacttgactgagctgcagaacaggca

SEQ ID NO: 9107 - DNA, 2300 bp, Homo sapien
cagctctggcccactcaggttttgtatgcagttcgggaagaaagtgagaaagggagaggcacacaagaaagacaggaagcctgaagcagaggtttctttcatttgtgttgctgaatttcgaagagtgatggtgggagtgtgtgtggtgggggcagtatcaacctcatccttcccttgaccgagacctttcactgctcctggactttcagggtgtgctatcctttgcctccccccaacaacctgtctgctgccctaaaaaaaaaattaaaaaaaaaaaagacggcaacctaaccggagcatctctgggacgccacagaaatcgtaactgaacacccgcacacaaaagtaatctgtgaggtgtgttttaaagaaagaaacagctgaaaacttgaagacgtgtttagaaatatacatatatacacactattttcttgtgggagatctcctttgggcaaaggtaagtagtatatatctaatcaccccctcagcaccctcctccaccccattttgtcattcccctccccttttcccctcatcaaggtatcacaatataagacccctgaagaagacagtctgcctttttttttcctttaataagtgttgggatgggggctggatgaagtaaattctctcatcaaacgtctgatgatgagttgcagaaagagggcacaggcaaaaggtaatcggaccaaaaagatctggctctttatagcaatcctttcgcaaagatttccaaaggatctgtaattaaactgggtagtttactctcaggaaatgaagaaactgcttgcctggctggatccaacctttagcttggctgagtaaacaaaagcacaaattcttctttcactttttccctcgcgggaggggtgagactttggggttggggggagccaggaaaacagggagtttgctgagggttaatggtgtttttcgcaaagtgtcagcagaagatgattaaattccacctcttgttcaccagatcactttgtgtgcacttgtatatttcattgtcggcaaccgctgatgatcacatctgtgcagtacattaagtggcaagcctcttcatctgcacggggtttttctgatgattttttctgtgaataattcatatgattatgaagagaaaaactgctattttctatctctctcccttctgtagcacagattaaaaaaaatcttgctgtaaattgcgtgattggggagatagcctgctttcaaataatttaattcatgacaaaacctaattactgtcaggtaataccctgtcagctttaatgcatttcatcagtcataatgaaaagaagagcattttatgacccatctaattatcattacattttaggggaaaatgaatggcatggagctgaatgttaactattccattttattcctttacacatgtggtttggcatattattcgctaagttcctctctctctctctgtctctctctctcctctgtctctccttctctctctctctctcctccttgcttggcagtattacttgcttataagtgtgggggaaatggtaaaattgagaggaaaaggaagattggggaaaaaggaagaggatgggatgcacttagagatctgggtgtttgtcccttaagaaaaaggtgacaaagtggttaatgtctttgcaggttggtgttgatatcaggaatcttactgccacagtccaaatagagtactaattaccgcgaatgatgtcaccgtaggcagaggaataatcccatcatttaattagttgaatgatttaaacaaagatttgcatagatgcactaatcagttgccatgaattacagagcagcagttgccagcgaggggtaacagatcatacagttggagggaaaaaaaatctcatctccttgaacataattaatttaattgtcctcattagctgtaccatttgttttgattttatttctccctttccccacacatacttctccctccctccctccctcttttcttcttctcagtgcattggctgagacagagcgcacgagacacacacacatgcatgcacacatatgcacacacacacactcacacatactggggtgttttcagagtggctgtagcagagaggtggggtagaacagtggggagctgtgcggatgggtgaagtgcatgtatgcctgcctagacgggccagaaaagccaaacttaagaaatctgcctatgtacagaacaagtcaactaaggggttctcattaatctaccgtctgtgaatatcgttatttttcaggttagttctgagttttgttgccttttaaagggagaggaaagcaaa

SEQ ID NO: 9108 - DNA, 2300 bp, Homo sapien
ggacataagcatgggcaagggcttcatgtctaaaacaccaaaagcaatgacaacaaaagccaaaattgacgaatgggatctaattaaactaaagagcttctgcacagcaaaagaaactaccgtcagagtgaacaggcaacctacagagtgggaaaaaatttttgcaatctactcatctgacaaagggctaatatccagaatctacaaagaacttaaacaaatttacaagaaaaaaacaaccccatcaaaaagtgggcgaggatatgaacagacacttctcaaaagaaggcatttatgcagctggaacacacatgaaaaaatgctcatcatcactggccatcagagaaatgcaaatcaaatccacaatgagataccatctcaaaccagttagaatggcgatcattaaaaagtcaggaaacaacaggtgctggagaggatgtggagaaataggaacacttttacactgttggtgggactgtaaactagttcaaccattgtggaagtcagtgtggcgattcctcagggatctagaactagaaataccatgtgacccagccatcccattactaggtatatacccaaaggattataaatcatgctgctataaagatacatgcacatgtatgtgtattgcggcactattcacaatagcaaagacttggaaccagcccaaatgtccaacaacgatagactggattaagaaaatgtggcacatatataccatggaatactatgcagccataaaaaatgatgagttcatgtcctttgtagggacatggttgaagctggaaaccatcattctcagcaaactatcgcaaggacaaaaaaccaaacactgcatgttctcactcataggtgggaattgaacaatgagaacacatggacatgggaaggggaacatcacacaccagggcctgttgtggggtggggggagggggagggctagcattaggagatatacctaatgttaaatgacaagttaatgagtgcagcacaccaacatggcacatgtacacatatgtaactaacctgcacgttgtgcacatgtaccctaaaacttaaagtaaaataaaaaagaaaagaaatgtaaatgattactcctgtgatcaacttagtctggaaatgaaactttttcacttgggcctcaaaatttagtacacacatgtagacttattgtatttgttgtagaatttctacatatctaaattgggagataaaagagaaagacagtaatggggcagtagggaaatctgacaaaaagaaatatgaaaaactcatcattttgcatactaaatttatctctttattataaagcaggaatgaatcatgccagaataccccttccaaattttctttcctttatcatttctcttttctaatttcaatgtactacagaaggaaatatgacaggtttatatttatttttctaacaaatgacattgattgctttatttttctccagaaatattgctgttttctattgacaaaacatttttaaaggagaaattacttattaaataagacattggataagttaaaactctgtactgcccatttttgcttcttgagaatctcatatgattcacaaacatggtctagatatttatttgcattggtatccaacctaaacttctaaatcctagatagttgtgctctttttatgattgaatgaatggatttcccttttttttcacagaagaaaccctagcagatataggctcagatactaataaaacaaagaaaccaatccaatcaaagtaaatttacagagatgtttacccatcctctaaaaattttctaaatgaaaagagattatacttttttttaggtcctaggagaaggtagattccaggtacacaaaaatagagacttgtaaactaaggttctgttataaatatatacatattttcttcataagcctttgtgtctaaacagtaactccagttttttttttaaatgttatatgaaaactgagttgaaaactactctaggaaaacatttttaaagttattgttggctggcaggaatatggggcggagttgagaaatgagagcagcaataaaaaggaagttaaaaaaaagcttgtcacagggcagtgtagttccagaaaataggactgaccaagaagcagaaaagcaagatgaatgatgtgaagcttgctgtcttgggtggtgaaggaacaggcaaatctggtgagtggtgacatcttctctgttatcatagagtgtagaaagagtgagaaacattgacatgttaaccattaaccacgtatttcatatatatttcatatatatgaaaat

SEQ ID NO: 9109 - DNA, 2300 bp, Homo sapien
gtttcgagcaagactacaggcagatgagtaaggacacttgtagaactcatcttgcagtgtgtgttctgaaaattgaggaattttgaacaaagaaatcacatttgctttagagtggggggaaataagcctatttagaaaaaaatagaaggttatatataatttgacattgatttcttaatgtaacaagcaagaaagttttagaaggctgttcaccatggaacttaaaattttgactcttacaataaaatgcataaacaaaataacctaattaatgttaacataatagacaggaaatcaaataaacttgcacgtaaacattgatttttaaataaaatttgcatttcattgttgaagcttgatcattctgtcttaaatactttgcctaaaaaacggagtagactactaccaggtaagacagaaggctttgtgtgtttaaattttagacataggacatagccatgaaaaaagtaaattttagaagaagcttaattgttctctggattttattttaattaaaagtgctactaaaataggtaagcgtacatgttaagcaaggaaagataaattattgaagaacatattttcaaaggaaacaaagtacaaggtacatttttgtaccctttcttgttaatgaataatgactatcaaactgttctaaccttaatctttgagttttatcaagattagattgttccttttcaacccagtccagctctcataagtcctcctgaaaaatgtatgagcctactttaatgtgtggtaagagatttgtagatccaaaatgtttcaatttttgaagggactatttttcttaaatagtggctcattttaggaattaatttaaagagatttttaagggtttagcataaatgtatttggaaaaaatcactacatgtaaagttatttttaaagtcatctatctccccagagttccaaagctaagaattgcagctcaggttattattaaaatataaaggtatgattgttttcctgtgtgacatcaccctccacttctaggtcaagctcccatttttctgtgacctctcacacctttgtagctttagaacagaaggggtacaagggtcaggggatggtgttgtacaattgtgaaccttcaatactataaatatctttccatgagtagccctgaaagtgatataattctcaactttctcttctctacccttccatgtaagaaatcattcttacagaaaactactataaatctaaaaagaagaaaaaagaagagaaaaaaacagcaacaacaaaaggatcctacgacatattttggaaacaagagtaatccaatttatttttatttcctaaaactttctcccagtaaagcaggcctacttctggcagatcctattttacctggatttaattatataatttcttgtgttgtctcagagtctccacacattgttcaatttcaagagcagtataccaaaacaataaaccacccacatctacttgctaatcttataaatattgttttattttgctgttccttttcagatgttattaaaaatatttaaattgaaatttactatgcatcctaaggctaaactaaaaattaatatctttctaaattagaaaaaaatgaacttattaaattctaattaaataaagaaaatacctcgataggtgaaactcacagaatggctagaatacctttttcaagggctcacctctgctcctgcaaattgagaccactggtttcaccacatccaaccacctccacgtttaaatgcataataaccttagctgtaatttgaggggaaatatgcccaccttacacatttttaaaaaatatattttcgtttgtatattgctgatcagtatctttggcccgaattctgtttagcacagagaagctcatttatggttgggtttttggcttaaatcctctattcattatgtcaatgcaaaccttttttctttttttttccatataacccttcagggtttgatggaaaatagatttccaaacacgcccaacctgccaaacaggaataaaagcttccagtggaagcatcacgttcccttgaaatagaagtgttttagcttgtgtgagcgtatttgactcttgaaaagaaatgagatcgtgtttcatttcaggaagatatatgcgtcaggtaagaaactaaaacaaataaacttcctatacttaactacatagcatgatatttcgactcaaatatattattgaggcaaaatagctctttaattatactgtgatacaaaaatggtagatgaatttaaaatcagagtgagtttgtgccatattttgaaacaga

SEQ ID NO: 9110 - DNA, 2300 bp, Homo sapien
taccaaaagattcttaaatttatttttattaccagttaaaattcaacttcaaatagaaaatagtaacattacacaatctaaataagttacaacaaaaattacagtattttataccttgatagtttataggaagtatttgaaggaaatttaaagataaatagatgaaataaagttaagagtggaaatttcataccacaaagttctgtacaaattctagaaggcatggagactatcacctgtaagtttcctagcagccgaagtcaagagagaaacaggattagttacaaggtttacaatgatcataaaaaacagcagtgaatgagagagaaattttctctgtttccaaaaaggctcaaagttaaatagtggagtgtcctcaacatcaccattagagaaggtaaaactttctcttgggtgcctccacatgtaagtggttggcatgacattgcataatcactgaaaacattttgctggtgaccaaaccatgtagtctgaatatgcagttttgtaaaggttgacttgatccatggataaaattaaaactatctagagaagtagcaagagccaatattatttatgaaaagttttctttcacaatatagttcttggtggttttttccccccaccccaagtaaaaagctcaagattgttctctggcagcactccagagaactcatactctgttgataaaataggcaagacaatttaccgtcataatcaaatacgagtcaggaaagcaaacattcttccatagaaattaagaaactttacaaataaacattgtttcttctccaacttaaaatctaaatacataaataaatccgtaagccaagaaatatattcatttgcaattctacaaatgtagccgaatttagaacttctgccttatttgcccagagagtatccacgggccagacaagatttctctatgaatattctaggtccatttctccaatacaaagacaattagttaagaaaactctgaagttttacattatagtgcattgccacatgcctaaataaagcactgtgcacttaaacaaacaaacaaacaaaaaccaaagcagattacccaaatgtggtagcatgtgactgtagtcccagctagttttgaggctgaagtgggatgatgacttgcgtctaggacttcgaggctgcactttagtgtgggtgacagagaccccatcttaaaaacaacaacaaaaaaacaaaaacaaaaacagacacaaaaacaaaaagcaaaatttaaaaaccccatcctggctaacacagtgaaaccccgtttctactaaaaatacacaaattagccaggcgtggtggtgggcgcctgtagttccagctactcagggggctgaggcaggagaatggcgtgaacccgggaggcggagcttgcagtgagccgagatcgcgccactgcaccccagtctgggcgacagagcgagactctgtctctaaaaaaaacaaaaaaaaaaccaaacaccccaaaagaatttattaagaatttaattattcttaataaagatttggcttggttggtgaagcctccaagttaaatgagattcaccaattctctttctctctaaagccttacttcctcatcagggttcttccaacttttatctctattattcccaagggtatataaggtctctctctctctctctctctctctctctctccctccctccgccccccccccccccaccgcctttctctcatattttaggcagtcctgaattcagtacattgacttagtgttataattgttttatctgttctcagctatgctcttacctaagtacttcttgggtcatctccctagaaagggactgcatatgatcgccaaagaagaactaaatctaaaagattcattttctcatatggcccatttggtgctctgtgcttctgtttggaaaaactactgattttatataagtacttggtgctgggacgacactcccttctccaggttgtcatgacttacagcagggtttctcaaacttttcattttttaagtcagataattctttgttgttgggggctgtcctgtgcattgcagaatgtttggcagcattgtgaccgttacctgctagatgccagttacaaacctctccctatctccagttgtggcagccgaaaatgtctccagacattgccaaatccctcctgtgaggcaaagtcgtcccagtggaaaaccagtagcctgtagacatggggtaatttaatgtacttactggttttctatggaaaaatatctctatgtatgacaagggagcttttttaacctctttcctattatg

SEQ ID NO: 9111 - DNA, 2300 bp, Homo sapien
tagcaagactttctctaaggaagtagtgaattgatttatgttctggctcaagctctttatgtcattgccaactggaaacaaccagtttacagatgagcactttaagtagcactgatctagagaatattaccaaaacaattactttggcactgtaaacttcaggtggtaaattaaaagatacaaatgagatgttgggatggaggcagtgacactttggaattgtgtttgcattttaactacaatattatactgttcatccatttcctcttttgagccttcacctgcctcaaatactctccaacacagccaggaccttgcatttcatttacatgattattgatcactttggtgtcttattaaggccaatttgaattatgatcttatagttccaaatgctgccaagttcctcagcctcatccctcattggtatgtgacaggcaccaaatgaggtttttaaaaatccatgtgattaatccttatttcaaactggtagtttttaagggaacaaaatgagtttattttctattccattaccaaagatatttatttaattattcagtagttcaaaagggctaagccaattactgctaattaaacagggaaaaataataaatgtatgcaagtcattactgttacaatgcatgattcatttgctccatacacttctatcttcctaaatttatatggcttgaaatagagggtttgtatacctataaaaatttcatttattttcttctagcttttatttttttaaaccaaaatagtaatagcattttgaatgctgtcttcttcatttttatgatgtcataacatttacttacatcactatatttttatgatacattattcttaatggctgcttagtattgtatcatattttgagctttaatttgtttattcccctgcacttatcttgcttttataaataatgctaatgtgagcattcttgtacatcactgtctgagtctctacttccataggataaattcctggaaataaaattctctgccaaagatcacactctaatcaagtgaatgctcatgtcaccttttctttttggttgaaatgaactatcaacagtaataatagcaactaaaaattttagagtgaatatataagggtagatcctattattacccccattccacagatagggagaggttagctaatatgctcaagatcatataacaagttaaatggatatgagtccaggctgtttccagagccagtcttctgcttgatagatattttggtacatattacagtgagtaaaacagttcagagattaattactaaagatgatcagatacaaatgacccagaaattccattcctaggcatgcaccatacagaaatgtgtatatatttgcactaaaagacatttactggttatttttggcagcacaatttgtagcagccccaaacaggaaattatctaaatgcctatcagtgatagaatgaataaataaattgtggcatagtcatacaatggaatactgtaaagtaatgggaatgagcaatgtataactataactacatgcaactacaagagtaaatctttgaaatagaatgttgagtaaaagaaaccaggtacaaaaaatacatactgtctgagtcaattcatataaagtgcaacaaccaaagaaaactaatctatgcttttcgaagtcagatcagttgatatacttgggtgtggtgagtgactgggaagttagtcggaggcaggcttctggaacactgcaatgctttgttcctcaacctgtgtgccagtcatccagatgtgtagcttgtcgaagttcattggtccataatatatgtacttttcttgtgtgtattttcaaaacataaaaaaagagataattaaataatatattatttacttgaatgttaatatggaagaactgaaggttttactacaaaaatttgtttccaaacaacataaatatagtattaatattaattctaaaggaatattttagaaatatgctctactactgagtaagtttacaagtgagatgtagttttttatcttgctaatggtatttttgcatccttttaacttattttattttatttttttagttaggaaagcacaccaaatgtcattagaaggttttacaagatacatggattcacgtgaatgtctactgtttaaaaatgaatgtagaaaagtttatcaagatatgactcatccattaaatgattattttatttcatcttcacataacacatatttggtatctgatcaattattgggaccaagtgacctttggggatatgtaaggtatttattttattttt

SEQ ID NO: 9112 - DNA, 2300 bp, Homo sapien
aggaaattattctaaactgatatcctggtattatttcagattttctcaacaactaattttaccttctactgaaatgctctccatcttgattgtaaatatagttagtataattaattgcttttcttcttaagagactaacctttatatgacaattactgacattggattaagttccacctaggataggataggcagggggtggatgtcatcttaccttaaaaatctgtttcacatgaatataactgcaccgaatatctaatttttcaagtaacctctgagttttttctaggttaatttttccacctctgaagtcatcctgaatctttgacaaaaaccatgtagaagcacaaaaaagttaaggaaattctcacagaaagtcattgaatatttaaaattcctaaagaaacatttgatttactgtattatttttatttttaaagaatatgtttaaagtaaattatagtataattgtatgataaatattttttaaaaaacaaaattaagtagttactatgctatggtaaaggtatgaaagggcatagcacagtaaaaatacaaaaaaaagaattaaagttaaaatttgagaattgaagtcattacttagaacatacattaaaacattataacaatctattgcctgaaggcatgaagttggaaggcagctagacttcaagatcgcctctcacctgacctctctgttttagttctctcttccagaaaggtgagcaaattaaccctgaatcttaaggaaagtggaagcattagatgaattcctaatatgccaccgaacacagtttctgctacttagtgttcaataaatagtaaccatgactgataaagttattattactacattagtccaatgcccagctacacacacactcaagacagtaccatcaaaaagcatcagaaataccatggtgagtgtatatttggtatgaaaaacgaaaaaaatttttaaaagcttacttatcatagataaactacaaaaactaggacacttccatttgaaaaactaagatcgaaatgagataatgacaattatcactaaaattataaaaggtataggtaaaaattgtgcaaaactactaagtttcagattgttagaacgaattaatgagatctccttaaatttaatagttatgacttaatccagcaaagctcatgttcttgtaagaaaaagataccagaatgcagggaaagttagaaaagctcagaacaaacagggaaaagcagttcaacttaaatgaagaggacttaaattcagaactcctcgaaaagaataacagcatcaagtaaagaggataagtaggagaaagaagaagaggagcagaaagaagctctcaatggatatctcatttccatagtttcatgacctgtagagccgtttctcctcacttagaagtctttccccagtaggtgctgtcatgggttccaaatacaattaactctgcccctttgcagaaaataatttcttgatactcatcagctgttaccacttttctagggagaaagcagagaacacacagtggttttttttgccttcgttctttgaagctagctcacacttaaccatagaaacagtatgcaagatgtggtacctgcactaccctgcccttgaaactgtttggcttcttacgttctgaccacctccaaacccacaatatttgaaaacacagctttccctgatgtctggcatttttccatgaactgccattgtatctccttttattttttactactttgtttaaacccctcaaacctttcatcataatatgcttccagtgggtttgggcagctactctgagagcctgagtataaatcaacaccattgtgattcctgaagttgcaaagtgctgtcactcttgaaactttgggctgcttctctagatcgttgacaacatataatgcacacagagacacaccactttcgaagaagactgttcaggaggctaagttcttaaaatcttcaaaagaggtatagctggttggctgggcaccacactgtcaggtgactgtcattttttccttttggtctgaattcccattgtgatatcatcagaggttccacacttcacaaggaaagcttcttatgacctcatcaggaggctcagaccttgccagactgcctgctttcatggatagacataaaaaccttcagcttgaatgttaacaccttgatgggaaaggtggctcatggaatgttttcttatcctttgaacactcctcatttcagaagctttgcttctgttgcaaccaaacatgacacttagcgtgctgagcaggaaggacaaggaaag

SEQ ID NO: 9113 - DNA, 2300 bp, Homo sapien
ccataactgcgaccaataaattcctgttatttgtgagttactcaatatatggtattttgttatagcagcacaagtgaactgtgacactatgtgtctggaagatgtgaacaacttgagaacttaggtttttcttaggtacaacggagataatactagtaccagattagtgatgaaaaatgttatgcaaaatatttagcacaagccatgttatgtaataagtacttctaagtgtttacagtgacgacttcacaaaagcctggctgtaaaagtttgggaagtcaggcttctctggttggcttggaagaccatgttagttatcagacaagccagggattttgagtaaccccaattcttgaggggaagaaagtagagtggaagaggagccaaaattactaatagtccttcatctgagctagatttttgatatctgttggttttgtggaaaatccaaacctaatgtcttttattgaaattccccatctcgtggatggtctaggactgaattgagttatgtaaaatatcatttgtggagtgatattcatttgtataccttttcagttcgaaacagtcaaaagtctctctctctctctctctctctctctcacacacacacacacacacacacacacacacgtacacacccacacacagccttaaccctggccacctctatactatttctggaatcccagattctataaaactattttagtttctaacaaatgtcttggtctttatgatggtcaccaccatgaaacacagttactttacactttcttgccttgttcataaatattccccaagtaaaattacttgctacacttttcccatttaaatttgcattggctaagtgagagacatctctacagattgctcaattttaggaaaataaccattcccaagaaacacaaacaagtcaaatcaagatagttaccaggagcaattctttatattatccagttgcacaacacacttcttgaataaatgacatatcctaatttaggatacatcaccagattcaagtcagagagtatcctgtgccagtcaataagagtgcgggtcactggaagatcccttcgtagaatttttctcagggcttcattggataactcctgtaattcttccaagactgcagcttgaaatttgttctcttgctcttccacaagccttgcaaaacttagagccagttgagcttggttaactatttccaagctttctttcaggtccttggatatttcaatatgaaggttgacacacctgaagaagtgagcttgcacaaatattcttcccgttacttgggttagaaatgggttaacttggaaaatccatttagatttccaaagtccgttccagcactctcctgtttcatagttgtgatcttcaatgcaagctatcaagtactccttacttttgacagtttttctcagcatgttgcaatttccttttggatagtggtcattcacatacagttttaaggcgcacagaagaacaactctcaggtattctgcctcattctgaatgataccatgactttggatgtctttcagctgattttgaagcaggtcatatttgaaagaaagtttgctttgatggtcaaaaaatcggtagtcgcccattacattgtggtgagacaagagtactggatttccatcgatgcagagtggtacagaatatttttggcagtgttggtggcctgcacactcaccttggtggtgcataagtttttcatcacggataagcagacagagatcatcaaaggcatttacaaattcccctggaggggcctgtaataacagtctgcgaattactctttccttgtccttcctgctcagcacgctaagtgtcatgtttggttgcaacagaagcaaagcttctgaaatgaggagtgttcaaaggataagaaaacattccatgagccacctttcccatcaaggtgttaacattcaagctgaaggtttttatgtctatccatgaaagcaggcagtctggcaaggtctgagcctcctgatgaggtcataagaagctttccttgtgaagtgtggaacctctgatgatatcacaatgggaattcagaccaaaaggaaaaaatgacagtcacctgacagtgtggtgcccagccaaccagctatacctcttttgaagattttaagaacttagcctcctgaacagtcttcttcgaaagtggtgtgtctctgtgtgcattatatgttgtcaacgatctagagaagcagcccaaagtttcaagagtgacagcactttgcaacttcaggaatcacaatggtgttgatttatactcaggc

SEQ ID NO: 9114 - DNA, 2300 bp, Homo sapien
tcctaacaaaaaagtcagcctgccctttgaagctttgaagccaggcattgacttttcctctctagcagtgaaagtcctagatggcatcttctttcaatagtaggctgttttgtctacattgaaaatatgtttagtgtatccaccttcaatgatcttgactagattttctggataacttgctgcagcttctacatcatttgctgcttcatcttgcactattatgttacggagatggtgtttttccttaaatccctgatagcttcaaccttttcttctgcagcttcctcagctctctcaaccttcataagattgaagagagttagagccttgctctggattaggctttggctaaagggaatgttgtagctaggttgatcttctccccagaccactaaaattttctccctatctgcaatgaggctgttttgttttcttataattcatgttttcaccagagtagcattttcaatttccttcaagaacatttcctttgcattcccaacttgtctaattatttgacacaaggccgagcttttggcctctcttggctgttgatacatctgagcttaatcgtttctagcttttcatttaaagtaagggacatgcaactcttcctttcacttggtcacttaaagggcattgtagggttactggttggcctaatttcaatattaggccattattattagacaattattagtgtttcatttcagggaatatggaggcccaagatgaagcagagagacagaggaacagctggttggtggagcagtcagaacacacacatttattaagtccctgtcttacatgggctcagttcatggtgccctcaaaacaatttcaacagtaacatcaaagatcactgattacagatcactataacaggtacaataatgaaaaagtttgaaagattgcaagaattaccaaaatgtgccacagagacatgtagtgagcaaatgctgttgaaaaacggtgctaggacttgcttaatgcagagttgccacaaaccttcaatttgtaagatgtgaaagatctgcaaacagcaataaagtgaatcgcagtaaaacaaagtgggcttgtacagcaaggaggttatacaaatatacttttgaaatcctacagccagtttgaatccaggctttggcagttattactatgactgggcaaactactgtgtttttaaacttcatttttcctatctgtaaaatggggattttttatagattgtgtgtgtgtgtgtatatatacacacacacacacacatatatatatatacacacatatatatatagttgttgtgaagatttaaaaatgtacaccgtcacaaggactccataaaataagctattattgtaatctattggagacagggcaagtaaaaatccacactgatgttaagtgaatctttaaaaacaagtaccagaaaaagacgagtttttattttataagatatgacctaaggggcctaggaagagaaaaaacttgttttgtcaagtctaaatccactcatatttcatggggccacgtatcacgtccaacctttgatatctggcacacaacaaacaaacaggaaaggcctttcgtgtgctttaataaaaacagctttccattttaaaacgataaatatattggaaaaatctgttggctctccaacagctcttataaaacaaagctcagacgctgtgtttttgttgtttgaaagagagaaatcaggggcttgggcattattaggctccctttgatcgcgccctgggatgggaagccttcgggcaaagccctgggggcaggacgcgtttttttttttttttttttttttttttaatcgatcccggaaccttcgcgcggcggagggggcgggcgcgccgcaggggcccgagggaggggtctggggcgcggcgccgcttgcccatcccccgagcgcgcggcggggcggccggccggcggccgccgggatgcggaggggcggcgacgggggccggaccctgccggggcggcggggcgggcaccgcccgagggggtagggcgcgcgcgggggcgcgccgggccggggaggcgcgctcgctccgcgctcccttcgctcgctcgttccctcctccctcggcagccgcggcggcagcaggagaaggcggcggcggcggctagggatcagacatggcggcggatctgaacctggagtggatctccctgccccggtcctggacttacgggatcaccaggggcggccgagtcttcttcatcaagtaaagagccggggacggcacgggggcccgcgggggcgggagggcaggaggcgggcggct

SEQ ID NO: 9115 - DNA, 2300 bp, Homo sapien
taaataattggtatcttaaggctagattactttgcacaatacaattattttacaccagggctgctgtttcccactgataaatgacacagctgtagcagagttcaaacatgaggatcaaagtacctatgctagtaatcaagatagtagtgccttgggttatatgagtgtgtagacagatatctcacatatgtgtttgtgtgaggggagtgtgtgtgtgtgagagagagagagacagagattttatgtgcttgactgaactgtcgatttgacctttggactaactctatgatcgttagtagttattatcagtggcagtatttgaataggagtagcactatagccctctgccttccaagaggacttgtaggaagatgttcctactcctcctgatgcagtaaagtcctcttttatgatttttcccttctaccccatactctgctccccaagaagttataagtatcagtggtttagggtccatttttctactgttctttctttgcatgtacatacttatatatacataaatattttaacaaaaatgggattgtcctgtaggtactattctttaactttttatttaataaatatcttaggtcttttcatagtactggttaaaggtcaatatcgttctttcaataactgtaaaacatgtcttgatggttttgttatactcctgttgttggacatcgaggttttttcctatttcccccgccccctgcccaattgctagaagtatgatagtgaaccaatttaaacagaatctttgtggtcacatgcaaatatttttataaaacagttgttttataaaacaactatttagatgtggaattgctgaaataggctgtattcgtagttgagctttggtaagttgtagtaagatcctgctaaaccccgtaagtagagttcaaaaaattggaaatgcttaaatgtgcaatcataatattgaaaaataatactttttaataagtctgtggagctacaaaaaaacttacaaaagtaataatatgacacattgtgcaaaactgactgcataatgattcaaaaagccccaaatgataacaatacattcacttcttaaactcctctgagaattagggttggccaaatcattggagacatttgccaatcacattcagattaatttctggttttcctatttggtttactgttagacagctttcttccaaaaagtcttaattatttatccttacttatatccttgccagcacttggtgttactgtacttaagttttggctaggccaatgggcaaaaatggtatcttcttgtttgaatttacatgctcctgatttcagccatgcatggcatctttttcaatatttattgcccatttgaatctcttctgtaaatttcctgtttcacatattttctgtgtttttctattgagttatttttcttagtgatttatgttaggtatttatttgtatttttgatatctaggccagttagcttagtagacatctcgaaaatattttggttgtgcacccctacaaataaaaagtttttgagtatataccctcaagtacgaacattatacatgtatttatttaaaaagtatatacatgtaatgctgtcaatctgtgtcttacatattagtaaagctgttttttcttattatttaaaaataagtgtaaatagaggtactaaatattttctcctgcaacccagtggaaagcccagtgtgcacccacttaggcagttaggagttcagaacataatataccttagaccagttagagttgccaacaggaatatgctctctgttttgtgaccacagtgtgcatcttcataagcctgtgggcaccaagaattgtggtgaagtggaaagtagcaatgtgttagaccttgactctcttaccttagttagctgtattactttgataaaattgatactgttatataccagttttctctcatgtaaagtggagaggataattcttgtcttgcccattttaataggcttatgatgttgtgagttaatttatatgaacaaactttgaaaaactgtgaaacattacataaagagataaagtacgtgggtatatgttttccaagtttatgccattggggttctaagagaatatgcctcaatatcatttatgctgaaaaacaacttaaaatgcatggcctgctcagagtggtttagaaatgtgatcatttagtcttcctcttatatagattttacacctcttgaaagtaggaactgttacacataagtcaatgagtatttgttgatagtgtagtgttcacttaataatatacgtatttcttttttctattt

SEQ ID NO: 9116 - DNA, 2300 bp, Homo sapien
agaaatacattgatatttgtgagagagaatgggtacacttaagttttaaaggtgattattcatgtaatagcctagaaatcaaattatctgactataagaatgcttagatggagaaaacatttttcagcaaaaccattgtaatagtatattatgtttattgtaaggaaatagataattataagataattataataatagtattttaaatgccagttaaggtttttgaaataaaattttgttaggagattataaatgaatgtaaattttcaagtaatataaataatttctgattattaagtaaaataaatccaacaggctaactgagcataatgctttatgagtatattttaattaaaatctggagaaattgatgaatggattgagagccactaggtcattgtcttgaaagaaagttgaatctgttcctcatactttacaccagaaattttctagatggatcagttgttgaaatgttaaaaacaaaactaagaaaaaaacaatggaagatttgaaaaaaaaaaaaaaagaaaagctcagaatgcagatgggctttctaaatatgacataaaactcagaagtaacaatataaaataatgagaaattcaaccacacgtaattattatccatgcagagtatctgtaattcatataacaattaaagaataatttccttataattaaagaagtgctgtgaatcaataagaaaagggcttatgagccagtttggaaatggaaaaattatatgaaatcagttttcgggaaagaaaatggaatttactcttaaatatatgaaaaaagattctcagcctcatccataatatgaaaaatactaattaaaaccagaaaaagacaccatttccacctgcagatttccaaagatcagaaagtttcataacacagcacactaacaacagtatgggtaaataggcattcggtttatatagtgagctccaagaaataatggaacagaagagtggatattaaaatatgcagtcatttcagaaaaatactcattaatcatgagaacaattattttagatagataggcacacacatacagtgatattggttgccacacagttgtgagtggggctagctgggtgctggagcccaagagtgagtagattgatctttgtgtatctttttgtgtcgtttgagttttatactgtttttaagcattacctgtttgaaagtaaattaaaatctatcaagaaaacatgctttaggaaaaattttgttgatattgggccttaaaattttcttatatactaataaaagcttcccaaaacaaaattctaaagaagtatgctggatttccaaagattctgaacaagtagaaaagtaagagataattttatgttactttatagcttcattgttttcatctttgttggtcaccattatgattcctgccaaaataaatcttcatggtaaccatagcagtatttttaaagactgtatatccttatgtgtattttgaagaatccagtaaaccccatctgtctagtttaagttcagagttgtccataaaaaagaaaacactacatcacattaagcagatccttcctgtcctgttttgacttgatgtgatatatttgtttatatttaatatctgtatatttctcctcagactgagtgccattaactttctttaattgaacctgcactattaaatgcagatataaagggaaaagttctgtcatttggtttattcttaaagatctgttaacagtttttactcaagatctattcattttatatagcaggtaggacaaaatactgccacatactctgtgtttctaaaaattgtatatcctatccagattttaaaggaaagattgtaaaacttgtgataccctgggggaaaaatttttggtgcggaattcttacacttcaaaaaactaacccagcaaaagtagaattttaataatttttctgaaaagatttaagtcctgcaagtcttgggaaaatctgaaaagagattaaattttaagaggaagataagctcaaatctctaggcattaataccacattttctgtcatgctctttttctatttagacttcacgagcttcaaaaaaagttcataattttggaaagaggtcaaattcaattaaaaggaatcctaatgcaccggttgtcagacgaggttggctttataaacaggtatttttttttttttgatatgaaacaaaagacagaattagaaggaaccttttaaactgaatgtacctaagacaattctataaaatcataaaattaagaaggaactatggagaagccacccaggttatttgactgc

SEQ ID NO: 9117 - DNA, 2300 bp, Homo sapien
agtaaatatgttttaaaaatcttttcagttattttatgtttaatgttaaaattcctaccctcccaaatagcaagggatacatatgcttttagtgtaaatgttctatgccttctttgttgttcttgttttgagatggagtctcgctctgtcgcccaggctggagtgcagtggcacgatctcagctcactccaaactctgcctctcaggttcaagcaattctcctgcctcagcctcccgagtaggtgggattacagatgtcctccaccaagccagctaattttttttttatttttcgtagagacggggtctcaccattttggcccggctggtctcaaacacctgatcttaggtgatccacccaccctggcctcccaaagtgctgggattacaggcatcagtggccacacctggccaacttttatttttcaagagaaagaagcacatagtctatcttagtaaattttcccaatgtctaatgttgcctccaatctagaagccatggtttatatttaacctaaatatatggatggttcataactttactccaagaaaaatagtcaccttttttttttaattttttttccttggtgaccatattccaaagcttctagatatcttcatctatagttgattacagatatatgtatatagatctacatcctttccacacgtcataaacattggcagcattaccacacctagtttctgatagaagcatttttatttattggaatatggagggttggctggctcctgagaggcctcctagagtggcatgatcttggcagtttcgtgcaggttcacacactcagcttgatcttttcagagtctggaagtgattaggctcagggaaagacctagatatggcaactagaatagtgagcaagtacaactgtcgagtgacctagacacatgctgttaacgagctcattctttcagtggccaggtggacatgggatgccagattctaacccaagattgcttgatgtgttggaattataatggtaaaataaggtctgtgccagccactcattaactcatctgattctcacaagaaccctctgatcttggtggcacaatcatacccatttaccaaagaggaagcataggcactttaagtgttctgtactttgcctgaagactcagctagtaagaacagagttgcaagctggacatgtgcagtcagactccaagagctctaaaatcatactgagttcctcttgaatacaaacaaaaggagttaattatatggttcagatctttgatagcatcagactatgatttcctgttgcagccatttccacaaccagactcatgtttgtctcatgagtcaacaagcagctaaccttggctgggagccatgtggctcctttcaagggactatctactgtggtcctttaagtgtagactttgtggtttaactgtcataaggcaatcttaatttgctttattttcagattcctaatggtgggagcacacatcactttttacgctctagttctttatgttttctttttccccctttctgtttatacattctggtgttgtgcttgaatgttaatatcacagcattgggtatttgtgtagacttgtccactgtgaccctttccagtcccctggcccccacccccgtaaagtataatttttcctagattgaatcccagaagtaatatgtacattatttcatctgatttactatgattttcttctctgatttcagagtggacaagattacatctgaaaatgcaccaactaaagaaaccaataacattcccaaccatagagtgctaattaaaccagagatccaaaacaatcaaaaaaacaaggaaatgagcaaaattgaagaaaaaaaggcattagaagctgaaaaatatggatttcagaaggatggtcaagatagacccttaacaaaaattaatagtgtaaagctgaattctctgccatctgaatatgagagtgggtcagcatgccctgctcagactgtgcactacagaccaatcaacttgagcagttcagagaacaaaatagtcaatgttagcctggcagatcttagaggtggaaatcgccccaatacagggcccttatacacagaggccgatcgagtcatacagagaacaaattcaatgcagcagttggaacagtggattaaaatccagaaggggaggggtcatgaagaagaaaccagggggtaagtgtctgtcttgtcattatgaacccaggtttctttgatgctgtgttggtggagattggtttctgagctactgattaaaatattggtttaaattgtgttttagctgtta

SEQ ID NO: 9118 - DNA, 2300 bp, Homo sapien
atccaattctcaactgtctgctactgctactcccaaaagacttctccaaaattgccaaatttttctttcaaactatcctatcctcttccttgatctagatcagtggttcttaaagtgtagttcatggacccctgtgggggttccctcccatgaccgtttcagggagtcaaaactatttttatgatcataataaggcattattcattgtgttcctatttgctctagtagtgcagaagcgatggtgagtaaaatttctggcaccttagcataaatcaaggcagtggatccagactatgctagtggtcattgtagccctccctgccacacacttgaagtaaaaaataaagtatcaggttcacttataaatctcattcatgaaacagtagaaaataattttattgaaccttaacattttgttacatattcttttactattacttgtgatgaaatggtaaatgcataaagcatttctatggcataccaaagtgctaaccgttgtctcacagtaaaacacatgatggagttgcaagctgaattagttccttttattgtgaaacatatttttacttgaacaaaagacaactgtcaatattcagacgtggtatttgatagacacactttctcaaagtgaatgctatcctgtcacttcaaggaaaacaactgacagtatttgttactgataacaacgtttgagttttcaagcaaaaaatagaattttgaaaatcatgtatctgccaccctgaacttgacagctttccggtgcttaaagattggcggtgatattaacagttgtgatgtttttatattgtatactgacatatgtcaatatttagaacattgcataactcactgaaccaatattttccagatgaccagtgtttgatgtcacaagattcatttaaagtacaaatagaccaagtggatattaatgtaacagagtatcaaaagttcattgataaggtttcagatatcactttgtaactaacctttaaaaaatatcagttttttgagctatagcgcagtgtcaaagatgaacatctataattatcaagaaaaactattaaaattctctccttttttccaactatatatattgagggtagattttcttcacatacttccactaaaagagattatcacaacagattaaatacagaaacagatacaagaatccagccagacattaaagatttgcaaaactgtaaaacaatgccactcttgccactaaattttctttttaagaatataaagggatcctgaggtcaaagagtttttgagaacctctaaaccagattttagaattactctgttcaggccgggcaagtggctcaagcctgtaatcctagcactttgggaggccgaggtaggtggattgcttgaggccaggagttcgagaccagcctggccaacatggtgaaaccccgtctctactaaaaatacaaaaattagtcagacgtggtggcatgcgcctgtaatcccagctacttgagaggctgcggtaggaggatctcttgaacccaggaggtggaggttgcagtgagctgagatcttgccatacactccaggctgggcaacagagtgagactctgcttcaaaaaacaaaaaaaaaaagaattactctgctcatccacatcattatttttttagatggagcctcgctctgttgcccaggctggagtgcagtggtgctatctcggctcactgcaacctctgcctcccggggtcaagcacttgtcccacgtcagccttccgagtagctaggattacaggcccacgccaccacacctggctaattttttatacttttagtagagaaaggacagggtttcaccatgttggctaggctggtctcgaactcctgacctcaagtgatctgtccaccctggcctttcaaagtgttgggattacaggcgtgagccaccgcacccagccccacatcagtattttatgtcaagaaatgttagtctctatcatctttcataagcactaatagcaattttaaatggtatttcataataggaatttaagatttctccttgctgacattgataagaaaaaaaaaactttaccacagaattacattgtgcctttactttcctagcatgtctatgtgcctgacagaaggtcagtgccagctggcctgactttacagtctgttagtccccagagcctccaagggaaaacggtgagtaatatctttatttaccataccatgttttatttatgtgctgcacaggaaggtacatatctaacataatttttaagtttgaattttcagaggttctcccaaagaaaaaaca

SEQ ID NO: 9119 - DNA, 2300 bp, Homo sapien
actttaatatactaatgtttttttctgttgactctgagatatagggtacatttgatattttaatctagatgaaacactgtctgctagttatattcagattctgtaatctagtaaagctgttttgcatttaactttaaatattaagcaaactacggctgggcgtggtggctcacgcctataatcccagcactttgggaggccaagatgggaggatcacttgaggtcaggagttccagaccagcctggccaacatggtgaaaccccgtctctattaaaaatacaaaaatcagccaggcatgatggtgcacgtataatcccagctactctggaggctgaggcaaaagaatcacttgaaccctggaggcagaggttgcaatgagccgagatcgcaccactgcactccaggctgggcaataacgagactccatctcaaaaaataaataaatattaagcaaactatatttgaacatcttagtagcttatgacttttcatctttaatttgttataaatatgaaaatggaattttggcattgtcttactttttttatcatagatctacctatttaaaacttacttcatattactttttttccagataggaatataaattattttcttggatctaggtgctttaatttacaatgacagttgacacttctcaggacacacctgaggatacttattttgaatagtataagagtattctaacttttgtcattaaattcatttttcatgtaatattcattcctatgaaagttttgtggtttaacaatcactgcatacccttaaatagtcacagattcatttgcatgaggtatgtgaaagtaatgtcttgaaatgaaatataaatccaggatttattgtatgtttggaatgcttatatttttaaccttctcctgattcccacatttctagatcaattcaaagttatctcctgtttaaatgatgcttccttttaaagctgtaactgtcaagcagtttctttcatagagaaaacatatagaattgtcatttatacattcttatgtattatgcgtatatgaaatttaattttttaaactggaatgtaattgggacacattacttctaaccccaccttgaaaacattgtgccatttagtaaacatgcaatgagccccatttaaattttttctactgtgtttttgttattttctcacagtcaatataaaaatcaaaagacaagaaaaatagtgaagtattgcctgcagaggctgtgatgttatctgtggtataactgactgggatggctattgaaatcttgctaagcacaatcagaagtaaccaaaatatcttttaaccaaaatgtactgggcagaagctgaagaaaggatatttaagtacactgaataattccttacaatatagtaacataaatggagtcaactaacacacataaactttttatgaaatttgactatccatagtttataacataggctttcagttttataagatttcgaatgattttcctcttttcaattaaacccatccttttccttcattatcttttagttcttaagacagaagagcaagataagtctatattgtgtatgtgtgtttatatattatatatatgtatacaatatgttataggttttgttaagatgtgttgacatttgagtgtacacatacacagtgtgtgtttatgtatataccgtgaaggatggttttggctgttgaactatgcttaatttaagtatttgatttgacacagttgctacgattgtatttgtcagtttttttattaaaataatgtgtgtctttaaaagaaatgatgtaagatactgtattagttttgtttgaccagcatattattatgtttaacaagcttgttacatacatcgttcgtatgtatcttgcatattatatcactgttaagtattttctactttgttgatcagtgtttgaattaaacttctaaaagtgtaagaatcattaaaatctatttttgttatgttatatatatttaatataaatccaaagtattaattaatagggtaaatatatttttaaataagattttttaagttgctatatgatttttttcttatagctgtcacaagatgaaggtagaggcacattatacaaatacagacctgaagaagtagatattgatgtaagtattagtatgatatatgtggtcagtactctgtcgtattctccgccaaaaacactggaaataagcatgaccaaaaaacttctttctcccaagtcctccaaagtgacatcaggtaaattcatattttatgtgtgtgctctaaattattattccctgccct

SEQ ID NO: 9120 - DNA, 2300 bp, Homo sapien
ttaaacttctaaaagtgtaagaatcattaaaatctatttttgttatgttatatatatttaatataaatccaaagtattaattaatagggtaaatatatttttaaataagattttttaagttgctatatgatttttttcttatagctgtcacaagatgaaggtagaggcacattatacaaatacagacctgaagaagtagatattgatgtaagtattagtatgatatatgtggtcagtactctgtcgtattctccgccaaaaacactggaaataagcatgaccaaaaaacttctttctcccaagtcctccaaagtgacatcaggtaaattcatattttatgtgtgtgctctaaattattattccctgccctctacgtcccactgctccctattgttagcagtccaacgttattaagcatcacttaaatgaaagtaaaaactgtttctgatttttagaagttacagattggctggacacggtggcccacacctttaatcccagcactttgggaagccgaggcgggcggatcagttgaggccaggagtttgagaccagcctgggcaacatagcaagaccctgtctctactaaaaatacaaaaattagctgggcatggtggtacacgcttgtaatcccagctactcgggagtctgaggcctgagaatctcttgaacccaggagggacaggtgcagtgagccaagatcattccactgcactctagcctgggttatggcgtgagaccctgcctcaaaaaaaaaaaaaagttatggaagactagagactggagacgaattgctgtgtttttcagataaagttcggcctttagaaattttatcactactcctttttaaatttagtttcttttaaatcatattttagattgctgatttgccatacattcttcactcattatacccccttttcttttcttttcttttcttttctttttttttttttttttttttgagtcagggtctctctctgtcacccgggttggagtgcagtgtcatgatctcaactcactgcaacctccacctcccgggttcaagtgattcttatgcctcagacacccaaatagctgggatcacgggagcatgccaccatgcccagctaactttttgtatttttttttttttttagtagacagggttttgccatgttagccaggctggtctcgacctcctgacctcaggtcatccacccaccttggcctcccaaagtgcagagatacgggggtgagccaccgagcccagccccctactttttctttttaacacctttcattttgtgtaggctgagtcttgttgtctgacaaagataaggtagttattttaatagataaatggcaaagaaagtaaagtctcaaatttcttgcttatgtgtcattatgccataaagttggggacatatttccaatttgtccagtgttttcattttgaaacattaaaactggtttattgtactattgaaattttattagaatactttcttgtactttcataattaagaaattagggtaatattaagaatttaaacactaaaaccctgatgaaagttatttttctccattaataatatttttatttgtatttcaattagaagtgatctattgtttatattattttctaagaatctaagagtgtgttttttaaacatataacaatagaatccagtaagcattttaattaaggactgcatattatcacttaacctatttagcagattgtagaggcaaaatgcttgcatgcctattttttaaggattctatctttgtaagctatattttaacttttattgattgaaatatagatttttggtcatataatgactgcctacctccaattacagaaaaaataaaaaattgctaacaagacatcttctcttataacctaggccaagttaagccgattatgtgaacaagataaagtggtgcatgctctggaagagaaacttcagcaactccacaaggagaaagtaggacaattatgtttattgtctacaattgatgttacttaatatgattattatcaggacactgataagtaaaaagaattaatacaatgatgcagaacattaagtgtaattctttttatcataatagtacacgcttgagcaagctttgctatcagccagccaagagatagaaatgcatgcagataacccagcagccattcagacagtggtgttacaaagggatgatttacaaaatggactgcttagtacgtgtcgagaactttctcgagccactgccgtaagtagattttttttttcccctaataaaagtagcttaaatatgtagtt

SEQ ID NO: 9121 - DNA, 2300 bp, Homo sapien
ggcttcctcagatgctggttgtagtagcaaggtacaggctgtgtacattgtttcactgtctcttgtggggctggaatagcagaggtctcacgaagcttacctcattccccaatgtgcacacttaaagaagtttttcccccagtattttattcactgggttgaacagttcaggcttcaagccagtaggagttacccatgggtagaaactggctgcagctaaagcaggtgggtaaatgcaataccccaatgattggcagaggccccactcttgacagaggcagctgaggaggctctcagcgaaacgcactgtcttttcagggggaagagagggagccacctcagctcccttgccaggtcagcaggaagcggatctacctcctagttacacttctgacccagcattccgactgttctggtgagacaagcacctctgttcatctgcaggaatgctgttgttccacatagagagggactgcgactctccctctcatgcaagcctgaacctggatggcactcctcctgtggggttgcagtcaccctatagtgttccagaaaggttgtctacgaatgcacctatgccaagttctcatgggggaaggtccagctatgtctgcagtggtgggaaagggagaggagaagttctcttctccaagacccttcatgagtgccagggatgcttgactattggggtagggccacagactttcctcactgagcctaccactgaacctgtggctttgctgaaagaaacttcccacaagtggaaatactaggaactcaagtcctgcagcctggtttcttttgtcccagagggtgctcccttaaggtagtacacttccctttcccctaggagtagcagtccctgagggccagactactgtgaatactgctcctctgggtctagctgctcagtggggctgtcacactccagattggtgctggggaatgtctgcaagggatccagagatgtgacctgtcctcaagtctcccagcagcaggtaccagcaccagctctgatggggtcaggaggagagtgacacagactctgagatttccttggttacaaatggcttagtgtgttggcctcctcaaatgccagctgtcgtagtaatgtactgggcatgtggacagactcaagacctcctagttagccaaggtgatgcaggcagtggcaatagctgaggtcactcaagttttctccttcctgaacactgcgttattgtgtctgcaaatgtactgggctgcactggttggcctccagccaggaattggtgcttgcaaaaagcgccagctgtggtggtagcaatggaatttgtgcttgccttatgtcacccaggagaagtactctggcctctcagaccatgggtagggccatggagctccactcctaaatgtcccagtcccttgtgttacactatctgtgcgggtggattggcaaaaccaggtgggggctgggtcaggcaagtccaccctccggctccccagatgtaggcacaagcagtggccttagtggggatcagagggaagtttcctggctgctggagtaatgttccagggaaaagcacagctgcctctgctgcacgaaagaatctgcatggggaaccgagggtagcaggcggcagtaagccccaaacagctcccacccgcagtgttccactagcaacagttaggtaggttccaggcagcctgcactcagaactcaaaaatgctccaggccggcggggcgcggtggctcacgcctgtaatcccagcactttgggaggccaaggcaggcggttcacgggtcaggagatcgagactatcctggctaacacggtgaaaccccgtctctactaaaaatactaaaaattagccaggcgtggtggctggcgctgtagtcccagctacttggaggctgaggcaggagaatggcgtgaacccgggaggcggaggttgaaatgagccaagatcacggtactgcactccagcctgggcgacagaaggagactccgtttcaaaaaaaaagctccaggccataagccttcctagagagatagcaaccctggctttcaggccacgcccctcccagcgtccacctgtaaagcaagggcaaccagctccttcgccgcacttcccgctcgaccctcggttctggacaacggagatcgtccccagtcaaggtgattatatcgcagatctcacttgggagcttctcttaacctgtgaccatcgcctgagttagctggccgacttcccagcggtcctttgtgaggtaggatcaggaatggcttccctctgtccctgcgtgagtctgggagtgc

SEQ ID NO: 9122 - DNA, 2300 bp, Homo sapien
ctcaagtgagcctcctactttggcctcccaaagtgctgggattacaggtataagccaccctgccggccttctgatagtttttaatttacagtttacagtgtatttcactttaatacattccttatctaagattgcctttgaggtttaaaatgttggaagttaataccttacattgtatgtgcctctgaaggtatctgtaaatgatgtcccatgttattatttttgcattcccttagaggcaacattttatataacagttgtccaaaggcctaaggcagaggatgtaatactgggtactcacggtatatgacgactttcccaaatgggaaatgagcatggaggctctgttttcaggcagtcagttctatcctcattttccttgagtagaagcatccctaaaattggcctgaaaatgtgtccttgggtcagggtgtaatgtgggctcttttccagtctcctttcttccaatgacctcttccctactttacaaaagaaaggcataattcttcctcatgctaaatcttagtaaggtgcaatacccggttatgcaaaaacctccaggacaccaaagaaaggcacaattgactggtgaataagaatggggtaacacatcctttcacaagtcaggtggttttcagttgcttgctttcaacaagttgaaagagaacctaatcagagttgtcagctgacagatcattaaaagtattttttctttgttagatctttatgcgatttttgggcatataatgcgaaaggcattcaaagaattgtgtggcattactataacaaaactccattcattctcatctgctttttttatgcgaacaagttttctcaacacttatatccatggaattgaaaacttggaatagaactgatgctgaactatttctcaaaaaaatccatccactgaaggtcataatgtatattagaaaaaagtccacccaagttcatttctgcaagatgcattgccaataaaattttgcttttgtgtttagtacttacaaacatttgaaatagatttgttttgatcggttgaaataagagctttatgatcacagaaaatataaaaaacaacccagatacttcaatttatgttcacatttttattacaagtaagacgatcaaaatagttcaaatataaaatatattactaggataaaattctagaggagatatgcaacgtcaatatgagttccagaaaacaatatttggaaattgtattttccaaactgtattttaaaaaaatggatattagtgggtgttaaatccctatggtatttagaatccattggctatacagtatttaaacaatgcgacagatgaaatatttataagccggaaaaatgtagctgtcattctaaactgtataagaacatacacagctttacgaaattgttttagaaggctcatgaagtaaaaagtttgaggaccctgaaccaagatgtttgctctgggttcaggatgtcaacatctccaggggtattcaaacatagggtgtattaaaacctgtcgccctgtgttgcgcataaaaatttagtaccttacaccgtagtgttttaatttttgcccattttaaaccgctctcttcgtagactgtaggctcgttctattcctggctcagctcctgtacagaggggacactcctcaaacacccccggaatgaatgagtttatcgtgagaactcggaaggctgctaaaatccccggccagcgttggagttttcagtccgcgtgtccctgggcttcgaagcccggcagggcgtgggaaggccccgaggaaacgctgagcacttgcaggcgccggggcgggggcgggggcgggcactgggcagcggggcgggcgccgggcgggggcgggggcgcagaacccgcagccgggggaggtgctgcctcgtgccgccgcgcaggcgcgcagcagtctccgtgtgagtgcgcgtagtcgcgcgcctgtccccgcgcgggctccgtagcgcgtgtgcaggctgacgcagctcgcgggccctcctcctgctctgcagcggcgtcggcggagttttgggcgtttgggaggggggcgagggagagagagtcgagagagggaggcggcggtggggaggaggaggaggaggaggagcaggcgccgccatggccgccgctatcaccgacatggccgacctggaggagctctcccgcctgagccctctgccccccggcagcccgggttcggcggcgcggggccgggctgagccccccgaggaggaggaggaagaggaggaggaggaagaggaggcggaggccgaggcggtggcggcgctgctg

SEQ ID NO: 9123 - DNA, 2300 bp, Homo sapien
tgctaaatcttagtaaggtgcaatacccggttatgcaaaaacctccaggacaccaaagaaaggcacaattgactggtgaataagaatggggtaacacatcctttcacaagtcaggtggttttcagttgcttgctttcaacaagttgaaagagaacctaatcagagttgtcagctgacagatcattaaaagtattttttctttgttagatctttatgcgatttttgggcatataatgcgaaaggcattcaaagaattgtgtggcattactataacaaaactccattcattctcatctgctttttttatgcgaacaagttttctcaacacttatatccatggaattgaaaacttggaatagaactgatgctgaactatttctcaaaaaaatccatccactgaaggtcataatgtatattagaaaaaagtccacccaagttcatttctgcaagatgcattgccaataaaattttgcttttgtgtttagtacttacaaacatttgaaatagatttgttttgatcggttgaaataagagctttatgatcacagaaaatataaaaaacaacccagatacttcaatttatgttcacatttttattacaagtaagacgatcaaaatagttcaaatataaaatatattactaggataaaattctagaggagatatgcaacgtcaatatgagttccagaaaacaatatttggaaattgtattttccaaactgtattttaaaaaaatggatattagtgggtgttaaatccctatggtatttagaatccattggctatacagtatttaaacaatgcgacagatgaaatatttataagccggaaaaatgtagctgtcattctaaactgtataagaacatacacagctttacgaaattgttttagaaggctcatgaagtaaaaagtttgaggaccctgaaccaagatgtttgctctgggttcaggatgtcaacatctccaggggtattcaaacatagggtgtattaaaacctgtcgccctgtgttgcgcataaaaatttagtaccttacaccgtagtgttttaatttttgcccattttaaaccgctctcttcgtagactgtaggctcgttctattcctggctcagctcctgtacagaggggacactcctcaaacacccccggaatgaatgagtttatcgtgagaactcggaaggctgctaaaatccccggccagcgttggagttttcagtccgcgtgtccctgggcttcgaagcccggcagggcgtgggaaggccccgaggaaacgctgagcacttgcaggcgccggggcgggggcgggggcgggcactgggcagcggggcgggcgccgggcgggggcgggggcgcagaacccgcagccgggggaggtgctgcctcgtgccgccgcgcaggcgcgcagcagtctccgtgtgagtgcgcgtagtcgcgcgcctgtccccgcgcgggctccgtagcgcgtgtgcaggctgacgcagctcgcgggccctcctcctgctctgcagcggcgtcggcggagttttgggcgtttgggaggggggcgagggagagagagtcgagagagggaggcggcggtggggaggaggaggaggaggaggagcaggcgccgccatggccgccgctatcaccgacatggccgacctggaggagctctcccgcctgagccctctgccccccggcagcccgggttcggcggcgcggggccgggctgagccccccgaggaggaggaggaagaggaggaggaggaagaggaggcggaggccgaggcggtggcggcgctgctgctgaacggcggcagcggtgggggcggcggaggcggcggcggaggagtggggggcggcgaggcagagacgatgtcggagccgagccccgagagcgccagccaggccggggaggacgaagacgaggaggaggacgacgaggaggaggaagatgagagcagcagcagcggcgggggtgaggaggagagtagcgccgagagcctggtgggcagcagcggcgggagcagcagcgacgagacccgctcgttgagccccggcgccgccagcagcagcagcggggatggggacggcaaggagggcctggaggagcccaagggaccgcggggcagccagggcggcggcgggggcggcagcagtagcagcagcgtagtctccagcggcggcgacgagggctacgggactgggggaggcggaagcagcgcgacctccgggggccggcggggcagcttggagatgtcgtcggatggggaacccctgagccgcatggactcggaggacaggtcagtgctctgaagc

SEQ ID NO: 9124 - DNA, 2300 bp, Homo sapien
cactgaaggtcataatgtatattagaaaaaagtccacccaagttcatttctgcaagatgcattgccaataaaattttgcttttgtgtttagtacttacaaacatttgaaatagatttgttttgatcggttgaaataagagctttatgatcacagaaaatataaaaaacaacccagatacttcaatttatgttcacatttttattacaagtaagacgatcaaaatagttcaaatataaaatatattactaggataaaattctagaggagatatgcaacgtcaatatgagttccagaaaacaatatttggaaattgtattttccaaactgtattttaaaaaaatggatattagtgggtgttaaatccctatggtatttagaatccattggctatacagtatttaaacaatgcgacagatgaaatatttataagccggaaaaatgtagctgtcattctaaactgtataagaacatacacagctttacgaaattgttttagaaggctcatgaagtaaaaagtttgaggaccctgaaccaagatgtttgctctgggttcaggatgtcaacatctccaggggtattcaaacatagggtgtattaaaacctgtcgccctgtgttgcgcataaaaatttagtaccttacaccgtagtgttttaatttttgcccattttaaaccgctctcttcgtagactgtaggctcgttctattcctggctcagctcctgtacagaggggacactcctcaaacacccccggaatgaatgagtttatcgtgagaactcggaaggctgctaaaatccccggccagcgttggagttttcagtccgcgtgtccctgggcttcgaagcccggcagggcgtgggaaggccccgaggaaacgctgagcacttgcaggcgccggggcgggggcgggggcgggcactgggcagcggggcgggcgccgggcgggggcgggggcgcagaacccgcagccgggggaggtgctgcctcgtgccgccgcgcaggcgcgcagcagtctccgtgtgagtgcgcgtagtcgcgcgcctgtccccgcgcgggctccgtagcgcgtgtgcaggctgacgcagctcgcgggccctcctcctgctctgcagcggcgtcggcggagttttgggcgtttgggaggggggcgagggagagagagtcgagagagggaggcggcggtggggaggaggaggaggaggaggagcaggcgccgccatggccgccgctatcaccgacatggccgacctggaggagctctcccgcctgagccctctgccccccggcagcccgggttcggcggcgcggggccgggctgagccccccgaggaggaggaggaagaggaggaggaggaagaggaggcggaggccgaggcggtggcggcgctgctgctgaacggcggcagcggtgggggcggcggaggcggcggcggaggagtggggggcggcgaggcagagacgatgtcggagccgagccccgagagcgccagccaggccggggaggacgaagacgaggaggaggacgacgaggaggaggaagatgagagcagcagcagcggcgggggtgaggaggagagtagcgccgagagcctggtgggcagcagcggcgggagcagcagcgacgagacccgctcgttgagccccggcgccgccagcagcagcagcggggatggggacggcaaggagggcctggaggagcccaagggaccgcggggcagccagggcggcggcgggggcggcagcagtagcagcagcgtagtctccagcggcggcgacgagggctacgggactgggggaggcggaagcagcgcgacctccgggggccggcggggcagcttggagatgtcgtcggatggggaacccctgagccgcatggactcggaggacaggtcagtgctctgaagcgtttccccttcccttcctcctcttgaactcccgggcccctcagagggggaccaaggcgacgttttgccgcgatccccctgctccccgaatcctcggcccctcccccagactctcaactcggaaatctctcgccgtcgccgccgcgcccctctcgcagcgcatcgcggcttccaactctcaaaccgttcccccccaactctcctttccccgccctctttcccctcggcgcttcgctcctcacggacctcaggacggctctaactcggaaacagtccccaaacgggcccagatcctctggcggagcagaagagggccttgatgtacacacgtcggtactcaaggttagcttcttccaaccgtgttcgggaacacttgtcagaactacaattgacaa

SEQ ID NO: 9125 - DNA, 2300 bp, Homo sapien
ttttatctcaaggatctccttttggctttttttattgcttcatgtctacatacaaaatacagtggcatattgaatcaattatctaaatgctctaggctgtaaatacactttaacctggaatgtcaagataattaagacaaaattggattattaagattattattagtgagggcaaatgacatctaagatagccatgttaaaagtggagtatcatattaaaaagacaactagatcccagggaacatcaatagagtttaagtccattgaacagatactgaattctttttcataatctgccaaaaaaaggttagcttgaaaattttcttttagtttctcaaatatcacactgctgcagtacacgaacctttactcattaataactaaggtcctgatttttttcatatgctttgctcgaagatgtagtattttgcagccatagacagtcttctaagatctctcctagtgttaacccacctatcctcacctctcccttgagatttttctttattttttgatgaactatctgggcttttaaactttgttaaccttttttgaggatacggtcacttaatctcaatgtaattttactttccacagtcaaaaactattgtgtaatactcatgcactggatttaaatgactgctgcctctccttcctttctttttatactattgtggtctaggtaaggctgattcttccatcatttgaaccaacaggccaggcttgggttctcataaagcagaccttccagcaggagcgaccaaaggatgacactgtcacctgaaattggactgctgttgtacctgacttgggaacatctttgaatcagacagtagaagtggctgtcattttcagggacagtagaaagtatgttggctctcatctgccaagtaggcaaacacaatcttttttttttttttttccttccaacgttctagggagctcagcctcagggctagccgcagccccccacaccccggggctgcggtgggctgcgcggtggatcagcctcagcagcccctgctccagcctgtagggtgaaccggccgctttcccagcaaaggagcaatcgagctgagggtagcgcctcctccgcaggagggggcgggagctcggctgagaaagctttcctagggagttgccttaaagaaagaaagcggaattgtcgatcactccagttgccagttttatacaattttaagcagtcgtcgccactcgtttcccctttgcaaaactgcaaatcaccaccaaccttgcatcaaatagaagtggggagggaaaaaaaaagcaaatctccttctcccttctcaccctccctttcttctcaccctcccttcctctcttactcgctccttctccctccctcccttctgcggctgccgctagtctctcggtctggctctctctccgacgggacttagcaacttcttatttctcagccccttgtccatttttttttttccatcctttgccatgaattggattgacagaggcgggggaggctttgctttctgccccagggaatggcgattcgcgtcctggggccgtgccggggagaatcggccgaggagaaagaaagagtgatagaaaaagagctgcaggaaggaggagaagggagacctccatctgccgcgggcccggcgcgctgcagcgcagcgcagcgccgagctgcgcctcggaatggcccggagcccgccctgcgcccccggctcctccagcgtcagcggctcctgcgcgcgggatgcattgggcaatttttgaaatcctgaagtaggaagagaccccggaggatataagtcgggggtgggggtggagcagagaatctgtgaaagatattcaaagagagaaaaggggaatcctgatcgtttctgcccgtgcttgttttcaacttgagcgtgctagcctttaacttgaagaagtctcattggagcatctagcattctccaggagttattcgaaagctgaaactttcagtggattgtgggcctggggagaagaaggattccgagggtggaattgggaagagcgtgcgtgcgtgtgtgtgtgtgtgtgtgtgcgcgcgcgcgcgtgggtcggggcgggggcgtcggggggccactgggaattcagtgaagagggcaccctataccatggcagtgcccggcgacgctgcacgagtcagggacaagcccgtccacagtggggtgagtcaagcccccacggcgggccgggactgccaccatcgtgcggaccccgcatcgccgcgggactcgggctgccgtggctgctggggagacctggtgctgcagccgctccggagc

SEQ ID NO: 9126 - DNA, 2300 bp, Homo sapien
gatttatctgaggtgagctttgcctgggaagatcaataaattgaaagagaaacaggagaattgagggtatacagaaggaagtgattaaaataattgcatgaaaaaattcaagtaaggaggaaaatgaaaatatgagtgtactggcttgaattgtgtctcccaaaaagatatgaggaagtcctaacccccggtacctgtgaatgtcacctttcctgaaaagagagtcttagcagaccttatcaagttaagatgaggtcatgagggtggtccccagccaaagatgactagcgtttttttaagtacagaggacagagacataaagggagaagatggccatgtggtaacagaagcagctgttggagtgatacacctataaaacaaggagttcaggctgtcagcaaacaccaggaggtggaagaggtaaggaggattcttccctacaggtctcagagggagcatggctctgctgacaccttgatttttgacttctggcctccaaaagtgtgagacaataaagttctgttttaggtcactcagcttgtagtactttgttagtgcagtcttaggaaatgcattcatttatatgttgtctgtggttaatttaccaccagaatggcagaggtgagtggttgtgatagagattgcatggtcctacaaaacctaaaatatttcttatttgtccctttatagaagtttgttaactccctcatctagagtttggaaatgggaatgaaaggctgaagtaggctacaatccaatgcaaggttgcacataagaagctctgaataagtgtaaacattatgtgcattcaaaacagtaacattaactgtggactctggaaataagaaaaggaatcgtgttggagagtgagactgagccagttgggaatagacaaaattacattctcaagggagaatttcatttcttggtgaggaaaattatgccctttgggctggtaaatactgtctcctcttgaataaaacagtggtctggccacctgttagacactgagaagtctagactaacactcaatgtattcggatgtttgctcactatttccgatggaaaagtctggtttgattgttaaagtaaaatatttggcctttcagagtgtgaaaacaccattgcttcattgcaaggtttaatataaacccatttttcttgcattttcttttctttcttttgtagtaaaatgtgcttgaataatattaactattctgaccattatgtgaactaaatatatatatatataaaatgatgataccttccgctcatttgcaatgtgcttttgaatacattatataatttaatccttaaaacagccctataaatctgttttttttttttttaaacaaaaaaattctgctttacaaaggaagaagttgagactcagtaaaattaagtgaccatcccagagtctcagccacttaagagtagggtgaatcttggataattctggtagcaaatttatttattggtagaaaataaatgcaaactactactgcttaagatcctctaaagtttttctcttggaaaaagaatgtattagaattgtggactttctcagtgcaaggatttatttatccttggaattaggcagaataaacaattgaatgccaaaaattcaacgtgtttcttttctgttttcaaaactcatagaaattgtaaatatgagcaactgatcatgtctctgagaattaactctttttgtacagagcgctgcagagctttgattgtgacctgatacttggtccttaaagattctagaacaccaatggaaaagaaaaccatgtagcaaattagcccaagaaccgttaaagacaaaacaaaacaaaccaaaaccaaaacacacaaacaaagaaaacacaaggatcccagtgatgtccctaaggaatagttggcttaaaaactttctggaaggaggaggggtctctgttataaacttccgccctcctctggcttctgttccttaccctctgccccctgcggagttgtgttttctgggaatcagcaagtaagatcacaagtggtcttttcttttattcactctctcccataaagaaagctttatcacgtgtggccttaaacttgcagcaaattgcaaagaaatggctcaaaagcttcagctctttctgtgccctgggagctgagatgcacgtcagtggccttgccagcgtggccaattctctgctgactgccagaaaaaagaggccaggaagaaagaggaaagagaagagatcgctcaggggtgagaccatgcccttcatcttttcttttccctaatctcctctgcttgtgtc

SEQ ID NO: 9127 - DNA, 2300 bp, Homo sapien
caatagatccctctaactatggtgtcttcatcatccaaatctgaactgtgcacttcagaaatgtgtgagctaaataaaggagttggatatgaagtataaaaagcttccccacttaatttagcatagaggggaattcagaaaactagacaccctgcttcccaagaagataagtgaagcaatatgccaatattaccaatatagaaagctgcattgtcttcactggcaaaatcatccaggtaggcaatgcccaaaggctgaatgggagtttctcctattccacgaagaagattgcccaggaaaacataaatccacatggaagagctagtgtccacttcacattcttgaaagaaaggcaaaccagaggattgaaaatagatcactttaaaagttaagtatttattctgcatttctaccgtatatcttaaactgaactagaatgcaggagtttttgtgcaatagtcttaatttgatgggagtttggtcaagttctaaaaatgttttataccttcaaccttttaggcagagtaaatccccaagagacttcaccaaggaactttattgcttcttgttcctgatccctttactttttattctctctcttcttctcatttcattcctaccttgagctatttgagttcccacactacaatgacattcagtatctatctggggcaaaacagaaaattttgaacaaagtctttctcaccttaatttttagttcttttgaacaagtctttctcaccttaatttttagttctatttttcagcagaaatcataagtaatcttattgttgacccagttttatctgaaattcaaatttttatatggttgatattccaacatttgggcagtattgcctacatttatatttgtttgttagtgaataaccatttttaggactctggaaacaaatttacataaaaattataaatccctatactttagcagtatagttattccaacaaaagaaatcatttgacagcatttttagagtaaaattcaaggctaaccatttttaaatgctttcataaaattcatgtcttaatatgatcatgtgcactaggataattacccccatatcataaatgaaacatagctttgaaggtttaggtgctttaataaaattgataatgttaacaacctccaacaatcatcactgctgaatgttctttctctgctacgtgctgaactaagtgctttgcaggcatttttaaattgaatcttcctaacaatcctatgaggtaggagttatctttacctgttaataactcttaaactaatttttgattgtgaagaatagattatgtgaagaactaaggtgaacacctttgggcaagtgaatcagactgcataactaacagaaaagactcctttgcactcacgtggattctatctgactctgcctcttctagaaaagtttaaatgaccatggaattttcacttgtcttctctggatttctattctgcttccaaaaatatgatatgaattccttttctaaaaattaactctaatgtgcattctagccctagcaattgtataattttaagaagcttgttggtaggcgagtcttcttgtagagaagtgtaggcaccttaggtctgtgctttttaattcaataaccataagccacatgtgactattaaaattgaaattaaataaaattaaaattcactttctctgtcacactaactatatttcaaatacccaatagtcacatgcagctaggggctactgtattggacagcaaagatataagacattccgatcatcacagatagttctgtggacagctctgctgtagattgttgcaggggagatgaggattctatgtggagtggttttgagaagatccttatcagctttaggatgagtcttgtgtccactatgtctaacgaaacagactttaagggaacaggagctcacctgaaggaagggaaataattgagttatgagtcattctctgtatctgtctgctaacttctccctttattaaacacattttaattactgagtctaagccctatgtttcacctttcacctttttacattacaggtttaaatatttcctaactagttgtgctgtcaaaagaaaacatctggccgggcgcggtggctcacgcctgtaatcccagcactttgggaggccgaggcgggcggatcacgaggtcaggagatcgagaccatcctggctaacaaggtgaaaccccgtctctactaaaaatacaaaaaattagccgggcgtggtagcgggcgcctgtagtcccagctactcgggaggctgaggcaggagaatggcgt

SEQ ID NO: 9128 - DNA, 2300 bp, Homo sapien
agatacttagaatggtgaaacaacttaggaaatttatactgctgtcaagtagcagagacattggtatcaaagtttatcaaacttcaaagcccataatatttcatcagaactgtgatgattattgcggcaacaaacagcagattgttttaagcaaatttggagttgtattgatccacagctgttagcataatatttatcttgaaaaaaagtgttgcaatgtgtttcctctgaccactcttattttttccacaagtcccacaaaaagggaagtctaattacttacataggaagaaaaaagggcacagagaatgctctttgacttctgaaaacattccagaattttaccactgatagcgttagtttagggattagaaagtttctcagtgcatttgtactattttatcttcattctatgcatgtatttgtcccaaatgaaattgatgtgtcttgaatgaaatggatgtgtgaggagaaaaccattagcatgagaatatccaaactgtcttcccattctgaataaaagaaaagccataaaactgataattaatgtttagtatctctgctatgatggttctcaaaagctgacagtatgtaaaaattattctaagtgcttatttaaaaagcataatctccgaactcgtgaatcagaatctcttgggtgtggggctggatcgcacttttgacaaaggctccccagtagattttgactcaacagaggggtgtttgggagcctatatctaattttccctgccccaggtctacacttcagtgttccccacattttctaatccttctctccctccacactccggttcctttcattattctaatacttccatgaattaaccaggtatagaactaatctaggctgggcgcagtggctcacgcctgtaatcctagcactttgggaggccgaggtgggcagatcacgaggtcaggagatcgagaccatcctggctaacatggtgaaaccccgtctctactaaaaatacgaaaaaattagccgggcgtggtggcgggcgcttgtagtgccagctactcgggagactgaggcaggagaatggcgtgaacccgggaggcggagcttgcagtgagccgagatcgtgccgctgcactccagcctgggtgacagagcaagactccgtctcaaaaaaaaaaaaaaaaactagtttatcaaataactgtgatatagaaattaaatacatattgctgcaactgtatcaacaactgtcctgtcagtgataaggggtaacaatgttttcatacatgcattctctctttgctatatacatacacacatacacataaatacatatatacatacactcatgcatgtgtgtgtatatatacatgtgagagaagactccgtttattatttatatttttatagtacacttctaaaacacagccatgtgcctgagatatagtagggagtcaaatatgtttgagttactgaattaattaatttgacttcatccttactcaagaaaagtttcaactgagtgaaggtcttccattctctaaagagcaagtcaatagaaggagatcattcttcctttacacattgatgtaaggaatatatcatacaaactagtcttgatttttgtcatttagaagactagtcttgtaattaattggcaatttagtattccatgtgagatatccagtgtccatgtacgtcatattagatccatacacatgtaacaagcaaagagggtatgttttattttttgaatgctaatgtaacatgtagggacattttaaaaaatcgccttgacatattttctatttggaatagttttaaatactttggataatgtgttgtatttgtatttctaaagaagaaaatcttatgcaaccaacttaattgaataagaaataaatcattcccagaaataatttattttctaatgttaacataatgtgtacattctgagaaattattaataaaatgtttaaaagataggcttctggggtgaactcctagaattagctaggtatgttttttctgtttgcctaggacaatgacctaataagatggttaatcatcattggactcataaaaacaaacaaataaaaagccaactaaccatttaaagtgagactttaacatcagaaaaaggatggacttgttgcagttgctgtagcattcaaagtcaaggtaagaaccgtcgaggttgtctaattaaaacatttcttttatgtaagaaattttaacaaatttcagtgaaaatgtttttggtagttatgataaatattacagattttatgctctgtgtcttctccacacttttgttctg

SEQ ID NO: 9129 - DNA, 2300 bp, Homo sapien
gttcccacctcctagagggcctgacagaagaggtacatatgctatgtaagtttccctcaggcatgaactacagtgctattggccactaattcaatgttaatgaatcaacagtatatactaaggtgtctttaaacaaaaacatacataaaacattatgtattaagttatgtattgatccgttgattaaaatattgtgaccaaagccacacagtcacctaacactgtatctcttctaggaatgatggattaatatttgcaaattcagtgttcccagcaactttatggaacataattattgcaaaacgtgagaatcaattgtacatataacctatatcatacatattatataatcagtatcctattacaaatcggatgcttatatagataacattgatatttacatacttagatatttacatatctaaggtatctatatgagcagctacatagcaagtatctacatagcatgtatccacatatatatgctatatacataacatatacctatatctatgttatgtgtctgcttatatactttatatacataaatatgtgttatgcatatatgtatgaacaagaatacatctctaaaccttataaatattccactgttctatataaaagagtcaactgacgtaaaaagttgactcattttactggtctttaaaataggggcttaataactctgaaacttatgatttctcatatactttgacttcaaaacttcacttgtaggaatttatcctacagatatgaccacacagaaaatgacatataacatattaagaacattttctaatatgaaataattagatataagctaaatagttaacgatatagaactagttacatatattatgaacaacagaataccctgctaccataagcaaaatgaggacttttattaatataaagtatatacagaagataaaaaggtagagtgcagtaatactggtatgcttacatttatattaaaagagaaaatattatgtatttaattaaaaatgcatattaaggctgggcgcggtggttcacgcctgtaatcccagcactttgggaggccgaggcgggcggatcaggaggtcaggagatcgagaccatgctggctaacacggtgaaaccctgtctctactaaaaatacaaaacaattagccgggcgttgtggcacgcacctgcgcctgtggtcccagctactcaggaggctgaggcaggagaatggcgtgaacctgggaggcagagcttacagtgagccgagatcacgctactgccctccagcccgggagacagagcaagactccgtctcaaaaaaaaaaaataaaaaagcataccagatttctggataaggggacaaaggttataagcagaatcttgccttttcttttcttttctttttttttttttttgcatttttcaactacatgcatgtattttctcttgaaaaataagtggataaaccctaaatacagtaagatcatgatgatggtaaggtcaagcatggccagagtctctctgagagatacttggaatatattttgctcttttaaacaaatccaaactttatctgctttttgagccttgttccataggcatctcctctatgaaactgactgaggctatcctaatcattattatttacattatttttcaacccattttgagtatccactatgtgcaagtcatcatttggcactttataaacttataaggataacgtaaacataaatttcctttcataaatcttgtaatctggatatgtagaaaatataaaaattttaatttctataatttaaaattgttgttcatacaatctagtgtgtggttttatattatttacttgtttcaaatttctctctatgaaaattatttttctaagcaaattataatctctttaggctaggagtttgtctctgtctttcctcctctgtgtccagcattgacctagtcctgtggtcaggaaatagcaggccctgaatgaatattagagaatgattgattgattgatattgagcttgtggcttttcctatttttaaattgtatattgttaaagtaaaataaattatactttttcttttttaacaggtgatcatttcaaaccaagcatcagcaacaattaaaaatattcacttggtatctgtagtttaataatggaccaacatcaacatttgaataaaacagcagagtcagcatcttcagagaaaaagaaaacaagacgctgcaatggattcaaggtagaatgggttttatattttcaaactaaaataagttaatggaaaatttttatgtatagaaaggccactaa

SEQ ID NO: 9130 - DNA, 2300 bp, Homo sapien
gagaatctctcatttctcttattattagggtgttctactcttgtgaccaagtacccctaaaatgctccatctccaattatcaccacactggaaatttgggtttcagcataaaaatttggggggaacacaaacctgaagttcagaagtgggtaatagtttaatagtagggctaaaggaatagggtaaggatgtagatgtgagctttaagagaaaggatgaatcaatacattttgttaaaataaaattggaaatgaaaacatctataaccactacatctcacattgatacagtcacttctgttggtcataaaattcctctttgcctccacaaagttcaatattttagctggctcctggaaatgctacctttgcgaatgtaccaccacccccctcccagttagcctatgctattcacatggaaataaaaaatagctcaccattgtggccatctgagaacagtgtctagcttcctataaatcagttaatgatattaatttaaaaataacaaccctgattatactcctctaacaatcgaatattgtcaccaagttagaaaatcatgctttactagtgtaatgataatactgttataggatattagacatttgtcagatgggtagattgcaaaaatgtacaagaaaaaataacccatcagaaagtgagcaaagaatatgaaagacacttctcaaaagaaaacatttatatggccaagaaacatgataaaaagctcaacatcactgatcattagagaaatgcatatcaaaaccacaatgagataccatttcatgccagtcagaatggcgattattaaaaagtcaagaaacaaaagatgtgaggctgtggggaaataggaacgcttttacactgttgataggaaagtaaattacttcaatcattgtgggagacagtatgacaattcctcaaggatctagaatcagaaataccatttgacccagcaatcccattactgagtatatacccaaagtattataaatcattctactctaaagacacatgcacaagtatgtttattacaacactatttacaatgggaaagtcatggaaccgacccaaatgcccatcaatgttagactggataaagaaaatgtggtacatatacatcatggaatactacagagccataaaaaggaatgagatcatgtcctttgcagggacatgaatgaagctggaagccatcatcctcagcaaactaacacaggaacagaaaaccaaacaccgcatattctcactcgtaagtgggaggtgagcagtgagaacacatagacacagtgaggggaacaacacataccagggcctattgggagttggggggcgaggggagagaactgagaggatgggtcaataggtgcagcaaaccaccatggaacacatatacctatgtaacaaacctgcattttctgcacatgtatcctggaacttaaagtaaaataaaaaataaataataaaaataaaaacaagaaaagaaaatgtggcatatatacaccttggaatactactcagccataaaaaggaatgacataatgtcttttgcagcaacttggatggaactggagaccattattctaaatgaagtaactcaggaatgggaaaccaaatattgtatgttctcagttataagagggagctaagcaatgaggatgcaaaggcataacagtagtataatggactctggggactcgggggaatggttgggaggggaatgagggtgacactacatatggggtacagtgtacactccttgggtgacaagtgtactaaaatctcagaaatcaccactaaagaacctctccatgtaaccaaaaccacctgtacccccaaaactcatgaactaaaaaaaatcactaaaaaaaaagttatagggctgacaagttccaacttgtacaggaaaaaagatgagtatgctttttaagataaaaataatgtttgtaagtaaagaaaaaaactattttaattccacgtacctataaacattatatagttctttaattaatcaattttctcttttctttctgctgtttttcagatcttcttgacactcctgtcattcagctatgttgctaaagcactagctggaatttttatgaaaatatcaaccactcaaatagaaaggagatttgagatatcctcttctcttgttggtttaattgatggaagcttcgaaataggtagctttttattttctattttaataaccatacttgcatatgttaaaaaaaaactgtttttaacacttggctctcagccaggtgtaaatttgtccctcatgagcaatttggcaat

SEQ ID NO: 9131 - DNA, 2300 bp, Homo sapien
agcctgacggttccctcttgaggtgtgcctgtggtacacacctgagaactctggggctaaaacctattggacataggttttacagatctacaggatacagatctcagagattttatttgtattcatttaatataaattaactgctctaaaatttataatatgcaaatatcatacaattaatctaattaggtgttgaatctataatgtgccaggcattatgtaaggcactttacatacactaaatctttattccaaatatagacttcttactttatagatgagtgcactgatgctcagaaatggtaaataacctactgatgtttatactgctggcaggtagcagagacatatcggcatttaagtctttcagacttcaaaggccatgatatttcatcagagctgtgatagccgttcctgaaaaaaatatcagctgattctttaaatcaatttttgtcatctaactgatgcgtggctgttagcataatattgatcttgaaagatgttttgcaacatctttcccctggtgtactcttgtttttccatgatcccacaaaatgagcagtctaattatttacacaattaggaagagaaaaggggcacagagaatgctctttgacctctgaaaatattggagaattttacaactggcacctttagctcaggattataaaggttgttagttagtttgtactgttttatcttcattgtatataatatatatattagtctccaaacatgttgatgtgttttcaatgaaatggatgtctgaggagaaaaccattagcctgagaaaacccaaactgtattcccattgtgaataaaaggaagtccataaaaatgatggaaaatgttctgcattcctgttatgatatcaaaatctggcagtacatgaaaatttttcaaagtgcttatttaacaggcataatctttggtctcctgagccagaatctgctgggtatgggactggattgctattttgacaactcgccagtagattcttactcagcagagtatttggaagccttactctaatattttggccttgggtctacatttctcagttctgcacagtcattcttcccctctacactactctttagtttgtctcatgattccaatactctcaataattaaccaagaatagaactaatcaatcagataactgtggcacagacatcaaatacattttgctgcaaccatatcaacaaatgtcccatgaatgataaggggtaaccatattctcatatatgcatcctcacattaccacatatatatatgtgcatatgtgtatacaggtaaaagtgtgtatatatgtatacatgtatgtttgtgtgtatatacatacatatatcttcacacttttctgaaatatatatatttatgtgagagaagggtctgtactttatttcagaagagagcttaatgtccaaggtataattgagagtctaaaatgtttgagttattgaattaattaaacttcatctctactcaagaaaacttttaactgagttaagctcttcctttctccacaagtcaagtcaataaaaggaaactgtgatattaataattctttcctgttttgatgtaaagaatctatcgcataaagcagtcttaattttcatcattcagaaaaatggtcttgcagttaattgggactctcttattccaggtggtatctccagtctccatacataccacgttagaaccatacttatgtaccaagcaaagagggtatattttaatttttaaatgccaatgtaacctgtaggcatattttttatttgtcttaaattatttcctatttggaagttttaaatacctggaataatttattgtactcatatttttaaagaaaaaaatcttatgccaccaacttaattgaataaacaagtaaaagccattcccaaaagtaaggtttacttgttaagattaacaaaaaataatgtgagaattctgagaaatataatctttaaatattggcaactggagtgaactcttaaaactaactaggttttatatgtttgactagagcaatgacataataaggtggttaatcatcactggacttgttttcaaaaagccaactactttaagaggaataaagggtggacttgttgcagttgctgtaggattctaaatccaggtaagaaccattgagattctctaatttttacatatattttatgtaagaaattttcacggaagaagattttgatggtcttgaaaaatattacgaattttatgctctgtgtcttccacacgcttacattctgagcccttaaaacatagtaaatattcct
